United States Patent Application Publication US 2023/0026259 A1 - sequence listing, part 83

SEQ ID NO: 188492 - DNA, 4809 bp, Homo sapiens
  Payload ID: 17085
  Gene Symbol: STX6
  Gene Name: syntaxin 6
  Uniprot ID: O43752
  ENST ID: ENST00000542060
  CDS Start-End: 487-951
gagagagagagagagaggagagagaggagagagaggagagagaggagagagaggagagagaggagagagaggagagagagagagagagagagatatatgccctggtcacgtgagcggggtgcggaagtcgtgtttcaggcggcgttcgtgattggccgcggccgagggtcccgggggtggggtcaggccctccgacgcttcgggaggagccgggactggaggctgccgagggggccggcgcccgagtccgggattcggccagtggtgctgagcgagtgctggaccagcggccgtcctgtgcacctggcctgtgcgcgtgcccgctgctcggcttcacccagactaaggcgcgggcagctgcgggaacaggcggggtgggcggagggagaccgggaggcacgggcgccctgtgcgcggaggaggtgaaggcggccggggccgggacgccatgtccatggaggaccccttctttgtggtgaaagggacatgaaagatcagatgtcaacttcatctgtgcaggcattagctgaaagaaaaaatagacaggcactgctgggagacagtggcagccagaactggagcactggaacaacagataaatatgggcgtctggaccgagagctccagagagccaattctcatttcattgaggagcagcaggcacagcagcagttgatcgtggaacagcaggatgagcagttggagctggtctctggcagcatcggggtgctgaagaacatgtcccagcgcatcggaggggagctggaggaacaggcagttatgttggaagatttctctcacgaattggagagcactcagtcccggctggacaatgtgatgaagaaacttgcaaaagtatctcatatgaccagtgatcggcgccaatggtgtgccatagccatcctctttgcagtcctgttggttgtgctcatcctcttcttagtgctgtgacggcggggcctctgggtgcgagttcctcctgcatatgaaccgaggggaggaggagaagctgagcacgtgtgacattgccgtctactcacattcctatcctggaaacatactgctgcactgacttttctccgtgtgaccccacaattgacatggctcctccatcccagcgctggaagggccagtgggaagaggaaatagatgtctgcactcctggctgcagctggacaacagaagccccatgccgcctgtccagttcggaggagaactagctgctgccttgccttccgggacctcgtttgctgaggagggacttacagactccactggtgttttgctgttgctcattccatgcatctttggcagctcttttcttctgctcagacccttccccgtgctcagacagtgcaccgctgtcccatctaaagaaacctgtcaggaatacgagcttctgggtatgtttcgtttcccattgctgtagcatttcttatcccctgagagctgatgattattgaggacagaaggctcagaaacagtttgtgacagaaaatgcagtgtttcatttttcagggataaatgctaagataaaattgcttttccaggtcatttttttttgtggtaagaataactaatggaaaataatgaaacaccctggggtttgggggtgctaacaacttgtggctttaactgacaggagcaattaaaaagagcaagagggttctgcattggcatagcttagggaagggttaatgatgtcgccacaggtcagctcctgatccttgccgacttgatgttgctgtaccagggcttcctccccagaggtgcagcttgcgttttgagggtgattgctacatatgttgttgctaaacagctcagtaacacacttgaatgaatttggataccagattgtcctcattacagttcttttactcttagggcactctacactgggggttggggttgggagtggttagtacatttattacatttattaagaaacgtaatgacataaaaggttagctctgggccagacttctcttactctgtgggtaatggcaaggatgtgtaggtaaacttggttcttttttttccctaagatgacagcttgattttatcatctgcagtcaaataactgagccaatccaaatttaaatgatagatgctttaattgagtttaagtagctgaaactgctgagacactaaactttaaccttctgatgactttttaaaatgcctcaaatgtgcacatgtatataggatatttttataacttccctgatgaataatctgatattaaagtagtatttggacccagagccagaactcggtggtggaggctgctggtctctcctcaccaccttcttttgcacttggaaagaacagcaacatctggatagagttctagctttgacttctcatttccttgtctttttgggtgcattcctcagcacactttttttttaaacctttttgttttgttttgtttgtatttcatgtggttttatttgggggttttggttttttcacccttttttgtgatttgcaatgatgtgcttgcccagctaacttttgaattgcactttttaataaatattcttaacaatttttgaagaaggatattttatctcatttgagatcatggtaggttaagaaaatatgcctgttgatgaaagctaaaagcaaatttatgaaactaaaagggtgattgacatccatgtttacactccgctctaatgtttgatatataaataagttattttcaaattaggaaaaaacagtgagtattacaaagggcttcagatgtttagagtactaggttatttatgttttacaaagtttgaatcttctataaactaagaaaggggatgatccttagatttgcattaaaatatagaagtcttttaaagtaaatgtgaaccttgtctaagtactgtaatccacacaacacattataagaagcaaaccagcatcttaaggaattataaaattaccctatttaaaagccatgctattgttctgctattaccagatttattgtgccacacaaaaggatcatgtgtgtcagcaggggccgtttggaacaaacctagtcattaatgagtaagatactcctgttagttcagggaccaagttttatgacccagaggcttaatgatgtttggatatatttcaaatcggcgtgcttacctcactgatttaaattattttctaaatagtggccattgtagacctgactcaggctgaagctaaatagagaacaatttagaaagttaactaacaatacagtgcattctacccgtagggccaccatgcccttctgcccctggctgatttgatcctgtgtctgatcccattgcaccctgactgggcagtccctacagaaccagtgttaatttgaagggcctccactcaggctccaaatgtggcagccaaagagaacaatccagggaacctacatttatttttaaggacaaatatttcctcctcagtggtcctaatgttcagggctttagagggaacccaggtggtctcttcaccctgtgtcctagaatgggagagtaagtagacagtggtgataaccccacactgcttataagtgcatctttatagtatttggggctttcctacccctttagccttctgtacctagtaccatattccagttttaaagaactggcagaatgtgatggataacagaggaagagctcaatttatgtttattggaagaacattttacttaaatgatttgaggggtgggagggagtgaactactgagtttgccagagtgaaaatccatctgaaaaactcagctacctttagtttttagtcctcatttttggtcttgtctctgcggactgtgaagaatcacaatgctctatatgccctggactgtgtggcaaatgcaggttgcagcgtgtgtgttacatgaggatcttccacaatttcagaatgcacgccagagctgaagggggaaacttggtaacttgcccattattctctgcttttagccagagttaaacagactgatgggtctggtagccaacaacttggcaacttccactccttctcacctcgtgagattaagggctgtgaaaagaaatctagtctaactccaacagaaatctgtctctgttaagtgttttaccttctgtaagtagagatggtagagccaagatttttcttttggtaatttccctgtctataaagtgagaccaaagggatatctgttccctgttacctttttggagaattcataacatttgaagatcaaaaaattgaatgataaatatgaatggcttttcaattctgtggactttgtaccatttggcttcaccttgtactgcaagatgaatttgtaaacaaaacaaaattggactgtctggaaagctaaagttctgaaatatggaatgtactgcctctaatttttctttgtcttcctctcactggcatttttttctctcccaggtttcttaagaataatgttttttaaaggaggctttttgcccatcaagaataaaaagaaataaaaccaaagggttaccggacttaagcccccgcagtcactgtgcgccatccctgagcaaagtccgcccctgaggacagtgcccctgccccagtgacaggccttactcctcccagggcctttgcttctaatagggggtggtctttcttttctttctctcctttttttttttttgattaaaaaataaaaccaaaccagaatttgctgaaagcaggtacctttcagtagctccgatcagagtaactcagcttagagatactgttactcaggacaacagtatgtacaaaagtctccggaaaaggaaaataaaacaacctgaaaagaattcaacttgaaaa

SEQ ID NO: 188493 - DNA, 1090 bp, Homo sapiens
  Payload ID: 17086
  Gene Symbol: STX7
  Gene Name: syntaxin 7
  Uniprot ID: O15400
  ENST ID: ENST00000367937
  CDS Start-End: 251-970
gagggccgctgtcactcagccccgcgggccaatagaaaaggggtgaaccccgccttcttcctgagttgtgctgcgggcatgcgcactgggcgtccccacgccaccgcccatcagctgagaattgcagctgagggctccggggtaggtgggtgacggcggtcggaggtgtaggagggagccgtggaggtccaggtgactgcttagaaaactgcacagcatctgatgaaattagcgaataagaacatcaaccatgtcttacactccaggagttggtggtgaccccgcccagttggcccagaggatctcttctaacatccagaagatcacacagtgttctgtggaaatacaaagaactctgaatcaacttggaacacctcaagattcacctgaattgaggcaacagttgcaacagaagcagcagtatactaaccagcttgccaaagaaacagataagtacattaaagagtttggatctctgcccaccacccccagtgaacagcgtcaaaggaaaatacagaaggatcgcttagtggcagagttcacaacatcactgacaaacttccagaaggtccagaggcaggctgctgagcgagagaaagagtttgttgctcgagtaagagccagttccagagtgtctggcagttttcctgaggacagctcaaaagaaaggaatcttgtatcctgggaaagccaaactcaacctcaagtgcaggtgcaggatgaagaaattacagaggatgacctccgtcttattcatgagagagaatcttctatcaggcaacttgaagctgatattatggatattaatgaaatatttaaagatttgggaatgatgattcatgaacaaggagatgtaatagatagcatagaagccaatgtggaaaatgcagaggtgcacgttcagcaagcaaatcagcagctgtcaagggcagcagattatcagaaaaaggattcctgcatgttgatgtgaggtacaaacgccattaaagaaatctacaactgaaccaggaatgaagaacggaacaaaattcttaaccattcggttttcaatgacagcattatgattttgtttgctctgtggttttgtttg

SEQ ID NO: 188494 - DNA, 15791 bp, Homo sapiens
  Payload ID: 17086
  Gene Symbol: STX7
  Gene Name: syntaxin 7
  Uniprot ID: O15400
  ENST ID: ENST00000367941
  CDS Start-End: 115-900
ccggggtaggtgggtgacggcggtcggaggtgtaggagggagccgtggaggtccaggtgactgcttagaaaactgcacagcatctgatgaaattagcgaataagaacatcaaccatgtcttacactccaggagttggtggtgaccccgcccagttggcccagaggatctcttctaacatccagaagatcacacagtgttctgtggaaatacaaagaactctgaatcaacttggaacacctcaagattcacctgaattgaggcaacagttgcaacagaagcagcagtatactaaccagcttgccaaagaaacagataagtacattaaagagtttggatctctgcccaccacccccagtgaacagcgtcaaaggaaaatacagaaggatcgcttagtggcagagttcacaacatcactgacaaacttccagaaggtccagaggcaggctgctgagcgagagaaagagtttgttgctcgagtaagagccagttccagagtgtctggcagttttcctgaggacagctcaaaagaaaggaatcttgtatcctgggaaagccaaactcaacctcaagtgcaggtgcaggatgaagaaattacagaggatgacctccgtcttattcatgagagagaatcttctatcaggcaacttgaagctgatattatggatattaatgaaatatttaaagatttgggaatgatgattcatgaacaaggagatgtaatagatagcatagaagccaatgtggaaaatgcagaggtgcacgttcagcaagcaaatcagcagctgtcaagggcagcagattatcagcgcaaatccagaaaaaccctgtgcatcatcattcttatccttgtcattggagttgcgattatcagtctcatcatatggggattgaaccactgaagttataaaggagcacactgtcgcactacattgtctaaattatgtaggaagattcctgtaatcatgtttttttaattattattttaaagctattgtataaaggatggttcccatactttgttatttttattgggggggttggggtggttcctttggattaaatctgatattttctaatactgaaagattttctaaatgtcactgctgacataactcccttggtcttcaatttaatagttgttaagtttttgcccacattgcatatgcctttcatttataatttatttaccctgcttgacttagttttgggaattcgtaaatttaaaggtgtgtgtattctgtttgcatctccctgtcactgtgacacacctagatgtgtgttacttcaattaaaattctcaaatttaattttgatttgcttcagcagggaaaatattctcaataatgtaaaataattaaggtctatacatgggttgtatttttctggttcacaacagcacaaagtgtctttcatttttttgttggttttcttttaagatcttttttaccctgaagtcggtgaatacttttctagtttatttgatactctttctgtgtatatattaagcttttgctgtagattgcctagtaaaattactaaggataggttgtttttacatatggtctatttaagtctgatgtttacgggggaaagtgtagttactaaaaatgtttaacataatttggaagaagagtatgaacaaccaataccaatacctattgcgtttggattcttaagaccccagtttgttattccactaaactagttatcttaaccatatcatctggttttgtgggccattatttaccttcccttatgtcttatagaataatggttaatatttttaggtcaaaattacttttggaaagtaactttcccacaattaactgtttttgagcacctgacaaaatttagtgtttaccttgcgtgccattttgtgtcatccttcattaaaaaagcaattggaggtttgccagttatctcacttccctttttaaatcaatgttgttttaatgcactaatctgaattctgtaaagaggattatcttagtttatactttgtattttataatgttcttgtatagcagctcggtactgaaggcggtgtttaacttggcaagctctgagacttcaaatgggaacaaatagtaagtagctaagtaaaccacatctttgcaaccaaaataaagatgagttaaaaggtatctggttaggcctatttcatgaggactatgctctggtgggaccacaggtcacctgatacttagtgctgtgctgcctgaaacctcagcatggagacatcaccacatgcactgtggccattcagcatctttctggagcaccagttcactccaggtttttattttagggtgtcatcgattttacctactttgtcagactggtagaagttgctttgcatatcagaaaaactccatttttttccacaaaagggattacagaaaactcttttgtgagtgagtgattggaacttagagactcctgttgccagaatcagactgccctagaacagaatggacaatgcagggaggagaattcacacaaacagcacctgttctgaggcctgtgccagcccaccaggcctgctcaaatgtggtctttacttcaagtgcacagaggcacatgaggtttctggtgataaaccagcgtcttaccgctgttttaaagtcccatccccatggctttcacaatcagttccgttttttttgctgtacttgataaaatgtttattctcatacaggtcaagtacatttacttctattcacagtgagtacccaataacaacaaaagcgcttacaaatttggggggcgtgattttagtacctttatttgaagtgtaatcattttaaattattattattttaactggggcagttatcagtggtttaaacaggaactttagtggcttcaatttgtttaagaaacatattaagtttgagggaaaaatttcccatgaaatatttggaacgtaagagtagtattgattagagaaaattaaataagaaacatagtatggtagccaaattttttaaaaaatcttgaacttttctgtaggtcagttttagaactgctgtgaaaagtgaaggttgccctgtggagattaaaattagagttgttttcataactgacagcatggtgaatccatttgagtcaaagtgaagaatttcctcatcaagtgactatacatttgtttttgtgtgctcaaaagaaatactcaaacacagactgatattaaccagccaggtaaattgaacgacaatgtggcattaggtatttggctgtttattggtcgttaaatactatggttttgcaatatgattgatggtaaaagagtgatgtcatattgatactagagtagcttgtttttttagtaggtgtgggaccatctcttttacaagtgcaactcagtctaggacagccatggatgcagtgtctggagttggaccctctgagcccgctggctgccccagtagcatctgcattggtgaccaaggacactgcactttgaagaggtcgccactgggttatttagtgtcttcactgcttttgttaaaaattgtaaaattttgtacacaaaaagttgtgtttttgaatatcaattgtttagacacacctacaatgataaataagtgcctttaaaggcccctctttccatgaaatacatctgtggtttagcaaggaaagtacaaaatagtttatgtagttggtataatttttatttgtgtcttcatgtagaaaaaatgaatgtcataataaaatataaaacttacgtaaagaaaataaagtcattgtccaccttaatagctaaggtccacaagggtaacttatgcagcatttattttttttgaaagtcaaaattgaatttatttctttcacatggctggtttgctgcaatatgaagtttcagaatgggctgaagtaagttgattgagggatttgagttgaatgacattttcaagttcatttaaatatgataaaaattcattggtggtaaataacatctgtctttcctggaaaaaaaaaagttgtgtattttcatgattcagttaaaacaaaaaatgagcctgtgaatcccaggcctttttagtcctccataacatttgaacagtttgacttgtcagcaaagaaatacacttatcaaattttaaaccaatgggagcctgaaagtgttacagtgtactgcttctttgacaaaattctgtttaacaactaccctaacataatttataaatcaattaagataaaaccatttttttctgagtatttaggaatttgtgtcctcaaaatactgtgacatgaaagataggaaagaaattacctggttgccagacatgcacgattatctttcctcatttcagctggattttccaaagtcagtagattggataaagcagcatctcattcactgaggtcacaagataggtaggaaacttctttaatgtgaattttgcatattttaacaattcagttagaaaaacagaaaccacttgatggattataagtgtaaagtgttttaacatagggaattagacatcaaaagggtgggtgaggaaggtgtctgcggccccaaagtgggtggatctcaggagctggcccaggcactgctgtgactcttgagaacatccagaaggctgtgctgttggcgtgcagcactgacagtgtgtctcagggagctgtccccagctgtcagctgttaatagctccaaagccagtgccttgcaagagattttgaaactgctgtgaaactcatgtcctctgcccgcctacacttctgtctgcagtggcctctgaggaaagatggtctctccttttctcatggtcaactctcaacttagaaccagagacagaaggagtttgtgggaagtgtggtttctggtctacctgcactgcagaggacattctagaaagagaagtgagttgacagtctagcataattgtgaaacaaacactgagatgtacagttcaaaccacgtgaagtggaagcctcagaattttcctcactttcattaaagattctttgatggaaaaatttagaagcattggctctagatggtaagcaagtcatttttttccaaccaaaataaaaaatacatatactaagcttctggggccccaggacttaacacagtttccttccttccttcccttcttccttccctcccgtagtagttgcttaataaatacttaatttggcacttatttggggccggctttttgccaggctactacatgcctgggcatagtgttctaagagtgaaccaaaagaataagcttcctgccctcagggagtttatgttttgttatttggcatataaaaagaacttggtgtgttaaaagaagggaaatagctgtgtgaaaggaatgaggcaaggaagaaagggaatgtctaaatataaatctccgtttggaccagcctcctgtttatccagttttccttactaagtaactgaatttcattttcttttcttaattgacagactaccagaaaattgctagttttctaaagagaaactactgatttgagtgatgatctgtgtgtaatggctccaaaaaggagccgttctcttggtggcagcagttggattcagagcttgggcatcctgatcatcaggacagacatttacaggatatgtatagaattactgccccaaatagagggcaaagcactagacagaagggtgagatccaaggggaatttggaatctatatttcatcagaatgcactcaaagcaaaaacagtaagtatgctccatataaagaaatgtttcttaaaatgtttttaatttaaccctacccatcccttggcaaatctttttcttttaaatcaaataggaataaagaagaaaatcttcctattggcccattttctcattattcaaataccatatcaatacaccaattttaattctttgtttttgtaatcatttggttaacatgaatattatgtaatatttttctccaaataatcctaattttaaatgcagaaatagagctaaataacacactaaataggtttttgtagacactgtagcttctggcaagtttttaagaggttggtcacttaattgcttagagtgggattcccgtaggttttgtgtagtgatggcatttatgcttaaaatgtaagtggtggaaggcaaaaccagatttcctgtccagtcgttacacgcacaacacctctacttgttgacgagggagttttctagaactgaattgaatctttaaataaacttgaaagggcattaattcccactttggccaacccaaagtacaaatttttaagtgtttactgtaagtatcgttaggcagtagttactaactccaacacctaatagcattggtagaaagcttataaatgcagttatttagcctcgactaagatttttctgatacctagtttcactttttaatgccctctgaaagttttttgatcagttgtttaatgggagatctgaaatgttaaactcagaccagaaagaagagaacctgttttctagaaattaggtttttaatccaagtaagatgcaagcttttgcttttttaataacttgtatagctaaaaacttgacggtgaaaagctctcagatcaaagctgatccttctgtcagtaatgattctaaaaataagcaagattttaatggggaatatattttatttcattcttatctcaaacctaggtactgtggtcgttttgagttcatttcgaggcattttcaatgtgcctcaggccacatccaacctcttcccagggccagatttaatgttcagcctcataaaggttatcatagttttaacatttaagtactattttgcagtgggtatataccaaaatttgctaatagtaagataaccttagttatatatcattcacgttagttctatcttggaggcaataaacatttcttgttcaagaaattcatgttctatcttggaggcaataaacaaacattttttgttcaaaattagggctaccctattgtccttatgtcttttcctgatctgtggtcaaacatttttcttagtcatttagaaattttctatgttgttttaaattttctttaaatctagaatggagtatgtgaccaatactttcctttggaatggtatggacatttgaaatagagcccattctttataaagtataaaatatgtttaatgctagtatttttaactaaacttttgagaaactagattcacatgctgttgtaagaaataatacagagacctctttcgtgtacctttcactttgtttcccacacagtgaacatctttcaaaactgtcatacaatatcatacccaggatactgacactggtatagctaagatagagaacgtttccacacagaactttttctagcacagggatccctcatcttgcttttgatgaccatacccacttcactcccatccctactcccttcttaacccttggcaaccataatctgttctccatttttatagtttttttttttttcatttcaataaagctgtataactggaatcataataatatgtaaccttttgggattggctttttttcatttagcatgattttctggaggttaatccagcttattatgtgtatcaagtctattgacaggtactttttagtgtgaatagaatcccatagtatagatgtaccacagtttgtttaactgttcacctgctgagagacattgggccagtttttggctactataaataaagttgctataaacatttgtgtacaagtttttgtgtgaacataatctagttttctgggtcaaatgcccagcagttatatagtagttgggtcatatagtagttgaatgtttagtttttaagaaattgccaaacttataccaagtagctgtactattttatatacccaccagtggtgtatgagtgatctagttgcttcatgtccttttcagcatttggtggtgtctcttttttattttagtcattctgataagtgtatagtgacagctcattgcagttttgatttaccattttcccttcgctaatggcaatgatgttgagcatctttgtttcatatgcttatttgccacctgtatctcttctttagtgacatgtttcttcatgtcttttctaattggattttttttctgttgagttttgagggcttttaaataatgtgtgtgtgtgcctctgtgtgtgtgtgtgtgtatttttttctagatactagtcctttgttggatgtgtgatttgcaaatatttcctcccagtcagtagcatgtcttttcatttctcttttctgggcctttcacagagcagaagtgtttaattttgatgaagtccactctatccatttttctttttatggatcatgcttctggtatcaagaactttgcctctctccttagatcccccaaattttctcttttatgttgttttctaaaagtattatagtttacgttttacttttaagtctatattccattttcagttaattttgtataaaatgtgagacttaggtctgggttcattttttttgttgttgcctatggatattcaattactccaacatgatatttgtcgaaaaggctcttttttgtccattgaattgtttttgcacctctgtcaaaaatcagttgagcaaaaatgagttaatgagaaatcagttgggcacattcgtgtgggtctatatctgggttttctattcttttccattagactatgtgtctatacctccaccaacaccaaaatcttgattactgtagtaagtcttgaaatcaaataggctggtttattccactttctttttcaaaattgttttagccacttagttcctttgtcttcccgtataaactttggaataatcttgtctgtatctattcaaatatcttactgggattttgacaggaactatgttatacctatacatcaatttggggagatttgacatctttaccatgttaagccttcccgatcatgatcacaggatcacttcacttcatttcagttaaattttgttttccttcatcagtattgtgtggttttcagcatacaaggtctgtacatgttttgttagatttatacctaagcaatttaatttttgagagagattgtaaatggcattgtattttgaatttcctgttcacatgtctattctaagtacatagaaataaagtgaatttttctattttgtatactgagaccttattgagcccacttactcattttaggggattttgattgattccttgggattttttttttatatagatagtcatgtcatctgcaaataatgaatagttttatctcttcatttctgacctatattccttttttttttcctttcagtcccttaatgcagtgggtagaaattccagcagaaataaaagcagtgagagtagagatccttggcttgtttctggtcttaggcagaaaggattcagtgtttcaccatgaagtataatgttagctgtaggtttttaaagtagatgctcttgctaaagttaaggaagttatcttttattcctttttttctgcaagtttttattatgaattttatgttgaattttgtcaaatgctttttctgccttaatttacataatgccatttttcttctttagcccattcatgtggtagatacattgattgatttttgaatgttgagccattgttacatccctgagataaactccacttggtcgtggtgtatctttgtatatatagcttaattcttttggctaatattttgttaaggatttttgcatctgttttaatgcgacatactggttggtggtatcagggtaatactagcttcaaaatgaactggaaagtattcctttctcttctgttttctaaagcggattgtatagaattggtgtcagcgctttttaaaacatttgatagaactttccaatgaaatcatctgggcctggagattttgggggagggagttctttttattgtaatttccacttttacaatagttatatggctgtttaatttatctatttcatattgagttgtgacagtttgtatttttagatgaattagtccatttcatctaagctctcagatttatatgtagagtttttggttgtattttttgttagacttttgatgtctgatattccaaaactccttcatttatcatttcctttctgtttagagcactcctttagccttattattattattgtagttccattggcaacaaattctctcagttttctttcatctgaaaatgtcttgattttcccttgatatctgaagaatatttacattagacatagacttgtaggtttatagttcttttctttcagcacttgaaaattgttctgccacttccagccaagaggggtggctcacgcctgtaagcccagcactttgggaagccaaggcgggcagatcacttgaggtcaggagtttgagaccagcctggctaacatggcgaaaccccgcctctactaaaaatacaaaaattagccggcatggtggtgcacatctgtaatcccagccatttgggaagctgaggcaggagaatcacttgaacccgtaggcggagattacagtgagctgagatcgcaccactgtactccagtctgagcaacagaacgagactccttgtcaaaaaaaaaaaaaaggaaagaaaatttcatggttccccatgagaaatccagttttttaaattgttttggtccctatagataggtgtcatttgtcttttttctttttctttttttcctttgtgtttagtttttagttgtttaaccatgatgtatcttgtagatttggggggtttattatatttgaggtcttctcaccatctatatgtttatgtcttttgccaattttggggagttttcagctgtcatttttttcaagaactttttcagtcttccttctttcttctttcttttgagactctgatgacacaaatgttagatttattgtagttccgtaagtccctgaggttctgttcatctttgttctgcctgttttcttctgttgttcagactgtgtaatttctatcattttatcttcagatttattcattctttctgcagtagcttccattctgctattgagcctatcaattaagtgtttcatattgattcctgcatttttcaattttaaaatttctggccctttaccgaaaatgttggttgacccctggagtataaacctatactatagaagagagtatcaatttttttttttttgagaggatcaatttaaacaaaagttggtctctttaaataaataaagtacacataacttggtgaaaccgatttggaaaaaaacagaagacataaaaaatttaggaatgaaagtacagataaataaccaaacatagattttaaaataataagacactataaacaactttatgccaatatatcacaaaacagaaaatgaataatttatatgaaaaatgcaaattaccaaaatcaactacgaagtagatgatttctgcttcctgccatatggttgactaggtatactcaaggatcctcctgctaaaatacagttagttcttggataaaatacaacacacataatattagttcatttcctggctcattagaaagaaagataatcactaaaggctattaccaatgagagtgggctaaaattaaagtagttgagaaacaggaaaactgtgcctctgagacttaagccatggactccaggcaaagtaaagaaagtgaacctaagattccttcataaaaccaggaatgctttaaagcattaaagtagtcctaagtcagtggactctggtggttactctaagaagtggatgaaaatcccctccgaaggaaagcctccctaattaatgcttctagattaatcaaacatgcaaggaaacacaccatttgcattgagaaacagtagatttagatattcaaggaattcaggtattgcaattagcagaagtagaataacagttatatgtttaaataatgtatgaattaaaacgaacatgaaatgagagatgtgttaaaaggcagatattaaaaagaaccaaagacaacttaggtatgaaatttaattattgaaatatataacataatgaatggtttaagagcagattcaccacaactaaaggaattgttgactatcaagttttaactgaggaaacaacatattgcagcaaaaacaggtaaagggatagaaaataagaattagagattatgagacctgaaggatagaatgggaaggtttaatatgtgctgattggagtctaagaagtaaaaaatagaaaaaaattgaggtaattgctgacaaatttccagagctaagaaaagcctgggacctggtatggtggcttatgcctgtaatcacagcattttgggaggccaaagcagaaggatcacttgaagccaggagtttgagatcaacctgggaaatgaagcaagagcccccactccatctctacaaaaaaaattaagaattagccagatgtggtgacatgaaccagtagtcccagctacttgggaggctcaagtgggaggatcacttgagcccaagagtttaagaccagcctgagcaacatggtgaaactccatctgtacaaaaaatacaaaaattagccaggcatggtggcacacacctgtggtcccagctactcaagaggctgaggagggaggatcacacgagcccaggagttcaaggctgcagtgagctatgatggtgccactgtaccctgtctaaaaaaaaaaaaagtggatccacatatacaagaagcaaaatgtatatcaaccaggaaaaggaagccaatgtatattcattatactcaaacttcagaacaataaaggcaaagatatcttaaaagcagccagaataacttatccacttttaaaggaataacgaattgacagaccttttttttttttttttttttttgagacagagtcttgctctgtcacccatgatggagtgcagtggtgtgatttctgctcactgcaacctccatttcccgggttcaattgattctcctgcctcagcctcccgagtagctgggagtacaggtgtgcgccaccacaacctggctaatttttttgtatttttagtaaagacgtgattttgccatgttggccaggctgttctcgaactcctgacttcaggtgatctacctgccttggcctcccaaaatgctgggattagaggcatgagccactgcacctggccaacagtagacttttcagtgccaaaactggaaggcaaaagacagtggaataacatcattaaggtactgagagaataactcaatagaatgagtgcccagtgaaattatctttcaaaatcaagggtatattaaaaacacttttttctcaaaatgagaatttacaaacaagggactttcacttaagaataaagatgaattttagagtacagcaaaatgactaggaggaaagtctgagatgcaagaaggtatggtgagctaaaaaatcagtaatcatgggaaatgtaaataaatactgtctatattaagaagtatttactctgtggagtaaaaaagagcgtaattaaaatactagcaacattttacataactcaggaaatgtatatgtggggaaagtgtccgggagcacttagaagttagtgtgagtgctccaagatcctgatactctttaggatggaagttaagataatgaatgactttagatgttgttaatctaagtacttaacagaaaattttcagataacctttaaagaatagcaatacaatataactttcaaaccagtagagaggaaacattctgaaataagggaaaaacactttagaaatcccaactttgatagaccacaaaaatgcaagaaggaagaaaaagcatagaaaaagcaaagaaatggcatagtatataataaatggttacaataaatataaattgcctatctcaccagattaataaaaaaaaaagtctaccttgttcaatatatacagtttacaaaagacagtacaaggacagagaaagacaaaaagtagaattagggaaaataaaacaagcaaatatacctggttaggatagctgtatcagtattagccttacaaatattaaagtgaaaagcattaataaggataaggagactctcaaaaataataaaaatttcaactgaagtaggtataacagttctaaacaaagttattaaagtaaaaatgtagagggcaaaacggaaaaaaaaactattatgttgtatttgaagtcactcaatttttagctcgagcagcaaaaaagtaaatagaacaacatggtaaccaaagttgattcaattaatacataaaggatcatgttcccccaatttagagcatgtgcatatttcttaagcatgtataaaagatttagaaggaaaatgataaaggaatgttttggggacctctgatagggaaagatttcttagaaaatctgcaaaagatattaaccataatctacataaagtcaactgttttatttcaagcctctctggaaatagttttgttgactgataagaaacgctctatgtcagtcagctaatcaatgtctagtgagtctaactctttccactacacagtaagttccatcttagggtgttttacttaaaagcctggtgtcaaatgttacacgcacaaaaacttattagtatctttttaaccaatgtatcttaggagatacggaattatttctaacacactggttgtatttactaattttccgctgagccatcataaaaatagaagtcacatcgtcactatttcttgcttgtccaacccagtgtctatggtaccctcggcagttattcatggctcctaggccttcttttagagtactgtctctcttctattggctttggatggaattgactccatcctaactgcagaaatgataggcactgctttacataaatcagtcagcctaatagcattctttttgcctcagagattggttcagagatggggaaaaacccactctaggcaatcagcttgtgacttactttcctccaattggtgatccaattagggcagtgtgtggaatgtgctgctctgtatgtgcagccagatgctcatgttcataaaaaacattttaatactgtgatggaagatacagcttcgagacaaagacacaagcttgggtagagtcattcattcatttagtaagcatttgctgagtgcttaataaatgctgggccctgagaaaaagcaaaatcttattcagcacattctgacattggggacaatgcgatagttgatagcttccacacttaattagaaacaaagattatctcttaaaacctcattcttgtatctaggaagacttttgttttcccaatcagaaattgtggttccagaaaaagaacaagacaatgaaaacattgtataaaaggtttctttcaaacttttttcaattgacagtttttcaccccaatcatcttgatgcagagaggcttcagaaacacaagtgactctgtgttcagaccaagtacttggcctcgagaagatgaatgatcagaccaactcaccatatgattataagggtcaggtagtttaaaaagaaattacaatctgaattgaaccatggatgaacagtgttgctattgagcttcgaatcccagctaataagcataaccttgtaaagagaggttactgtttgggaaactgcatgttcttgcaggagggcaaagcttttgcaatataaatagttgtaagggtactagctttcatctttaataccttaaccctctgtgtttagagtttttgtatccagggctgaattgagaattttagaaaccttgaacactgaagagattgtaataacaaccccatgtgtaatttataaaatcttcaaaagaaaatttactttttcaaaatgttataaaactctgaatactgaaatgaaaa

SEQ ID NO: 188495 - DNA, 1246 bp, Homo sapiens
  Payload ID: 17087
  Gene Symbol: STX8
  Gene Name: syntaxin 8
  Uniprot ID: Q9UNK0
  ENST ID: ENST00000306357
  CDS Start-End: 429-1139
ggtataatttacatatcataaagttaacttaaagtaggttgtagtgagtttacgcagcgtgcaagtctcaccgcaatctagtgttttgtttattgttttgtttttgaagcaggataaatttttaagtaactgctacagagaggtcttgcagcgctcccaccttcctgggaaaatgctttgtttctatttaacaattttaactgagcttagcagttcgcgtctcttggtgggagtagattgctccagtgtactgtccgcaggggagcgctttgctttctctgattatagttctgaggccctagctactcactttgcaaactccaggctccggtcgcgcacgggacgaactgcggggagtgagccgcgcgggccgccgtagtcagctgctaagagcaggaagagtccgagcggcgggcggagtctgcaggatggcaccggacccctggttctccacatacgattctacttgtcaaattgcccaagaaattgctgagaaaattcaacaacgaaatcaatatgaaagaaaaggtgaaaaggcaccaaagcttaccgtgacaatcagagctttgttgcagaacctgaaggaaaagatcgcccttttgaaggacttattgctaagagctgtgtcaacacatcagataacacagcttgaaggggaccgaagacagaacctcttggatgatcttgtaactcgagagagactacttctggcatcctttaagaatgagggtgccgaaccagatctaatcaggtccagcctgatgagtgaagaggctaagcgaggagcacccaacccttggctctttgaggagccagaggagaccagaggcttgggttttgatgaaatccggcaacagcagcagaaaattatccaagaacaggacgcaggccttgatgccctttcctctatcataagtcgccaaaaacaaatggggcaggaaattgggaatgaattggatgaacaaaatgagataattgacgaccttgccaacctagtggagaacacagatgaaaaacttcgcaatgaaaccaggcgggtaaacatggtggacagaaagtcagcctcttgtgggatgatcatggtgattttactgctgcttgtggctatcgtggttgttgcagtctggccgaccaactgatggcagtaaagagaccaccagcagtgacacctgccaatgacagatgcaagcccaacacccttttggtacgcaaaacctgctctcaataaattcccccaaagctctga

SEQ ID NO: 188496 - DNA, 494 bp, Homo sapiens
  Payload ID: 17087
  Gene Symbol: STX8
  Gene Name: syntaxin 8
  ENST ID: ENST00000573016
  CDS Start-End: 157-494
agaaacccagcctgccgagttcgagttcattagcattcttggaaatgaaggggctccggtcgcgcacgggacgaactgcggggagtgagccgcgcgggccgccgtagtcagctgctaagagcaggaagagtccgagcggcgggcggagtctgcaggatggcaccggacccctggttctccacatacgattctacttgtcaaattgcccaagaaattgctgagaaaattcaacaacgaaatcaatatgaaagaaaaggtgaaaaggcaccaaagcttaccgtgacaatcagagctttgttgcagaacctgaaggaaaagatcgcccttttgaaggacttattgctaagagctgtgtcaacacatcagataacacagcttgaaggggaccgaagacagaacctcttggatgatcttgtaactcgagagagactacttctggcatcctttaagaatgagggtgccgaaccagatctaatcaggtccagcctgatgag

SEQ ID NO: 188497 - DNA, 638 bp, Homo sapiens
  Payload ID: 17087
  Gene Symbol: STX8
  Gene Name: syntaxin 8
  ENST ID: ENST00000575858
  CDS Start-End: 28-162
gtccgagcggcgggcggagtctgcaggatggcaccggacccctggttctccacatacgattctacttgtcaaattgcccaagaaattgctgagaaaattcaacaacgaaatcaatatgaaagaaaaggtgaaaaggcaccaaaggtccagcctgatgagtgaagaggctaagcgaggagcacccaacccttggctctttgaggagccagaggagaccagaggcttgggttttgatgaaatccggcaacagcagcagaaaattatccaagaacaggacgcaggccttgatgccctttcctctatcataagtcgccaaaaacaaatggggcaggaaattgggaatgaattggatgaacaaaatgagataattgacgaccttgccaacctagtggagaacacagatgaaaaacttcgcaatgaaaccaggcgggtaaacatggtggacagaaagtcagcctcttgtgggatgatcatggtgattttactgctgcttgtggctatcgtggttgttgcagtctggccgaccaactgatggcagtaaagagaccaccagcagtgacacctgccaatgacagatgcaagcccaacacccttttggtacgcaaaacctgctctcaataaattcccccaaagctctg

SEQ ID NO: 188498 - DNA, 731 bp, Homo sapiens
  Payload ID: 17087
  Gene Symbol: STX8
  Gene Name: syntaxin 8
  ENST ID: ENST00000574431
  CDS Start-End: 263-640
gagtccgagcggcgggcggagtctgcaggatggcaccggacccctgcttaccgtgacaatcagagctttgttgcagaacctgaaggaaaagatcgcccttttgaaggacttattgctaagagctgtgtcaacacatcagataacacagcttgaaggggaccgaagacagaacctcttggatgatcttgtaactcgagagagactacttctggcatcctttaagaatgagggtgccgaaccagatctaatcaggtccagcctgatgagtgaagaggctaagcgaggagcacccaacccttggctctttgaggagccagaggagaccagaggcttgggttttgatgaaatccggcaacagcagcagaaaattatccaagaacaggacgcaggccttgatgccctttcctctatcataagtcgccaaaaacaaatggggcaggaaattgggaatgaattggatgaacaaaatgagataattgacgaccttgccaacctagtggagaacacagatgaaaaacttcgcaatgaaaccaggcgggtaaacatggtggacagaaagtcagcctcttgtgggatgatcatggtgattttactgctgcttgtggctatcgtggttgttgcagtctggccgaccaactgatggcagtaaagagaccaccagcagtgacacctgccaatgacagatgcaagcccaacacccttttggtacgcaaaacctgctctcaataaat

SEQ ID NO: 188499 - DNA, 454 bp, Homo sapiens
  Payload ID: 17087
  Gene Symbol: STX8
  Gene Name: syntaxin 8
  ENST ID: ENST00000575294
  CDS Start-End: 4-159
aggatggcaccggacccctggttctccacatacgattctacttgtcaaattgcccaagaaattgctgagaaaattcaacaacgaaatcaatatgaaagaaaaggtgaaaaggcaccaaagaacaggacgcaggccttgatgccctttcctctatcataagtcgccaaaaacaaatggggcaggaaattgggaatgaattggatgaacaaaatgagataattgacgaccttgccaacctagtggagaacacagatgaaaaacttcgcaatgaaaccaggcgggtaaacatggtggacagaaagtcagcctcttgtgggatgatcatggtgattttactgctgcttgtggctatcgtggttgttgcagtctggccgaccaactgatggcagtaaagagaccaccagcagtgacacctgccaatgacagatgcaagcccaacacccttttggtacgc

SEQ ID NO: 188500 - DNA, 3765 bp, Homo sapiens
  Payload ID: 17088
  Gene Symbol: STXBP1
  Gene Name: syntaxin binding protein 1
  Uniprot ID: P61764
  ENST ID: ENST00000373299
  CDS Start-End: 122-1906
tccctagcgcggctgcggggcggagagctgcggctggcccagcgcgcccacctgaggaggcggcggggtccgcaggcgtcgcgggacgaggagatcggagccgggagactcgcgcagcgccatggcccccattggcctcaaagctgttgtcggagagaagattatgcatgatgtgataaagaaggtcaagaagaagggggaatggaaggtgctggtggtggatcagttaagcatgaggatgctgtcctcctgctgcaagatgacagacatcatgaccgagggcataacgattgtggaagatatcaataagcgcagagagccgctccccagcctggaggctgtgtatctcatcactccatccgagaagtccgtccactctctcatcagtgactttaaggacccgccgactgctaaataccgggctgcacacgtcttcttcactgactcttgtccagatgccctgtttaatgaactggtaaaatcccgagcagccaaagtcatcaaaactctgacggaaatcaatattgcatttctcccgtatgaatcccaggtctattccttggactctgctgactctttccaaagcttctacagtccccacaaggctcagatgaagaatcctatactggagcgcctggcagagcagatcgcgaccctttgtgccaccctgaaggagtacccggctgtgcggtatcggggggaatacaaggacaatgccctgctggctcagctaatccaggacaagctcgatgcctataaagctgatgatccaacaatgggggagggcccagacaaggcacgctcccagctcctgatcctggatcgaggctttgaccccagctcccctgtgctccatgaattgacttttcaggctatgagttatgatctgctgcctatcgaaaatgatgtatacaagtatgagaccagcggcatcggggaggcacgggtgaaggaggtgctcctggacgaggacgacgacctgtggatagcactgcgccacaagcacatcgcagaggtgtcccaggaagtcacccggtctctgaaagatttttcttctagcaagagaatgaatactggagagaagaccaccatgcgggacctgtcccagatgctgaagaagatgcctcagtaccagaaagagctcagcaagtactccacccacctgcaccttgctgaggactgtatgaagcattaccaaggcaccgtagacaaactctgccgagtggagcaggacctggccatgggcacagatgctgagggagagaagatcaaggaccctatgcgagccatcgtccccattctgctggatgccaatgtcagcacttatgacaaaatccgcatcatccttctctacatctttttgaagaatggcatcacggaggaaaacctgaacaaactgatccagcacgcccagatacccccggaggatagtgagatcatcaccaacatggctcacctcggcgtgcccatcgtcaccgattccacgctgcgtcgccggagcaagccggagcggaaggaacgcatcagcgagcagacctaccagctctcacggtggactccgattatcaaggacatcatggaggacactattgaggacaaacttgacaccaaacactacccttatatctctacccgttcctctgcctccttcagcaccaccgccgtcagcgcccgctatgggcactggcataagaacaaggccccaggcgagtaccgcagtggcccccgcctcatcattttcatccttgggggtgtgagcctgaatgagatgcgctgcgcctacgaggtgacccaggccaacggaaagtgggaggtgctgataggatccacacacatcctcaccccacagaaactgctggacacactgaagaaactgaataaaacagatgaagaaataagcagttaaaaaaataagtcgcccctccaaaacacgcccccatcccacagcgctccgcagcttcccaccaccgcccgcctcagttcctttgcgtctgttgcctccccagccctgcacgccctggctggcactgttgccgctgcattctcgtgttcagtgatgccctcttcttgtttgaaacaaaagaaaataatgcattgtgttttttaaaaagagtatcttatacatgtatcctaaaaagagaagctcatgtgcaattggtgcacagcaggagaaatttctggactgttaggatgaatggacgccttctccccgttatttaagatttgtgaccttgtacataaccctgggtgacgtgcacattgcttgggtatggaacggtagaaatttgggtgtttttaaaaccttgtttggggttgttcctgtccttgttgagaatcatagagatgtctgtgttcttggagtatttcacactgaggactaatctgctatcttcattccagtccctacccctcagtgcctgctctcatccaaataacctgggaggtgacaatcaggatatctcaggaggtccaaggtggaacagacctctttgcctttcccagcgtctcatacccccggtagtgcagctgtgggtggaggctggggtgtctgcacgaagtcaggccagcgtcctcctccacagcctgtcactgccccctccccagcctgtgtccacagtgctgtgatcccgagggaagtcctccagtctaagtcacagtgccctgacaggtgagaagcaaactcccgctggaagcctccatctctttggaaaaacagttagtctggagcctgtggcccaggcccttctgtccccaggcatcatcccaacagctcattttccctagtccgccttcgttcaagggtcaggaatggaccagaacagatgggttctggaggcccctgaacagagggctatggctgtggagaaggttcttggcccgttggactcacacagaccctgtaccctctcggcaagcatcttcagtcagattatcctcagtttcagatacttcataataccttgtgttgtgtggggtcatacatcatcgtgtttgtaagagaagatggtcattttattctctgtataaaacttagctctaaagcagaaactaaagcagcaaatgcaggaaggctgtctcgccatcctcaagactcagcagctctcattctccagtggtgagcacaccatttgtgctgctgctgttgtcgtgaaatataataacagtggaagtcacaaaaatgtcccctgcccagccccctcgccgcccttgacctcctgcaggccatgtgtgtattacttgtctagtgatgtcctctcaaagtgctgtacgcgagctcggcgccacctccgcctccctttcagagcctgctccccgccctctctgctcgctgcattgtggtgttctcttctcaaggctttgaaatctccccttgcactgagattagtcgtcagatctctccccgtctccctcccaacttatacgacctgatttccttaggacggaaccgcaggcacctgcgccgggcgtcttactcccgctgcttgttctgtcccctccctcggaccaaacagtgctcatgcttcaggaccttgtttgtcgaagatgttggtttccctttctctgttatttatataaaaataatttatcaaaaggatattttaaaaaagctagtctgtcttgaaacttgtttaccttaaaattatcagaatctcagtgtttgaaagtactgaagcacaaacatatatcatctctgtaccattctgtactaaagcacttgagtctaataaataaagaaatcagcaccccttcccggtgtccaggggg

SEQ ID NO: 188501 - DNA, 3967 bp, Homo sapiens
  Payload ID: 17088
  Gene Symbol: STXBP1
  Gene Name: syntaxin binding protein 1
  Uniprot ID: P61764
  ENST ID: ENST00000373302
  CDS Start-End: 198-2009
cccgcgcgcgccggcggcggggcagcctcgctctggctcgcgccgcgcccccgcgcccagtccgcgcgtcagtcggtccctagcgcggctgcggggcggagagctgcggctggcccagcgcgcccacctgaggaggcggcggggtccgcaggcgtcgcgggacgaggagatcggagccgggagactcgcgcagcgccatggcccccattggcctcaaagctgttgtcggagagaagattatgcatgatgtgataaagaaggtcaagaagaagggggaatggaaggtgctggtggtggatcagttaagcatgaggatgctgtcctcctgctgcaagatgacagacatcatgaccgagggcataacgattgtggaagatatcaataagcgcagagagccgctccccagcctggaggctgtgtatctcatcactccatccgagaagtccgtccactctctcatcagtgactttaaggacccgccgactgctaaataccgggctgcacacgtcttcttcactgactcttgtccagatgccctgtttaatgaactggtaaaatcccgagcagccaaagtcatcaaaactctgacggaaatcaatattgcatttctcccgtatgaatcccaggtctattccttggactctgctgactctttccaaagcttctacagtccccacaaggctcagatgaagaatcctatactggagcgcctggcagagcagatcgcgaccctttgtgccaccctgaaggagtacccggctgtgcggtatcggggggaatacaaggacaatgccctgctggctcagctaatccaggacaagctcgatgcctataaagctgatgatccaacaatgggggagggcccagacaaggcacgctcccagctcctgatcctggatcgaggctttgaccccagctcccctgtgctccatgaattgacttttcaggctatgagttatgatctgctgcctatcgaaaatgatgtatacaagtatgagaccagcggcatcggggaggcacgggtgaaggaggtgctcctggacgaggacgacgacctgtggatagcactgcgccacaagcacatcgcagaggtgtcccaggaagtcacccggtctctgaaagatttttcttctagcaagagaatgaatactggagagaagaccaccatgcgggacctgtcccagatgctgaagaagatgcctcagtaccagaaagagctcagcaagtactccacccacctgcaccttgctgaggactgtatgaagcattaccaaggcaccgtagacaaactctgccgagtggagcaggacctggccatgggcacagatgctgagggagagaagatcaaggaccctatgcgagccatcgtccccattctgctggatgccaatgtcagcacttatgacaaaatccgcatcatccttctctacatctttttgaagaatggcatcacggaggaaaacctgaacaaactgatccagcacgcccagatacccccggaggatagtgagatcatcaccaacatggctcacctcggcgtgcccatcgtcaccgattccacgctgcgtcgccggagcaagccggagcggaaggaacgcatcagcgagcagacctaccagctctcacggtggactccgattatcaaggacatcatggaggacactattgaggacaaacttgacaccaaacactacccttatatctctacccgttcctctgcctccttcagcaccaccgccgtcagcgcccgctatgggcactggcataagaacaaggccccaggcgagtaccgcagtggcccccgcctcatcattttcatccttgggggtgtgagcctgaatgagatgcgctgcgcctacgaggtgacccaggccaacggaaagtgggaggtgctgataggttctactcacattcttactcccaccaaatttctcatggacctgagacaccccgacttcagggagtcctctagggtatcttttgaggatcaggctccaacaatggagtgagagccaaagaaacaaagatccacacacatcctcaccccacagaaactgctggacacactgaagaaactgaataaaacagatgaagaaataagcagttaaaaaaataagtcgcccctccaaaacacgcccccatcccacagcgctccgcagcttcccaccaccgcccgcctcagttcctttgcgtctgttgcctccccagccctgcacgccctggctggcactgttgccgctgcattctcgtgttcagtgatgccctcttcttgtttgaaacaaaagaaaataatgcattgtgttttttaaaaagagtatcttatacatgtatcctaaaaagagaagctcatgtgcaattggtgcacagcaggagaaatttctggactgttaggatgaatggacgccttctccccgttatttaagatttgtgaccttgtacataaccctgggtgacgtgcacattgcttgggtatggaacggtagaaatttgggtgtttttaaaaccttgtttggggttgttcctgtccttgttgagaatcatagagatgtctgtgttcttggagtatttcacactgaggactaatctgctatcttcattccagtccctacccctcagtgcctgctctcatccaaataacctgggaggtgacaatcaggatatctcaggaggtccaaggtggaacagacctctttgcctttcccagcgtctcatacccccggtagtgcagctgtgggtggaggctggggtgtctgcacgaagtcaggccagcgtcctcctccacagcctgtcactgccccctccccagcctgtgtccacagtgctgtgatcccgagggaagtcctccagtctaagtcacagtgccctgacaggtgagaagcaaactcccgctggaagcctccatctctttggaaaaacagttagtctggagcctgtggcccaggcccttctgtccccaggcatcatcccaacagctcattttccctagtccgccttcgttcaagggtcaggaatggaccagaacagatgggttctggaggcccctgaacagagggctatggctgtggagaaggttcttggcccgttggactcacacagaccctgtaccctctcggcaagcatcttcagtcagattatcctcagtttcagatacttcataataccttgtgttgtgtggggtcatacatcatcgtgtttgtaagagaagatggtcattttattctctgtataaaacttagctctaaagcagaaactaaagcagcaaatgcaggaaggctgtctcgccatcctcaagactcagcagctctcattctccagtggtgagcacaccatttgtgctgctgctgttgtcgtgaaatataataacagtggaagtcacaaaaatgtcccctgcccagccccctcgccgcccttgacctcctgcaggccatgtgtgtattacttgtctagtgatgtcctctcaaagtgctgtacgcgagctcggcgccacctccgcctccctttcagagcctgctccccgccctctctgctcgctgcattgtggtgttctcttctcaaggctttgaaatctccccttgcactgagattagtcgtcagatctctccccgtctccctcccaacttatacgacctgatttccttaggacggaaccgcaggcacctgcgccgggcgtcttactcccgctgcttgttctgtcccctccctcggaccaaacagtgctcatgcttcaggaccttgtttgtcgaagatgttggtttccctttctctgttatttatataaaaataatttatcaaaaggatattttaaaaaagctagtctgtcttgaaacttgtttaccttaaaattatcagaatctcagtgtttgaaagtactgaagcacaaacatatatcatctctgtaccattctgtactaaagcacttgagtctaataaataaagaaatcagcaccccttcccggtgtccaggggg

SEQ ID NO: 188502 - DNA, 591 bp, Homo sapiens
  Payload ID: 17088
  Gene Symbol: STXBP1
  Gene Name: syntaxin binding protein 1
  ENST ID: ENST00000496504
  CDS Start-End: 1-226
aaaatcccgagcagccaaagtcatcaaaactctgacggaaatcaatattgcatttctcccgtatgaatcccaggtctattccttggactctgctgactctttccaaagcttctacagtccccacaaggctcagatgaagaatcctatactggagcgcctggcagagcagatcgcgaccctttgtgccaccctgaaggagtacccggctgtgcggtatcgggggtaaggcagtgcaccagtctgctggagtggcctcccgtgtgtcccccaagtgaggagctggcctggactcctcctccggccttaaggttcctctgacagttgtctcaagaagatcaggatttgagcatctcttacttcaaattactcttccagtggttttgttatcttctcaatgttatagtgaaatataataatacatgcagaaaaaagcataaatcaactattgaataacgaaaatgtgaacctctatgtaactgcaactcaggctgcctaccgtttttaatttctttctaatctttaaaaacaaatactatctttactaaagatgtttcagagtaagataaaatacaaagagagtaattctccaaa

SEQ ID NO: 188503 - DNA, 563 bp, Homo sapiens
  Payload ID: 17088
  Gene Symbol: STXBP1
  Gene Name: syntaxin binding protein 1
  ENST ID: ENST00000494254
  CDS Start-End: 1-360
atcatggaggacactattgaggacaaacttgacaccaaacactacccttatatctctacccgttcctctgcctccttcagcaccaccgccgtcagcgcccgctatgggcactggcataagaacaaggccccaggcgagtaccgcagtggcccccgcctcatcattttcatccttgggggtgtgagcctgaatgagatgcgctgcgcctacgaggtgacccaggccaacggaaagtgggaggtgctgataggttctactcacattcttactcccaccaaatttctcatggacctgagacaccccgacttcagggagtcctctagggtatcttttgaggatcaggctccaacaatggagtgagagccaaagaaacaaagtaaaagcagcttattacagaaaagaaactcttccactctgaagggctttctttgattattccgtcactctttttctttatttcttcctttttagtttattatttatttgattttgtttcaacaagaaaatgcttgcagttctcaacaccgattgaaaatgtgtccagtgctgccctcacagccctg

SEQ ID NO: 188504 - DNA, 572 bp, Homo sapiens
  Payload ID: 17088
  Gene Symbol: STXBP1
  Gene Name: syntaxin binding protein 1
  ENST ID: ENST00000630492
  CDS Start-End: 265-572
agtcggtccctagcgcggctgcggggcggagagctgcggctggcccagcgcgcccacctgaggaggcggcggggtccgcaggcgtcgcgggacgaggagatcggagccgggagactcgcgcagcgccatggcccccattggcctcaaagctgttgtcggagagagaaagaggaagactacctagacatgttgctccagagcagaatttccagcagtagattgaaccttcggaggccgagtcccagcccagtgtaaactgagattatgcatgatgtgataaagaaggtcaagaagaagggggaatggaaggtgctggtggtggatcagttaagcatgaggatgctgtcctcctgctgcaagatgacagacatcatgaccgagggcataacgattgtggaagatatcaataagcgcagagagccgctccccagcctggaggctgtgtatctcatcactccatccgagaagtccgtccactctctcatcagtgactttaaggacccgccgactgctaaataccgggctgcacacgtcttcttcactgactcttgtccagatgccctgtttaatga

SEQ ID NO: 188505 - DNA, 538 bp, Homo sapiens
  Payload ID: 17088
  Gene Symbol: STXBP1
  Gene Name: syntaxin binding protein 1
  ENST ID: ENST00000627871
  CDS Start-End: 237-538
agtcggtccctagcgcggctgcggggcggagagctgcggctggcccagcgcgcccacctgaggaggcggcggggtccgcaggcgtcgcgggacgaggagatcggagccgggagactcgcgcagcgccatggcccccattggcctcaaagctgttgtcggagagaattatgcatgatgtgataaagaaggtcaagaagaagggggaatggaaggtgctggtggtggatcagttaagcatgaggatgctgtcctcctgctgcaagatgacagacatcatgaccgagggcataacgattgtggaagatatcaataagcgcagagagccgctccccagcctggaggctgtgtatctcatcactccatccgagaagtccgtccactctctcatcagtgactttaaggacccgccgactgctaaataccgggctgcacacgtcttcttcactgactcttgtccagatgccctgtttaatgaactggtaaaatcccgagcagccaaagtcatcaaaactctgacggaaatcaatattgcatttct

SEQ ID NO: 188506 - DNA, 667 bp, Homo sapiens
  Payload ID: 17088
  Gene Symbol: STXBP1
  Gene Name: syntaxin binding protein 1
  ENST ID: ENST00000626333
  CDS Start-End: 227-667
accatttcctgcaatcttgttgaacattaacttattccacctgggaaaatgcagttgtttatcaaggagacccttcagccccacacgagacattcagagaaacttggttgctgtctttgctgtcaggaaagaggaagactacctagacatgttgctccagagcagaatttccagcagtagattgaaccttcggaggccgagtcccagcccagtgtaaactgagattatgcatgatgtgataaagaaggtcaagaagaagggggaatggaaggtgctggtggtggatcagttaagcatgaggatgctgtcctcctgctgcaagatgacagacatcatgaccgagggcataacgattgtggaagatatcaataagcgcagagagccgctccccagcctggaggctgtgtatctcatcactccatccgagaagtccgtccactctctcatcagtgactttaaggacccgccgactgctaaataccgggctgcacacgtcttcttcactgactcttgtccagatgccctgtttaatgaactggtaaaatcccgagcagccaaagtcatcaaaactctgacggaaatcaatattgcatttctcccgtatgaatcccaggtctattccttggactctgctgactctttccaaagcttctacagtccccacaag

SEQ ID NO: 188507 - DNA, 550 bp, Homo sapiens
  Payload ID: 17088
  Gene Symbol: STXBP1
  Gene Name: syntaxin binding protein 1
  ENST ID: ENST00000625363
  CDS Start-End: 103-550
agtgttggtgaatgcacgaatgcaggtacccagcgacagggaggtgctgtgggtggattcaccctggcttcgctgcggctgggagtgggcgctgctaagattatgcatgatgtgataaagaaggtcaagaagaagggggaatggaaggtgctggtggtggatcagttaagcatgaggatgctgtcctcctgctgcaagatgacagacatcatgaccgagggcataacgattgtggaagatatcaataagcgcagagagccgctccccagcctggaggctgtgtatctcatcactccatccgagaagtccgtccactctctcatcagtgactttaaggacccgccgactgctaaataccgggctgcacacgtcttcttcactgactcttgtccagatgccctgtttaatgaactggtaaaatcccgagcagccaaagtcatcaaaactctgacggaaatcaatattgcatttctcccgtatgaatcccaggtctattccttggactctgctgactctttccaaagcttctacagtccccacaaggctcaga

SEQ ID NO: 188508 - DNA, 578 bp, Homo sapiens
  Payload ID: 17088
  Gene Symbol: STXBP1
  Gene Name: syntaxin binding protein 1
  ENST ID: ENST00000626539
  CDS Start-End: 150-578
aagctcccagaaagaggaaagacaggacccgagcggggtttcaggcagatggagcgcgtcggtagcctgtggccagggatcccagcaccgacgggaaagaggaggcctgggtaccctgcgccccgggcgcgcgcggcgcgtgagagattatgcatgatgtgataaagaaggtcaagaagaagggggaatggaaggtgctggtggtggatcagttaagcatgaggatgctgtcctcctgctgcaagatgacagacatcatgaccgagggcataacgattgtggaagatatcaataagcgcagagagccgctccccagcctggaggctgtgtatctcatcactccatccgagaagtccgtccactctctcatcagtgactttaaggacccgccgactgctaaataccgggctgcacacgtcttcttcactgactcttgtccagatgccctgtttaatgaactggtaaaatcccgagcagccaaagtcatcaaaactctgacggaaatcaatattgcatttctcccgtatgaatcccaggtctattccttggactctgctgactctttccaaagcttctac

SEQ ID NO: 188509 - DNA, 1876 bp, Homo sapiens
  Payload ID: 17089
  Gene Symbol: STXBP2
  Gene Name: syntaxin binding protein 2
  Uniprot ID: Q15833
  ENST ID: ENST00000221283
  CDS Start-End: 32-1813
ccggaagcggcggcggcgcccctcggggaagatggcgccctcggggctgaaggcggtggtgggggaaaaaattctgagcggagttattcggagtgtcaagaaggatggggagtggaaggtgcttatcatggatcacccaagcatgcgcatcttgtcttcctgctgcaaaatgtcagatatcctggctgagggcatcaccattgttgaagacatcaacaaacggcgggaacccattcccagtctggaggccatttatttgctgagccccacggagaagtcggttcaggccctgatcaaagacttccaggggaccccgactttcacctacaaagcggcccatatcttcttcaccgacacctgccccgagcccctgttcagtgagctaggccgctctcgtctggcaaaggtggtgaagacgttgaaggagattcaccttgccttcctcccctacgaggcccaggtgttctccctcgatgctccccacagcacctacaacctctactgccccttccgggcagaggagcgcacgcggcagctcgaggtgctggcccagcagattgccacgctgtgcgccaccctgcaggagtacccggccatccgctaccgcaagggcccagaggacacagcccagttggcccacgccgtcctggccaagctgaacgccttcaaggcagacactcccagtctgggcgagggcccagagaaaacccgctcccagctgctgataatggaccgggcagctgaccccgtgtccccactactgcatgagctcacgttccaggccatggcgtatgatctgctggacatagagcaggacacatacaggtatgagaccaccgggctgagcgaggcgcgggagaaggccgtcttgctggacgaggacgatgacttgtgggtggagcttcgccacatgcatatcgcagatgtgtccaagaaggtcacggagctcctgaggaccttctgtgagagcaagaggctgaccacggacaaggcgaacatcaaagacctatcccagatcctgaaaaagatgccgcagtaccagaaggagctgaataagtattctacgcacctgcatctagcagatgattgtatgaagcacttcaagggctcggtggagaagctgtgtagtgtggagcaggacctggccatgggctccgacgcagagggggagaagatcaaggactccatgaagctgatcgttccggtgctgctggacgcggcggtgcccgcctacgacaagatccgggtcctgctgctctacatcctccttcggaatggtgtgagtgaggagaacctggccaagctgatccagcatgccaatgtacaggcgcacagcagcctcatccgtaacctggagcagctgggaggcactgtcaccaaccccgggggctcggggacctccagccggctggagccgagagaacgcatggagcccacctatcagctgtcccgctggaccccggtcatcaaggatgtaatggaggacgccgtggaggaccggctggacaggaacctgtggcccttcgtatccgaccccgcccccacggccagctcccaggccgctgtcagtgcccgcttcggtcactggcacaagaacaaggctggcatagaagcccgggcgggcccccggctcatcgtgtatgtcatgggcggtgtggccatgtcagagatgagggccgcctacgaggtgaccagggccaccgagggcaagtgggaggtgctcattggctcctcacacatcctcaccccgacccgcttcctggatgacctgaaggcactggacaagaagctggaggacattgccctgccctgacccctggccccgccccctacccctccctttccagagaaataaactcttcccgtcgctctgcca

SEQ ID NO: 188510 - DNA, 1859 bp, Homo sapiens
  Payload ID: 17089
  Gene Symbol: STXBP2
  Gene Name: syntaxin binding protein 2
  Uniprot ID: Q15833
  ENST ID: ENST00000414284
  CDS Start-End: 24-1796
ggcggcggcgcccctcggggaagatggcgccctcggggctgaaggcggtggtgggggaaaaaattctgagcggagttattcggagtgtcaagaaggatggggagtggaaggtgcttatcatggatcacccaagcatgcgcatcttgtcttcctgctgcaaaatgtcagatatcctggctgagggcatcaccattgttgaagacatcaacaaacggcgggaacccattcccagtctggaggccatttatttgctgagccccacggagaaggccctgatcaaagacttccaggggaccccgactttcacctacaaagcggcccatatcttcttcaccgacacctgccccgagcccctgttcagtgagctaggccgctctcgtctggcaaaggtggtgaagacgttgaaggagattcaccttgccttcctcccctacgaggcccaggtgttctccctcgatgctccccacagcacctacaacctctactgccccttccgggcagaggagcgcacgcggcagctcgaggtgctggcccagcagattgccacgctgtgcgccaccctgcaggagtacccggccatccgctaccgcaagggcccagaggacacagcccagttggcccacgccgtcctggccaagctgaacgccttcaaggcagacactcccagtctgggcgagggcccagagaaaacccgctcccagctgctgataatggaccgggcagctgaccccgtgtccccactactgcatgagctcacgttccaggccatggcgtatgatctgctggacatagagcaggacacatacaggtatgagaccaccgggctgagcgaggcgcgggagaaggccgtcttgctggacgaggacgatgacttgtgggtggagcttcgccacatgcatatcgcagatgtgtccaagaaggtcacggagctcctgaggaccttctgtgagagcaagaggctgaccacggacaaggcgaacatcaaagacctatcccagatcctgaaaaagatgccgcagtaccagaaggagctgaataagtattctacgcacctgcatctagcagatgattgtatgaagcacttcaagggctcggtggagaagctgtgtagtgtggagcaggacctggccatgggctccgacgcagagggggagaagatcaaggactccatgaagctgatcgttccggtgctgctggacgcggcggtgcccgcctacgacaagatccgggtcctgctgctctacatcctccttcggaatggtgtgagtgaggagaacctggccaagctgatccagcatgccaatgtacaggcgcacagcagcctcatccgtaacctggagcagctgggaggcactgtcaccaaccccgggggctcggggacctccagccggctggagccgagagaacgcatggagcccacctatcagctgtcccgctggaccccggtcatcaaggatgtaatggaggacgccgtggaggaccggctggacaggaacctgtggcccttcgtatccgaccccgcccccacggccagctcccaggccgctgtcagtgcccgcttcggtcactggcacaagaacaaggctggcatagaagcccgggcgggcccccggctcatcgtgtatgtcatgggcggtgtggccatgtcagagatgagggccgcctacgaggtgaccagggccaccgagggcaagtgggaggtgctcattggctcctcacacatcctcaccccgacccgcttcctggatgacctgaaggcactggacaagaagctggaggacattgccctgccctgacccctggccccgccccctacccctccctttccagagaaataaactcttcccgtcgctctgcca

SEQ ID NO: 188511 - DNA, 1914 bp, Homo sapiens
  Payload ID: 17089
  Gene Symbol: STXBP2
  Gene Name: syntaxin binding protein 2
  Uniprot ID: Q15833
  ENST ID: ENST00000441779
  CDS Start-End: 38-1852
acacacccggaagcggcggcggcgcccctcggggaagatggcgccctcggggctgaaggcggtggtgggggaaaaaattctgagcggagttattcggagtgtcaagaaggatggggagtggaaggtgcttatcatggatcacccaagcatgcgcatcttgtcttcctgctgcaaaatgtcagatatcctggctgagggcatcaccattgttgaagacatcaacaaacggcgggaacccattcccagtctggaggccatttatttgctgagccccacggagaaggctcaggcccagagagtgatccaccttccccagtcggttcaggccctgatcaaagacttccaggggaccccgactttcacctacaaagcggcccatatcttcttcaccgacacctgccccgagcccctgttcagtgagctaggccgctctcgtctggcaaaggtggtgaagacgttgaaggagattcaccttgccttcctcccctacgaggcccaggtgttctccctcgatgctccccacagcacctacaacctctactgccccttccgggcagaggagcgcacgcggcagctcgaggtgctggcccagcagattgccacgctgtgcgccaccctgcaggagtacccggccatccgctaccgcaagggcccagaggacacagcccagttggcccacgccgtcctggccaagctgaacgccttcaaggcagacactcccagtctgggcgagggcccagagaaaacccgctcccagctgctgataatggaccgggcagctgaccccgtgtccccactactgcatgagctcacgttccaggccatggcgtatgatctgctggacatagagcaggacacatacaggtatgagaccaccgggctgagcgaggcgcgggagaaggccgtcttgctggacgaggacgatgacttgtgggtggagcttcgccacatgcatatcgcagatgtgtccaagaaggtcacggagctcctgaggaccttctgtgagagcaagaggctgaccacggacaaggcgaacatcaaagacctatcccagatcctgaaaaagatgccgcagtaccagaaggagctgaataagtattctacgcacctgcatctagcagatgattgtatgaagcacttcaagggctcggtggagaagctgtgtagtgtggagcaggacctggccatgggctccgacgcagagggggagaagatcaaggactccatgaagctgatcgttccggtgctgctggacgcggcggtgcccgcctacgacaagatccgggtcctgctgctctacatcctccttcggaatggtgtgagtgaggagaacctggccaagctgatccagcatgccaatgtacaggcgcacagcagcctcatccgtaacctggagcagctgggaggcactgtcaccaaccccgggggctcggggacctccagccggctggagccgagagaacgcatggagcccacctatcagctgtcccgctggaccccggtcatcaaggatgtaatggaggacgccgtggaggaccggctggacaggaacctgtggcccttcgtatccgaccccgcccccacggccagctcccaggccgctgtcagtgcccgcttcggtcactggcacaagaacaaggctggcatagaagcccgggcgggcccccggctcatcgtgtatgtcatgggcggtgtggccatgtcagagatgagggccgcctacgaggtgaccagggccaccgagggcaagtgggaggtgctcattggctcctcacacatcctcaccccgacccgcttcctggatgacctgaaggcactggacaagaagctggaggacattgccctgccctgacccctggccccgccccctacccctccctttccagagaaataaactcttcccgtcgctctgcc

SEQ ID NO: 188512 - DNA, 549 bp, Homo sapiens
  Payload ID: 17089
  Gene Symbol: STXBP2
  Gene Name: syntaxin binding protein 2
  ENST ID: ENST00000593535
  CDS Start-End: 215-549
gaagtgtgtgtctgaactcccatctgtgagcgtgtcgtcgaggtgtgcacctccagcgacttcgtgctcggcagcgcggacgcacctgcccgtcctccccgccagggactcaacttcctgggcctgggcgagaaccgacggcggggaggggccagaaattctgagcggagttattcggagtgtcaagaaggatggggagtggaaggtgcttatcatggatcacccaagcatgcgcatcttgtcttcctgctgcaaaatgtcagatatcctggctgagggcatcaccattgttgaagacatcaacaaacggcgggaacccattcccagtctggaggccatttatttgctgagccccacggagaagtcggttcaggccctgatcaaagacttccaggggaccccgactttcacctacaaagcggcccatatcttcttcaccgacacctgccccgagcccctgttcagtgagctaggccgctctcgtctggcaaaggtggtgaagacgttgaaggagattcaccttgccttcctcccctacgaggcccaggt

SEQ ID NO: 188513 - DNA, 552 bp, Homo sapiens
  Payload ID: 17089
  Gene Symbol: STXBP2
  Gene Name: syntaxin binding protein 2
  ENST ID: ENST00000595950
  CDS Start-End: 46-552
accttgggacacacccggaagcggcggcggcgcccctcggggaagatggcgccctcggggctgaaggcggtggtgggggaaaaaattctgagcggagttattcggagtgtcaagaaggatggggagtggaaggtgcttatcatggatcacccaagcatgcgcatcttgtcttcctgctgcaaaatgtcagatatcctggctgagggcatcaccacctgccccgagcccctgttcagtgagctaggccgctctcgtctggcaaaggtggtgaagacgttgaaggagattcaccttgccttcctcccctacgaggcccaggtgttctccctcgatgctccccacagcacctacaacctctactgccccttccgggcagaggagcgcacgcggcagctcgaggtgctggcccagcagattgccacgctgtgcgccaccctgcaggagtacccggccatccgctaccgcaagggcccagaggacacagcccagttggcccacgccgtcctggccaagctgaacgccttcaaggcagacactcccagtctgggcgag

SEQ ID NO: 188514 - DNA, 1785 bp, Homo sapiens
  Payload ID: 17089
  Gene Symbol: STXBP2
  Gene Name: syntaxin binding protein 2
  ENST ID: ENST00000597068
  CDS Start-End: 29-1255
gaagcggcggcggcgcccctcggggaagatggcgccctcggggctgaaggcggtggtgggggaaaaaattctgagcggagttattcggagtgtcaagaaggatggggagtggaaggtgcttatcatggatcacccaagcatgcgcatcttgtcttcctgctgcaaaatgtcagatatcctggctgagggcatcaccattgttgaagacatcaacaaacggcgggaacccattcccagtctggaggccatttatttgctgagccccacggagaagtcggttcaggccctgatcaaagacttccaggggaccccgactttcacctacaaagcggcccatatcttcttcaccgacacctgccccgagcccctgttcagtgagctaggccgctctcgtctggcaaaggtggtgaagacgttgaaggagattcaccttgccttcctcccctacgaggcccaggtgttctccctcgatgctccccacagcacctacaacctctactgccccttccgggcagaggagcgcacgcggcagctcgaggtgctggcccagcagattgccacgctgtgcgccaccctgcaggagtacccggccatccgctaccgcaagggcccagaggacacagcccagttggcccacgccgtcctggccaagctgaacgccttcaaggcagacactcccagtctgggcgagggcccagagaaaacccgctcccagctgctgataatggaccgggcagctgaccccgtgtccccactactgcatgagctcacgttccaggccatggcgtatgatctgctggacatagagcaggacacatacaggtatgagaccaccgggctgagcgaggcgcgggagaaggccgtcttgctggacgaggacgatgacttgtgggtggagcttcgccacatgcatatcgcagatgtgtccaagaaggtcacggagctcctgaggaccttctgtgagagcaagaggctgaccacggacaaggcgaacatcaaagacctatcccagatcctgaaaaagatgccgcagtaccagaaggagctgaataaggacctggccatgggctccgacgcagagggggagaagatcaaggactccatgaagctgatcgttccggtgctgctggacgcggcggtgcccgcctacgacaagatccgggtcctgctgctctacatcctccttcggaatgctacccctctggacccgggaaccctcctccattggcttggggattcctccactgaggtgtgagtgaggagaacctggccaagctgatccagcatgccaatgtacaggcgcacagcagcctcatccgtaacctggagcagctgggaggcactgtcaccaaccccgggggctcggggacctccagccggctggagccgagagaacgcatggagcccacctatcagctgtcccgctggaccccggtcatcaaggatgtaatggaggacgccgtggaggaccggctggacaggaacctgtggcccttcgtatccgaccccgcccccacggccagctcccaggccgctgtcagtgcccgcttcggtcactggcacaagaacaaggctggcatagaagcccgggcgggcccccggctcatcgtgtatgtcatgggcggtgtggccatgtcagagatgagggccgcctacgaggtgaccagggccaccgagggcaagtgggaggtgctcattggctcctcacacatcctcaccccgacccgcttcctggatgacctgaaggcactggacaagaagctggaggacattgccctgccctga

SEQ ID NO: 188515 - DNA, 1523 bp, Homo sapiens
  Payload ID: 17089
  Gene Symbol: STXBP2
  Gene Name: syntaxin binding protein 2
  ENST ID: ENST00000599737
  CDS Start-End: 1-516
ggagttattcggagtgtcaagaaggatggggagtggaaggtgcttatcatggatcacccaagcatgcgcatcttgtcttcctgctgcaaaatgtcagatatcctggctgagggcatcaccattgttgaagacatcaacaaacggcgggaacccattcccagtctggaggccatttatttgctgagccccacggagaagtcggttcaggccctgatcaaagacttccaggggaccccgactttcacctacaaagcggcccatatcttcttcaccgacacctgccccgagcccctgttcagtgagctaggccgctctcgtctggcaaaggtggtgaagacgttgaaggagattcaccttgccttcctcccctacgaggcccaggggcccagaggacacagcccagttggcccacgccgtcctggccaagctgaacgccttcaaggcagacactcccagtctgggcgagggcccagagaaaacccgctcccagctgctgataatggaccgggcagctgaccccgtgtccccactactgcatgagctcacgttccaggccatggcgtatgatctgctggacatagagcaggacacatacaggtatgagaccaccgggctgagcgaggcgcgggagaaggccgtcttgctggacgaggacgatgacttgtgggtggagcttcgccacatgcatatcgcagatgtgtccaagaaggtcacggagctcctgaggaccttctgtgagagcaagaggctgaccacggacaaggcgaacatcaaagacctatcccagatcctgaaaaagatgccgcagtaccagaaggagctgaataagtattctacgcacctgcatctagcagatgattgtatgaagcacttcaagggctcggtggagaagctgtgtagtgtggagcaggacctggccatgggctccgacgcagagggggagaagatcaaggactccatgaagctgatcgttccggtgctgctggacgcggcggtgcccgcctacgacaagatccgggtcctgctgctctacatcctccttcggaatggtgtgagtgaggagaacctggccaagctgatccagcatgccaatgtacaggcgcacagcagcctcatccgtaacctggagcagctgggaggcactgtcaccaaccccggggacgccgtggaggaccggctggacaggaacctgtggcccttcgtatccgaccccgcccccacggccagctcccaggccgctgtcagtgcccgcttcggtcactggcacaagaacaaggctggcatagaagcccgggcgggcccccggctcatcgtgtatgtcatgggcggtgtggccatgtcagagatgagggccgcctacgaggtgaccagggccaccgagggcaagtgggaggtgctcattggctcctcacacatcctcaccccgacccgcttcctggatgacctgaaggcactggacaagaagctggaggacattgccctgccctgacccctggccccgccccctacccctccctttccag

SEQ ID NO: 188516 - DNA, 770 bp, Homo sapiens
  Payload ID: 17089
  Gene Symbol: STXBP2
  Gene Name: syntaxin binding protein 2
  ENST ID: ENST00000600702
  CDS Start-End: 1-661
cctgaggaccttctgtgagagcaagaggctgaccacggacaaggcgaacatcaaagacctatcccagatcctgaaaaagatgccgcagtaccagaaggagctgaataagtattctacgcacctgcatctagcagatgattgtatgaagcacttcaagggctcggtggagaagctgtgtagtgtggagcaggacctggccatgggctccgacgcagagggggagaagatcaaggactccatgaagctgatcgttccggtgctgctggacgcggcggtgcccgcctacgacaagatccgggtcctgctgctctacatcctccttcggaatggtgtgagtgaggagaacctggccaagctgatccagcatgccaatgtacaggcgcacagcagcctcatccgtaacctggagcagctgggaggcactgtcaccaaccccgggggctcggggacctccagccggctggagccgagagaacgcatggagcccacctatcagctgtcccgctggaccccggtcatcaaggatgtaatggaggacgccgtggaggaccggctggacaggaacctgtggcccttcgtatccgaccccgcccccacggccagctcccaggccgctgtcaggctcctcacacatcctcaccccgacccgcttcctggatgacctgaaggcactggacaagaagctggaggacattgccctgccctgacccctggccccgccccctacccctccctttccagagaaataaactcttcccgtcgctctgcca

SEQ ID NO: 188517 - DNA, 811 bp, Homo sapiens
  Payload ID: 17089
  Gene Symbol: STXBP2
  Gene Name: syntaxin binding protein 2
  ENST ID: ENST00000599400
  CDS Start-End: 1-448
ctcggtggagaagctgtgtagtgtggagcaggacctggccatgggctccgacgcagagggggagaagatcaaggactccatgaagctgatcgttccggtgctgctggacgcggcggtgcccgcctacgacaagatccgggtcctgctgctctacatcctccttcggaatggtgtgagtgaggagaacctggccaagctgatccagcatgccaatgtacaggcgcacagcagcctcatccgtaacctggagcagctgggaggcactgtcaccaaccccgggccacaccaggcgcagcccctctgtgaccagcctccttcccctcaatccccctgctgccctccctgccctgcctgtagggctcggggacctccagccggctggagccgagagaacgcatggagcccacctatcagctgtcccgctggaccccggtcatcaaggatgtaatggaggacgccgtggaggaccggctggacaggaacctgtggcccttcgtatccgaccccgcccccacggccagctcccaggccgctgtcagtgcccgcttcggtcactggcacaagaacaaggctggcatagaagcccgggcgggcccccggctcatcgtgtatgtcatgggcggtgtggccatgtcagagatgagggccgcctacgaggtgaccagggccaccgagggcaagtgggaggtgctcattggctcctcacacatcctcaccccgacccgcttcctggatgacctgaaggcactggacaagaagctggaggacattgccctgccctgacccctggccccgccccctacccctccct

SEQ ID NO: 188518 - DNA, 716 bp, Homo sapiens
  Payload ID: 17089
  Gene Symbol: STXBP2
  Gene Name: syntaxin binding protein 2
  ENST ID: ENST00000602355
  CDS Start-End: 330-716
ttgccttcatactttgtctcactgcttcttatctctttgcctatctctgcctctgtctttgtctttctctggctcgctctctctccctttggctttctctctccgtctctctctggctcactgtttctctctctcgctttcttgctgtctctcgctctctctcgctctctgttccacttccccatctttgcctgccatcccccaccctaccagccacaccaggcgcagcccctctgtgaccagcctccttcccctcaatccccctgctgccctccctgccctgcctgtagggctcggggacctccagccggctggagccgagagaacgcatggagcccacctatcagctgtcccgctggaccccggtcatcaaggatgtaatggaggacgccgtggaggaccggctggacaggaacctgtggcccttcgtatccgaccccgcccccacggccagctcccaggccgctgtcagtgcccgcttcggtcactggcacaagaacaaggctggcatagaagcccgggcgggcccccggctcatcgtgtatgtcatgggcggtgtggccatgtcagagatgagggccgcctacgaggtgaccagggccaccgagggcaagtgggaggtgctcattggctcctcacacatcctcaccccgacccgcttcctggatgacctgaaggcactggacaagaagctggaggacattgccctgccctga

SEQ ID NO: 188519 - DNA, 1188 bp, Homo sapiens
  Payload ID: 17089
  Gene Symbol: STXBP2
  Gene Name: syntaxin binding protein 2
  ENST ID: ENST00000612033
  CDS Start-End: 1-1188
tgcatgcgtgtacatgtgcatgtgtgcatgtgtgtgcatgtgtgtgtgcatctgtgtatgcatgtgtgtgcgtgcatgtgtgtctatgtatgtgtctgtgtgcatgtgcatgtgtgtgcgtctgtgtgtgcatttgtgtgtatgtgtgtatgcgtgtgtgtctgtgggtctgtgtgtgcatttgtgtctgtgcatgtgtgtatgcgtgtgtattgtgtgtgcatctgtgtgcatctgtatgtgtgtgtgtgcgtctgtctgtgtgcatgtgtgtatgcgtgtgtatgtatgtgtctgcgtctgtgtgtgcgtctgtgtgtatctgtgtgtgcatgtgtgtatgcgtgtatatgtatgtgcatctgtgtgcatgtgtctatgtatgtgtgtgcatctgtgtgtgcgtgtgtatgcgtgtgtgtatgcgtctgtcatgtgtgtatgcgtgtgtgtgcgcatcagtgtctgcatgtgtgtatatgtgtgtatgtatgttgcgcgcgcatctgtgtgtgtgcatgtgtgtatgtatgtgtgtgcatctctgtgtgtgcatgtgtgtatgtgtgtgtgcatctgtgtgtgtgtgcatgtgtgcatgcgtgtgtatgtgtgtgtgcgtgcgtgcatctgtgtgtgtgcgcgtgtgcccatgtgggtgcgacactagtgtgcatttgcacatatacatgtccccgtccgtccatgtttgcacatggtggcagatggggggtggctgggaggcctaggcagccaatgagcctaggtgtgcaggctcaggcccagagagtgatccaccttccccagtcggttcaggccctgatcaaagacttccaggggaccccgactttcacctacaaagcggcccatatcttcttcaccgacacctgccccgagcccctgttcagtgagctaggccgctctcgtctggcaaaggtggtgaagacgttgaaggagattcaccttgccttcctcccctacgaggcccaggtacggcccgggctcatcctgggcagggggtgggggtttgtgaccaaatgtcccctgttccctcagaaacagacactgaggctgggcgcagtggctcatacctgtaatcccagcgctgtgggaggccagggcaggaggatcacttggggccaggagtttgagaccagcctgggtacagagcaagaccccgtctcttaa

SEQ ID NO: 188520 - DNA, 1892 bp, Homo sapiens
  Payload ID: 17089
  Gene Symbol: STXBP2
  Gene Name: syntaxin binding protein 2
  ENST ID: ENST00000622853
  CDS Start-End: 50-1789
ccccaccttgggacacacccggaagcggcggcggcgcccctcggggaagatggcgccctcggggctgaaggcggtggtgggggaaaaaattctgagcggagttattcggagtgtcaagaaggatggggagtggaaggtgcttatcatggatcacccaagcatgcgcatcttgtcttcctgctgcaaaatgtcagatatcctggctgagggcatcaccattgttgaagacatcaacaaacggcgggaacccattcccagtctggaggccatttatttgctgagccccacggagaagtcggttcaggccctgatcaaagacttccaggggaccccgactttcacctacaaagcggcccatatcttcttcaccgacacctgccccgagcccctgttcagtgagctaggccgctctcgtctggcaaaggtggtgaagacgttgaaggagattcaccttgccttcctcccctacgaggcccaggtgttctccctcgatgctccccacagcacctacaacctctactgccccttccgggcagaggagcgcacgcggcagctcgaggtgctggcccagcagattgccacgctgtgcgccaccctgcaggagtacccggccatccgctaccgcaagggcccagaggacacagcccagttggcccacgccgtcctggccaagctgaacgccttcaaggcagacactcccagtctgggcgagggcccagagaaaacccgctcccagctgctgataatggaccgggcagctgaccccgtgtccccactactgcatgagctcacgttccaggccatggcgtatgatctgctggacatagagcaggacacatacaggtatgagaccaccgggctgagcgaggcgcgggagaaggccgtcttgctggacgaggacgatgacttgtgggtggagcttcgccacatgcatatcgcagatgtgtccaagaaggtcacggagctcctgaggaccttctgtgagagcaagaggctgaccacggacaaggcgaacatcaaagacctatcccagatcctgaaaaagatgccgcagtaccagaaggagctgaataagtattctacgcacctgcatctagcagatgattgtatgaagcacttcaagggctcggtggagaagctgtgtagtgtggagcaggacctggccatgggctccgacgcagagggggagaagatcaaggactccatgaagctgatcgttccggtgctgctggacgcggcggtgcccgcctacgacaagatccgggtcctgctgctctacatcctccttcggaatggtgtgagtgaggagaacctggccaagctgatccagcatgccaatgtacaggcgcacagcagcctcatccgtaacctggagcagctgggaggcactgtcaccaaccccgggggctcggggacctccagccggctggagccgagagaacgcatggagcccacctatcagctgtcccgctggaccccggtcatcaaggatgtaatggaggacgccgtggaggaccggctggacaggaacctgtggcccttcgtatccgaccccgcccccacggccagctcccaggccgctgtcagtgcccgcttcggtcactggcacaagaacaaggctggcatagaagcccgggcgggcccccggctcatcgtgtatgtcatgggcggtgtggccatgtcagagatgagggccgcctacgaggtgaccagggccaccgagggcagtgggaggtgctcattggctcctcacacatcctcaccccgacccgcttcctggatgacctgaaggcactggacaagaagctggaggacattgccctgccctgacccctggccccgccccctacccctccctttccagagaaataaactcttcccgtcgctctgcc

SEQ ID NO: 188521 - DNA, 2478 bp, Homo sapiens
  Payload ID: 17090
  Gene Symbol: STXBP3
  Gene Name: syntaxin binding protein 3
  Uniprot ID: O00186
  ENST ID: ENST00000370008
  CDS Start-End: 51-1829
agtaggttgggagtggaaggtggtggctgctgctccgcagtgtcgggaagatggcgccgccggtggcagagagggggctaaagagcgtcgtgtggcagaagataaaagcaacagtgtttgatgactgcaagaaagaaggcgaatggaagataatgcttttagatgaatttaccactaagcttttggcatcgtgttgcaaaatgacagatcttctagaagaaggtattactgttgtagagaatatttataagaaccgtgaacctgtcagacaaatgaaagctctttatttcatcactccgacatcaaagtctgtagattgtttcttacatgattttgcaagtaaatcggagaacaagtataaagcagcatatatttacttcactgacttttgccctgataatctctttaacaaaattaaggcttcttgctccaagtcaataagaagatgtaaagaaataaatatttccttcattccacatgaatctcaggtgtatactcttgatgtaccagatgcattctattactgttatagtccagaccctggtaatgcaaagggaaaagatgccattatggaaacaatggctgaccagatagttacagtgtgtgccaccttggatgaaaatcccggagtaagatataaaagtaaacctctagataatgccagtaagcttgcacagcttgttgaaaaaaagcttgaagactactacaagattgatgaaaagagcctaataaagggtaaaactcattcacagctcttaataattgatcgtggctttgatcctgtgtccactgtcctgcatgaactgacctttcaggcaatggcatatgatctactaccaattgagaatgatacatacaaatataaaacagatggaaaagaaaaggaggccatccttgaagaagaagatgacctctgggttagaattcgacatcgacatattgcggttgtgttagaggaaattcccaagcttatgaaagaaatttcatcaacaaagaaagcaacagaaggaaagacatcacttagtgctcttacccagctgatgaaaaagatgccccatttccgaaaacagattactaagcaagttgtccatcttaacttagcagaagattgcatgaataagttcaagcttaatatagaaaagctctgcaaaactgaacaggacctggcacttggaactgatgcagaaggacagaaggtgaaagattccatgcgagtactccttccagttctactcaacaaaaatcatgataattgtgataaaataagagcaattctactttatatcttcagtattaatggaactacggaagaaaatttggacaggttgatccagaatgtaaagatagaaaatgagagtgacatgattcgtaactggagttaccttggtgttcccattgttccccaatctcaacaaggcaaaccgttaagaaaggatcggtctgcagaagaaacttttcagctctctcggtggacaccttttatcaaagatattatggaggatgctattgataatagattagattcaaaagaatggccatattgttcccagtgtccagcagtatggaatggttcaggagctgtaagtgctcgccagaaacccagagctaattatttagaagaccgaaaaaatgggtcaaagctgattgtttttgtaattggagggatcacatactctgaagtgcgttgtgcttatgaagtttctcaggcacataaatcctgtgaagttattattggttctacacatgttttaacacccaaaaagctgttggatgatataaagatgctgaataaacccaaggataaagtctccttaattaaagatgaatagcatttctttttggagggtttagagattcttactaatatgttgaactaaaatagaaagaaaatgttgctgtcatgtaatttaaacaatgtaaatattttatggaataatggcttttcaaatacatttcttaaggaactgtttatgattattactggatttgtcatttttgataatttaaatattgctgctgctttgtagatgatgagaagaaatgttaaagtgctttctaaaaggaaattttttcacctttggaggagaatatattagagttgtgggtaatttttcacagccacctatgtacatactaattacccattggatacttatatctaaaagtctcatgctgaagtatagtttttgggaaagaatgattttaaataaagagattgtaaaagtaaaaaactgtaaatgtatatgtatgatagaattgtttcctctaagtgtagtttttctttcaactaaaattcagtttatgtgtaaaataattcagtcattaatagaaatggagtgatttcacagtgtgtactgttttgccacatacttctaaagaacacaattttatataattttgaaatcatgtatgtttaaattagaaaaccaaaaatcatgaacattctaagagaaaataaatatagaatttaaaaaatta

SEQ ID NO: 188522 - DNA, 15590 bp, Homo sapiens
  Payload ID: 17091
  Gene Symbol: STXBP4
  Gene Name: syntaxin binding protein 4
  Uniprot ID: Q6ZWJ1
  ENST ID: ENST00000376352
  CDS Start-End: 208-1869
aggtggcagcgcttgcagtcgggctacggaggccgggttgccagattacgggaaagccatttaagaagttcctggaataatattagtcagagtaatataggatctgcaggaagtgtctcaagatagttggaaaagaagaatttctagactcttcatcaagatcttcatttatacagctgttaaatccaaggctactttggtgaaagcatgaataaaaatacatctactgtagtatcacccagtctacttgaaaaggatcctgcctttcagatgattacaattgccaaggaaacaggccttggcctgaaggtactaggaggaattaaccggaatgaaggcccattggtatatattcaggaaattattcctggaggagactgttataaggatggtcgtttgaagccaggagatcaacttgtctcagtcaacaaggaatctatgattggtgtatcatttgaagaagcaaaaagcataattaccggagccaagttgaggttagaatctgcttgggagatagcattcataagacaaaaatccgacaacattcagccagaaaatctgtcatgtacatcacttatagaagcttcaggagaatatggacctcaagcctcaacattaagtcttttttcttctcctcctgaaatactaatcccaaagacctcatccactcccaaaacaaataatgacattttatcttcttgtgagataaaaactggatacaacaaaacagtacagattccaattacttcagaaaacagtactgtgggtttgtctaatacagatgttgcttctgcctggactgaaaattatgggctacaagaaaagatctccctaaatccctctgttcgctttaaggcagagaaactggaaatggctctaaattatcttggtattcagcccacaaaggaacaacaccaagccctgagacagcaagtacaagcagactcaaaagggacagtgtcttttggagattttgtccaggttgccagaaacttgttttgcttgcagttggatgaagtaaatgttggtgcacatgaaatttccaatatattagattcacagcttcttccttgtgattcttcagaagcagatgaaatggaaaggctcaagtgtgaaagagatgatgccttgaaagaagtaaatacacttaaggaaaaattattggaatcagataagcaaaggaaacaattgacagaagagctccagaatgtgaaacaagaagccaaagctgtagttgaagaaacaagagccctgcgtagtcggattcatcttgctgaagctgctcagagacaggcacatggaatggaaatggactatgaagaagtgatccgtctgttagaggccaagattacagagctaaaggctcagcttgctgattattctgaccaaaataaagaaagtgttcaggatttaaaaaagagaatcatggtactcgactgccaattacgaaaatcagaaatggctcgaaaaacttttgaggcatccactgaaaagcttcttcattttgtagaggctattcaagaagtattttctgataattctactcctttatcaaatttaagtgaaagaagagctgtgttagcttctcagacttccctcacaccactgggaaggaatggacgtagcatcccagcaacgctggcgcttgaatctaaggaacttgttaaatctgttcgtgccttacttgatatggattgtttaccttatgggtgggaggaagcttacacagcagatggaatcaagtacttcatcaatcatgtaacacagactacatcctggatccatcccgtgatgagtgtcctgaatctatctcgctcagaggagaatgaagaggattgctctagagaactccccaaccagaaaagttgatggttttccttaggaagtggagctacatggatgatgtgagcagagacgcataacatccaattctgagatgaaacagtctaaaataggagtaaagcatgcactacttgttgaagtgtgaaatggagactctggactttgggtatttttgtaaaacttttgatatttctgtatacatttaaaaaatcaattgccactacagtagttccttaagaataatctagttatattttttgaaatcacatataattagactttataatatatatactttttcatatataattagatctttctttgtaatttcatatgtagttcttcatagggtctcagatacaatggtttttataattgacatattgaaaaagtatatgaacataatgaaacacctcatttatttgataattcactaatgttttatattcatatattaggaaagtgaacttagcaagctttttggaatttaaggatcacatttagacatctcatgggctgatgaatacagctggtatctttgtggagctttctaatttacaaaatgctttgtagaccccattgtctttaaaccatacaacatgcccgtgaagctgatctggtgggtatgtttattcttggttttcagtagggaaatagcagttcagagagaggaagctctctgtcccagcaccgagactcactcctaagtcttctgattccatgagcagtcccccttcccccataccctgctgtctccacggagggaggtcacagcccatcacgcaggacactgtgattgtgttgatgcagctggctccacagctgtgcattccacagagattcagaaggcacctcttcggtcaaacatggcccctctataaccccactattcttctcctataaacccttcccccttctctgcacccaagccttcgccaagtaggcgcactctttgtgatattgtttcagcagacttctttcagcagctcgtgtttttctaaagtgaaaggcatggtttgtcctgcttaggttgcccttcccagagggatggtttgaggggagctgatgagaagagaggtatctgttaaaacattactgctctactcgaaacaagatggaagcctaaagcccaagtcgagcagctcccagcactgctgtgcagacctagaggtccttagaacatagtctaagaaccattcattgtagccattttatagttgagtaaactgagatcttaagtctcctagtctactgaatttcatatggtgtataatacagatttatatggtaaagatatacatatacattgtgctcaactatacattcctgaatccatttaggatttgtgatttatgtcttgagtaataatataaagtcaactccagactgataggtagtcattagccatgagaaatgtttcaggatggctagggaagacttgtgttttgcctgacagccatttgaatgttaggaagcttcggggagacaagttttgagagaagccccagagggagctatttccttgcaccccccagaggtgaatgaggtattctataagttagtgtctataattgtgaaagtacaaacttcttgtttttgtcaaattaatggtatgaaatttctctccccctgcttgaagagttttctaattcgtttctagtgagcaaaacaaagaaggtgcttgagtcactgaaatcaaagtactcaggcacacagcccactgacaagagacacctcatccattaactgctgttttgtaccacttgccgccctgtttctgtcaaatacctagtgaaaaaggcctaaacaattgtaatgatattatttattgggcattttgtgccatacatggtgatgagcagtttgcatatatttatttatgatcttcttaaaaccattccatgaaataggaactgtaattatccccaattctaaaagaaaaaacttagttttagagagttagtaatctttgcctaagggtcacaaagcacctatgtgtagaagctagggttcaaggcagatctgtgattccagaagctgttctctaaaccactatggagaactgcttagattcattgtctatgggtacattttataaaaaggcagattctagttcagtgtcataaggaactttctagtaattagagctgataagaaaagaattccccaggagaaaatggaaacactatcccagcaatctgaattccttacttggggaatgttgctgaggaggttcagtgtgtgaatggactgaaccagttggccactctctcagattccctcttcataaagcttccgtgacttctaaaccatcaggtcggtgccataagagatgctcaaaaaagcatggtcagggcttagcaagaatccttttccagtgcaaatacgaccctcatattatgttttggcgagtagccagtctttctttaacatcaatcaaccgtagcaatgtggtcatcacgaagtcttcattgactcactggcttggattttagggttagaaaatctgaatgttcttatgtccttccgtctcactttactagagtgcccaagttgactcatccttactcactcattccctcaaaatatttattgagcaccaacaatgtcacaagcactgtgctaaacactgtggtgaagtagaacaattgctaatcatttcctgggttccacttactcttgatttaaaaaaaaaaaaacaacaaaagagtttgtgtgtggccaggactaaacagctgcttcttaatttttgaattttaaaactaatctattttatttaaaaaaaatcaagtactttggaagtgaataaagtaagagatagcctgtctcactttccagaggtagcagtcactaatactgtggtgagtgattttactcaaaggaaatcacactattaagcagcttggttttgacatgttatgttgtggtcatcttttcatgtcaatacatagattaatcttttatttcaaatgtctacataaaatatcactacccacataacctataatttgtgtggccagcaatttattgaacactaaaatgttttaagttttcttattgctaacaatgtcacagtgaacatttatatattcattaaatccttttcctcatgtatctttgcactcttgtgctagtatgtctatagtgtgaatacattcataaatttcttgatcaaagctaggtcaaagttacattcattttaattttggtacatatccataaattctccataaaagtaggaccaacttacattaccaccaatagtgtatgtgagccttatttttatgtatgataggactttttttagtccaaatgttcctatagattttctgggttttttttttttttttgtccttggaagaataaccttccttccaccaagtccaagaacctgagatttttaatcattaggttttagatttcctttagcagcagagactgacttgctgtatagagggaagtcaagtagtgactaactcactatatgtcaaacacatcattactcttctcttttcctactttacatgtaatggttgcgaggaccaactttcaaatgagctaacttgggtgagacgttcactaaagtaccaagcacaatacaaatgcatcttcgagttctttgggcctcactttccctatctgaataataaggatagtaatcccttgccttttctcaaaccagttcaactcagcaaacacttcctgagcacctgctacatgccaggcaaaatgtgaaatttgcatgctatgaggctaaatggtactgattctcaaaacaaggagctcatagtctaaaaccatttttctttcttttttttccccctaaacaacctcttaaaggggtaagaagttagggggttgtttattaagaacccctgaagagcaaccctttaccactctcttaaatttgaaaaattccaaaataatattaacacctcttgactagaaaaggaaaaaaaaggaacatgccgtatgaagagcctctccaataataaatgcaaagcagctgtcaaaatatagagtcaagtgatactttcataaagtgtttgcacaattagaaaatgttatcctttttctcgggagaaatgggacatttttattttctctgctaagtgaaatgcaactttttgaagaatcaacacgcttgacatttttacaatgtacataaagaactgaactattattaaaacaacttacacactccattgcttataacttttgagagaatgaaaagaaccttaaacagaatgtgcctgtggagcttcgctttagaaatgaaatacccaaggtgttttaactacaactgtctacatgtaatagtgtgtctgcataatgactttgtaaatattaactgcaattctgtatttgctttcttgatatgacttttaacatttaaacttatactgtttctgtctacttttttcaaaagttcaatttttacttttgggggttggactgttctgagggaaagggcgatcagatcaatagttctgtcccccattccattcccccatcacccaattattctctatatcactctaccctgtttatttctttttttttttttttttttttttgagacggagtctcgctctgtcgcccaggcgggactgcggactgcagcggcgcaatctcggctcactgcaagctccgcttcccgggttcacgccattctcctgcctcagcctcccgagtagctgggactacaggcgcccgccaccgcgcccggctaattttttttgtatttttagtagagacggggtttcaccttgttagccaggatggtctcgatctcctgacctcatgatccacccgcctcggcctcccaaagtgctgggattacaggcgtgagccaccgcgcccggcctatttcttttacattatttatcagtttgccctaaccttgttttgtttgttatcttcctcaatagtgggagtaataatgggagtcagcttcgtgagggcagggattttgtcttcttgtattcatttactcacttacacacttaccgagagctactagaggccagacacttcactgagtagtagggatacaatgtgagatatatgtgtttctagcccttgtgtaattcgtattctatgcaaaggatatacgattgaaattaaccaaaactttttccatttattttctttctccgcattctttatcagatatttgaactactggaccatttaatgttcattacgttaacaaagagtgtgatatcagaaagcagaaaaaagcatgttcttttgcatttcaaaaatttagctccttggggaactagaaaggatttatgatttaggtcaaagatttgagagcacatatgatgaggaagatgaggctttcttactcactgtctaggaaataattctcctggctgtgagaaggagaaaaaagaacaaaaatgttggtagggcacagagaaggacctgggcttaaccttctggaccaagttccagggagcagcaaaacctcaattacatttgtcccctagaatggaaatgattatgtggtatgtttaggcagtgggaccttggacaacgccagtgagcttcctccagcccaatgtggtcaacattggaggattagattgatttctgtgaacccaaaaggatcacaggagtagcaataacacctgctggacctgaatgaggatcttttccattcaatccacatgttctctcaatggaaatcaattcggacaataacattagaccatcttaacccagagtgccttagcactagataagcctctgctgtggtctggatgtttgtgcccagcccctaatttcatatattgaaacctaacccccaaggtaccagtattaagaggtacggctctgaggaggtgattaggtcatgaggctccatcctggtgaatgggattaggacccttatgaaagaggcttcagggaacctgtttgccccttctgccttgtgaggatgcagcaagaagttgccatctttgaagcagagagcaagccctcaccagaagctaaatctgctggcatcttgatcgtacacttcccagcctccagagctgtgaacaatacatttatattgtttataaattacccagtctgagatattttgttatagcagctcctgaatggactaagacagcccacagagtttagcagtgaccccaaggaaaggaaagaactgcaagttgcctgagattaatgttgctcaggatccatttattccctattcctggtgtttctttgtagagagtgctccattaaagtaacacttttgtcctgtctctgcttcttccttaggcagcgatttacctaattggtgagtttaggattaaaaaaaggaatacatcctagaacatttcttaaatatattcccttttctctgtttcatgcaaacatggcttatttatttttcaagtctttctcatttcttacctggatgctttcaacacaggtgatatagcttcttccttctccaccacacctgtccccatcaatctacccatcacatttctgtcagaattatctttctataacacaaaattgcttctattcctcccttgctagtcttcagtagttccctagcaccttctactatctgagtccctggctttctccctagcctcatgtcttatcaccaacagttgctcagatatactgttttctgtctaggaaacttctcttgccccattcctgcatcagatttcttctcatacatcaagattctgctctcattttacctcttctttgaagagctccttgacacatgctgccttccccatgcccagagctggcactctatggatgccatgcctgcatttttacacacctgcccaaccccacttcccactcaggagtggtagagcaagaacttccacctcaagagagttgctggcctgtttgtccggacactcatttggttactatatttactaatttacttttatctactgagctgggttactgagtcttagaggcttgaaatctggttctaccttctctttctccatgtggtaatgaaaaccggaactctggttaaagctaagtggtctctctcactgtggctgttccactcaacatcagtagctaggtgagtaaatcaggtggaggtgggaaggaaatgggaaaacagaatactggccaggatggtctgttgtttcttatctgttgttggctttggggtattttattctaaaaccctagaggctgagaaggttaactggaaggcttccaactctgaaatcctaccgcagtcccctattgctgcataccttttaataaagtatcaatcacactatatatgtaattaatttggataggaaagtagggcatgtgtcatctctcctagtagactgtgagtcctttattactgactcagagtccatatattattttttatttctcatgcaagacatgacacagtaaaatctaataaaagtttacaaaataaatttaaaatgtaacattaacataaaaaactcttttagctgtttcctgcttctggcagggaaacaaagattgaattaagaaggaaatgaggtgggggtttaagtaagcatgtctgtactaactagttccactaatgtgggaacaatataatggattttgctgaagaaggaagtgtatgctacttaagttgggccataaaactcacagtatgatcgcagtaaaaggattgtaaagcacatactcacacattgttgatttgcccaaggttctgaagaaataccacagaatgattttggtatagaagggtagataaagcctgaaaccaaaatacaaggttagtgcatttcagagcagcagcaaacttctgttcttatgggttaattaatcatgttactgaagaattgatttggcacaagggagctatgtattgccacagaactctgaaattgcagaaattatctcatctataagtaaccccactggaattgcttgactgttctgtttcacagtggagaaattcatctttcatcagcacacacgagaagagacaacaggaagacaaaacaaattgagtagataataaagttaccttataggaataggtaatatagacaggtaaggtcagaaatttctgtggaatggaatatgaaaagatgtttatgagcagattctatttctttaggcagttttatcattcagagaagtaatctatgcatttaatctaatgccagcttttatttttctttggtgattaccacacaaaaataagaagttggcaccaaattaaatgcatggattacttctctgataaaagtactcgatataagggaaatttgaaggaaatagaatgcatacatacacacacatacacttagtatatgtgtgtgtgtgtgtgtgtatatatatatatctgtgtgtatatacacaccacacacacacacacacacacgtattggaggaataagaaatatttaataaaatctacacaatttcaaaaatatgaccaaatactggtggttcctcatttaccagtagaactctctctacaaatggaaagtgagaagtctatgaagttaccttagtttttccaattaagactgttcattgattgtatttcttctgtctctataagtaccatattcccaattagtatttcatcagttataagacccatcattattttgtgtgtaactgaaaatgaaaaaaagatttaaaatatgacttagtagttagaatttttatcttatacgcctttaagtaaatacaagagaactgtttcagcatagatttttaaaaatcatgtgtgtaaaagagaatgaaatattaattatgatatttacaaagctctgtacattcagaattgaactctttctgcatctcttttttgaatcagagttgtcataaaccacaatttttcacggtaacaccctctctgccatcaggataaataacatttcttaaaggaatattctactgcagtctctgagatttttttccctgtcttagacatccattctacaactctgatgctggcacattttttatcttggcaaaaggacttaatagaaaaattttagataacaatcaggattcatactcttctcaatagtccttaaatggtttattgaccaaaaagtaaagaagtaacagtccagtcatatcatggaaagaacaaccaaattcatgcatgcacaggcaaagacaaccatatcactatgaccacctggctgacagtaactgcaggacatcaattattgtaagacacttcctgtaatatgtttaattcctctgacataaggatttatgtgaattaggaagtggcccaagggtgaaaagtaatagggaaatagagaaatagaaccgatccaaaggaaagggggaaaaaaacccacaaaaagtgtgatgtcaagcaaagcctattctggagatgactttggttcactcccacgggagagccctagagacaaaaaggttctacagtaggttcaagtcagaggccagagaacccagagtatttatacctctgcaccatcagttattgaatgggggtgggggtgggggtgggtgtaaatttccaggtgcttccagcctgcaatgcagtcaaagcatgttcctgtagcctgaggacagccgtccaacaaagaggtgcaggtgctgaatgttgagagtgaaagcacagggagctgtcatgcatgagagtggtagagggatctgaaagtgctagcagtgcctattatacatccaaatactaaagacgcttagatgtgaaaaatgtgtgtcttagaatcgataaaatatggtatagagaatcaagtctccttgttcctggtttatctcatagcatacttaaaattcagctaaagatgaaatgccttaacaagtgaaatgggctttctgaaaaattatttcaatcaaaattgtgttaaaagctatttctaaaaaccctaacatgaaatacttagaagagatcaagtggtttgtccctggacattcaagcaattgaatgtctaaacaatccaagacagataattttgtagtatttactgtgtgaagtgaacctttaaggctgtggacaatgcaaactccctcatgtaccttgctccttgccaatttcaaacaaaccttctcacctatgatataaggcttccttagaattattgattaattatttaagatacaataaaaccaaagtatttttaaaacacagtaattatgttagtgcaggtacatgacatagatatcctcaaatattcttaggacatctataaatcaccacaaacattctggaaagcagtcttggaacatctatcaaaggccttaaaaatttcttcttctgtgaatttatcctcacaaatgaccccaagtttagaccaaaataaaaaaatgcttaaaaggcttattaaagcatgatttaaaatagaaatgattgcctaaattcctgaaaacaggggaatgtctaaataaaatatggtatctaacatgatagaaaatgtttactaatgtttaatgataccaagaaagtatcacaataataacatcaagtggtaataacaggaaacagatctgtatacaatataaaaccaacagtattgtatatataaacaccatagaagatctgaaaaaaaattagatgacattatttgtgatatctattttatttattatatttttctgcatactactctacagtgagcctgtcctttataagaaaaaatgctaatgatttattgtgtatgaaaaaagtgtatctgatttgattatatatttttatttccacttatattttctaggattattttgctttagaattctatgtataatcctgtgaaaatttgtagtgttgtagggactggaaagatcagagattatgttatggccatgaatgaggcctgacctgcattgtcaataactaaattgattattgtggaaacaacaaaaaaattcattttttgaaatgaaaatctttattgaaataactattttaccattgtgtggtcagattcactgcatttgatgctttttcaggatttgtttttcctgctagaaatgctagagttgtcacagatgtgatatttatgttttcattgtctggggagggccaagtttcatgacagagaaagactggggccaattctgtgattatggatgtcaacttatctcagagcagtatcattggttgagcagtcctgcaggacatctaagtttaccgtctttatcttgccattgtcaaagatcctggacctatttttttctgccttgaaaacttttgtgcagtaaaaccagcaatggattttagcagagttgatgcatcattaggattttcacattaactctttggacttagagccatgtctaaagtgtccttcttttggatatagtgcctggtgcagaactctaccacaaaacatcaggtgtgcctctgaatagtctttgcaagaagcacaaaatcctagaattgaggtgaatttgtaagttcctctagtccaaccacctttcaaatgaaagaatccttccaaagcacccctggccaatagctcatcaagattttgcttagatattcttattgagggggaacttactaactcctttaattcttattttgcttaaggctgagtttttaaaacatctaacatcagccaagattattgatttatctataaggaataatctgtgaattaaccttctgtagcttttccttgctgaccagggaatacctccccattgaagcctaggccagattccagtccgttttgaccataccccatcatggtattttagagtacacctgaataagatacatggtgccatgtacatggaaactgactgctctcatgttacgggttgaactgtgtccccccaaaatttgtatgttgaagtcctaaaattggcactgttgccataagccagggaactacctaggagatgctaggagagaggcctagaatggaaccctccctcccccgcccctggggccttcagagggagcggtgcccagctgacaccttgaccttggacttctagcctccaaactgtgagacaatacatttctgttgcttaagccactcagttagtgtgctttattttggcagtcttagcaaactaatacatcccccaatccagaactgtcctcctttggataataaaaacagcaataattatagtgtcattaccctgagtgactggtcccactgttggtcattctttgtagatgtgagttattgccctattgagatcagaagtcctctcacttagaggcatatctaagacttttttcttgtggagggagctcactcaactgtaggtaaggtttgactcatctgggttagtagtaagaacaaacttccaagtggcaccatcttaaaggtgcaagcccatgtgggcgatgaccaggtctggtatattaagaggctcttggtagcacattagaaacacctggagagattttaaaatttacaaagcctagccaaaccccagacccattaaccctgactctctgagaataggaccctggcacctgtgttttaaggattctaggtgatttcaatgtgtagccaaggttcactgccatagcctgtcctggaatgcaggtaactaaaacttcagcagattatgaaaaacaaaagttactttcttggatgcatatattcttatagcctcaaaactgaaactgcaaactgaacaatgctgcagtcagatacacacacatatttcaactgcataacttcctttaataatacttttatttttccaaatttgaagactgtccctaagtcatttcttctaaaagttagtaataatcccaccaactcacatttacatagaagttacagtttaaagtttgcatctcgtaataacttggtgagatagggcaagcattatttctaatttgcatatgagaaaaaactaaggctcggatgagttatgtgacttccctgagtcatgttagagtaactaactcctgatttgtaaactgaaggtcccaaatcctgggaactccctcagctctgggcaagccaggacaggtaggtcaccctgcacctacacaaggactgagctgagttctagttacctgctgtgaaggactgtagaggttatctaagccagctcctccttttactggaaaaggaaaagactgagataagtttccaaaacccctgctggagcaccttctacttctagaaagatgttgaggggcttccagggcacaaaggaaagagaagtaactgtgtctccttccccaaccatgtatgtgatacattcattctctaggattggaaattcccagaaagctgtgtcagcaatgagatttgtttcattgttttgccttgttttgtcattgagttgttatagttaaagtttattattttttaatgcagaaaaaagtgacttttgggggagtgcagagttctatgaatttttaacacatgtctagttatttgaccacaaccgtaatcaagatacagaacagttttatcatttcaagtgctctcctgctatgcttttataacacacccttccccaccccaactcctggcaattactgctctattctccgtaactgtagttttgccttttcgagaatatcatataaataatcatgtattatgtaacattctgagacaggcttctttcacccagcataatgcctttgagattcatccagatcgttgtgtgtatcagtagtttgtttttattactgggttatagttcattgtatggatataccacagtttctttagccattcacccactgaaagtcatttgggttgtttctaggctttggtgattatgaataaagctgctatcaacatcca

SEQ ID NO: 188523 - DNA, 2160 bp, Homo sapiens
  Payload ID: 17091
  Gene Symbol: STXBP4
  Gene Name: syntaxin binding protein 4
  Uniprot ID: Q6ZWJ1
  ENST ID: ENST00000398391
  CDS Start-End: 276-1013
ggccgggttgccagattacgggaaagccatttaagaagttcctggaataatattagtcagagtaatataggatctgcaggaagtgtctcaagatagttggaaaagaagaatttctagactcttcatcaagatcttcatttatacagctgttaaatccaaggctactttggtgaaagcatgaataaaaatacatctactgtagtatcacccagtctacttgaaaagatggtcgtttgaagccaggagatcaacttgtctcagtcaacaaggaatctatgattggtgtatcatttgaagaagcaaaaagcataattaccggagccaagttgagtactaggttagaatctgcttgggagatagcattcataagacaaaaatccgacaacattcagccagaaaatctgtcatgtacatcacttatagaagcttcaggagaatatggacctcaagcctcaacattaagtcttttttcttctcctcctgaaatactaatcccaaagacctcatccactcccaaaacaaataatgacattttatcttcttgtgagataaaaactggatacaacaaaacagtacagattccaattacttcagaaaacagtactgtgggtttgtctaatacagatgttgcttctgcctggactgaaaattatgggctacaagaaaagatctccctaaatccctctgttcgctttaaggcagagaaactggaaatggctctaaattatcttggtattcagcccacaaaggaacaacaccaagccctgagacagcaagtacaagcagactcaaaagggacagtgtcttttggagattttgtccaggttgccagaaacttgttttgcttgcagttggatgaagtaaatgttggtgcacatgaaatttccaatatattagattcacagcttcttccttgtgattcttcagaagcagatgaaatggaaaggctcaagtgtgaaagagatgatgccttgaaagaagtaaatacacttaagtggccagggcagaattagatgaagagccaataaagcaagtcgtggcaattttggatcctgtgagttctttgggaaatacattttttttcatgtgcagggctattcttaagggacatcatgttttgctaacgtaatttggaattaatattattttagagaggaaaaaaacacacatatcccaaatatactgtaacatttttcttctctttttttgtttgtttggttttttgattcttgtttttgttttgtgtttttgagacagggtcgcactctgtcgcccaggctggagtgcaatactgcaatcacgtctcactgcagcctcaacctcctgggttcaagtgattctcccacctcaacctcccaagtaactgggacaacatgtccatgccaccatgctcaactaatttttttttaaatttttattttgtagagatggtgtctcactattttgttcagactggtctcaaacacctgggctcaaatgacccacctacctcagcctctcaaagtgctgggattacaggtgtgagccaccatgtctggccttgattctctttatgtggtttcattctgtttttagaagaatattacatttaaattatatcctaatttttatagaaagctatattttccaaatctttaggaaaagcaacataactacttgatttaccactaattcgtcataggcacatatttttaaaattattttattaaataaggtatagtatattgataattatttaatttttattaaatagaaaatatttacaccaaaaggaaagaaaatttgttttgctaccttagtttttataatctcaacctctagaggaagccattgttgcaaatatattatttatcttttcatagatttttctctacacagaaaattatattttttaaaaataggcagggcatgatggctgacacctttaatcgcagtactttgggaggctgaggcaagaggattacttgagctcaggagtttaacatcagcctgggcaacatagcaggaccccatctctactatttaaaacataaaaacaaaaataaataaatatatgtatatgtggggacagggagtatgtgagaaatttctgtactttcccttcaattttgctatgaatccaaaactgcttcaaaaaataataaagccttaaaaaatttt

SEQ ID NO: 188524 - DNA, 2229 bp, Homo sapiens
  Payload ID: 17091
  Gene Symbol: STXBP4
  Gene Name: syntaxin binding protein 4
  ENST ID: ENST00000405898
  CDS Start-End: 120-1082
gcttgcagtcgggctacggaggccgggttgccagattacgggaaaagaagaatttctagactcttcatcaagatcttcatttatacagctgttaaatccaaggctactttggtgaaagcatgaataaaaatacatctactgtagtatcacccagtctacttgaaaaggatcctgcctttcagatgattacaattgccaaggaaacaggccttggcctgaaggtactaggaggaattaaccggaatgaaggcccattggtatatattcaggaaattattcctggaggagactgttataaggatggtcgtttgaagccaggagatcaacttgtctcagtcaacaaggaatctatgattggtgtatcatttgaagaagcaaaaagcataattaccggagccaagttgaggttagaatctgcttgggagatagcattcataagacaaaaatccgacaacattcagccagaaaatctgtcatgtacatcacttatagaagcttcaggagaatatggacctcaagcctcaacattaagtcttttttcttctcctcctgaaatactaatcccaaagacctcatccactcccaaaacaaataatgacattttatcttcttgtgagataaaaactggatacaacaaaacagtacagattccaattacttcagaaaacagtactgtgggtttgtctaatacagatgttgcttctgcctggactgaaaattatgggctacaagaaaagatctccctaaatccctctgttcgctttaaggcagagaaactggaaatggctctaaattatcttggtattcagcccacaaaggaacaacaccaagccctgagacagcaagtacaagcagactcaaaagggacagtgtcttttggagattttgtccaggttgccagaaacttgttttgcttgcagttggatgaagtaaatgttggtgcacatgaaatttccaatatattagattcacagcttcttccttgtgattcttcagaagcagatgaaatggaaaggctcaagtgtgaaagagatgatgccttgaaagaagtaaatacacttaagtggccagggcagaattagatgaagagccaataaagcaagtcgtggcaattttggatcctgtgagttctttgggaaatacattttttttcatgtgcagggctattcttaagggacatcatgttttgctaacgtaatttggaattaatattattttagagaggaaaaaaacacacatatcccaaatatactgtaacatttttcttctctttttttgtttgtttggttttttgattcttgtttttgttttgtgtttttgagacagggtcgcactctgtcgcccaggctggagtgcaatactgcaatcacgtctcactgcagcctcaacctcctgggttcaagtgattctcccacctcaacctcccaagtaactgggacaacatgtccatgccaccatgctcaactaatttttttttaaatttttattttgtagagatggtgtctcactattttgttcagactggtctcaaacacctgggctcaaatgacccacctacctcagcctctcaaagtgctgggattacaggtgtgagccaccatgtctggccttgattctctttatgtggtttcattctgtttttagaagaatattacatttaaattatatcctaatttttatagaaagctatattttccaaatctttaggaaaagcaacataactacttgatttaccactaattcgtcataggcacatatttttaaaattattttattaaataaggtatagtatattgataattatttaatttttattaaatagaaaatatttacaccaaaaggaaagaaaatttgttttgctaccttagtttttataatctcaacctctagaggaagccattgttgcaaatatattatttatcttttcatagatttttctctacacagaaaattatattttttaaaaataggcagggcatgatggctgacacctttaatcgcagtactttgggaggctgaggcaagaggattacttgagctcaggagtttaacatcagcctgggcaacatagcaggaccccatctctactatttaaaacataaaaacaaaaataaataaatatatgtatatgtggggacagggagtatgtgagaaatttctgtactttcccttcaattttgctatgaatccaaaactgcttcaaaaaataataaagccttaaaaaatttt

SEQ ID NO: 188525 - DNA, 2807 bp, Homo sapiens
  Payload ID: 17091
  Gene Symbol: STXBP4
  Gene Name: syntaxin binding protein 4
  ENST ID: ENST00000434978
  CDS Start-End: 197-1792
cttgcagtcgggctacggaggccgggttgccagattacgggaaagccatttaagaagttcctggaataatattagtcagagtaatataggatctgcaggaagtgtctcaagatagttggaaaagaagaatttctagactcttcatcaagatcttcatttatacagctgttaaatccaaggctactttggtgaaagcatgaataaaaatacatctactgtagtatcacccagtctacttgaaaaggatcctgcctttcagatgattacaattgccaaggaaacaggccttggcctgaaggtactaggaggaattaaccggaatgaaggcccattggtatatattcaggaaattattcctggaggagactgttataaggatggtcgtttgaagccaggagatcaacttgtctcagtcaacaaggaatctatgattggtgtatcatttgaagaagcaaaaagcataattaccggagccaagttgaggttagaatctgcttgggagatagcattcataagacaaaaatccgacaacattcagccagaaaatctgtcatgtacatcacttatagaagcttcaggagaatatggacctcaagcctcaacattaagtcttttttcttctcctcctgaaatactaatcccaaagacctcatccactcccaaaacaaataatgacattttatcttcttgtgagataaaaactggatacaacaaaacagtacagattccaattacttcagaaaacagtactgtgggtttgtctaatacagatgttgcttctgcctggactgaaaattatgggctacaagaaaagatctccctaaatccctctgttcgctttaaggcagagaaactggaaatggctctaaattatcttggtattcagcccacaaaggaacaacaccaagccctgagacagcaagtacaagcagactcaaaagggacagtgtcttttggagattttgtccaggttgccagaaacttgttttgcttgcagttggatgaagtaaatgttggtgcacatgaaatttccaatatattagattcacagcttcttccttgtgattcttcagaagcagatgaaatggaaaggctcaagtgtgaaagagatgatgccttgaaagaagtaaatacacttaaggaagccaaagctgtagttgaagaaacaagagccctgcgtagtcggattcatcttgctgaagctgctcagagacaggcacatggaatggaaatggactatgaagaagtgatccgtctgttagaggccaagattacagagctaaaggctcagcttgctgattattctgaccaaaataaagaaagtgttcaggatttaaaaaagagaatcatggtactcgactgccaattacgaaaatcagaaatggctcgaaaaacttttgaggcatccactgaaaagcttcttcattttgtagaggctattcaagaagtattttctgataattctactcctttatcaaatttaagtgaaagaagagctgtgttagcttctcagacttccctcacaccactgggaaggaatggacgtagcatcccagcaacgctggcgcttgaatctaaggaacttgttaaatctgttcgtgccttacttgatatggattgtttaccttatgggtgggaggaagcttacacagcagatggaatcaagtacttcatcaatcatgtaacacagactacatcctggatccatcccgtgatgagtgtcctgaatctatctcgctcagaggagaatgaagaggattgctctagagaactccccaaccagaaaagttgatggttttccttaggaagtggagctacatggatgatgtgagcagagacgcataacatccaattctgagatgaaacagtctaaaataggagtaaagcatgcactacttgttgaagtgtgaaatggagactctggactttgggtatttttgtaaaacttttgatatttctgtatacatttaaaaaatcaattgccactacagtagttccttaagaataatctagttatattttttgaaatcacatataattagactttataatatatatactttttcatatataattagatctttctttgtaatttcatatgtagttcttcatagggtctcagatacaatggtttttataattgacatattgaaaaagtatatgaacataatgaaacacctcatttatttgataattcactaatgttttatattcatatattaggaaagtgaacttagcaagctttttggaatttaaggatcacatttagacatctcatgggctgatgaatacagctggtatctttgtggagctttctaatttacaaaatgctttgtagaccccattgtctttaaaccatacaacatgcccgtgaagctgatctggtgggtatgtttattcttggttttcagtagggaaatagcagttcagagagaggaagctctctgtcccagcaccgagactcactcctaagtcttctgattccatgagcagtcccccttcccccataccctgctgtctccacggagggaggtcacagcccatcacgcaggacactgtgattgtgttgatgcagctggctccacagctgtgcattccacagagattcagaaggcacctcttcggtcaaacatggcccctctataaccccactattcttctcctataaacccttcccccttctctgcacccaagccttcgccaagtaggcgcactctttgtgatattgtttcagcagacttctttcagcagctcgtgtttttctaaagtgaaaggcatggtttgtcctgcttaggttgcccttccca

SEQ ID NO: 188526 - DNA, 423 bp, Homo sapiens
  Payload ID: 17091
  Gene Symbol: STXBP4
  Gene Name: syntaxin binding protein 4
  ENST ID: ENST00000463234
  CDS Start-End: 1-246
aataatgacattttatcttcttgtgagataaaaactggatacaacaaaacagtacagattccaattacttcagaaaacagtactgtgggtttgtctaatacaggctctaaattatcttggtattcagcccacaaaggaacaacaccaagccctgagacagcaagtacaagcagactcaaaagggacagtgtcttttggagattttgtccaggttgccagaaacttgttttgcttgcagttggatgaagtaaatgttggtgcacatgaaatttccaatatattagattcacagcttcttccttgtgattcttcagaagcagatgaaatggaaaggctcaagtgtgaaagagatgatgccttgaaagaagtaaatacacttaaggtaacctctaatttagtttccttatgttttcttcagaaaaa

SEQ ID NO: 188527 - DNA, 3456 bp, Homo sapiens
  Payload ID: 17092
  Gene Symbol: STXBP5
  Gene Name: syntaxin binding protein 5 (tomosyn)
  Uniprot ID: Q5T5C0
  ENST ID: ENST00000321680
  CDS Start-End: 1-3456
atgaggaaattcaacatcaggaaggtgctggacggcctgaccgccggctcgtcctcggcgtcgcagcagcaacagcagcagcatccgcctgggaaccgggagccggagatccaggaaacgctccagtccgagcactttcagctctgcaagactgttcgccatggatttccctatcaaccctcagccctggcctttgatcctgtacagaagatcctggcagtgggaactcagactggtgctttaaggctctttggtcgtccaggagtagaatgttattgccagcatgacagtggagctgcagtaatccagctccagttcctgattaatgagggagcgcttgtgagtgccttggctgatgacaccttacacttatggaatttacgtcagaagaggcctgccatactacattcgcttaaattttgcagagaaagggttacattttgccatctgcctttccagagtaagtggctctatgtgggcactgaacgaggtaatatacatattgtcaatgtggagtccttcacactctcaggctacgtcattatgtggaataaagccattgaactgtcatctaaatctcacccaggacctgtggtccatataagtgataatccaatggacgagggaaagcttttgattggctttgaatctggaacagtagttttatgggacctcaaatcaaagaaagccgactacagatacacatatgatgaggctatccactctgttgcttggcatcatgaaggaaaacaatttatttgcagtcattcagatggcaccttgactatatggaatgtaaggtcccctgctaaaccagtacagacaatcactccacatggaaaacagttaaaggatgggaagaagccagaaccatgcaaacctatcctcaaggtggaattcaaaacgactagatctggggagccttttattattttatcaggaggtttgtcatatgatactgtaggaagaagaccttgcttaacagtgatgcatgggaaaagcactgctgtgctagaaatggactattcaattgttgattttctaacgctgtgtgaaacaccatacccaaatgattttcaagaaccatatgctgtggttgttcttctagaaaaggatttagtacttatagaccttgcacaaaatggatatcctatatttgaaaatccctaccctttgagtatacatgagtcccctgttacatgttgcgaatattttgcggattgtcctgtggaccttattcctgcactttattctgttggagctagacagaaacgtcaaggttacagcaaaaaggaatggcccatcaacggaggtaattggggcttgggtgctcaaagttacccagaaataattattacagggcatgctgatgggtcagttaagttctgggatgcttctgcaataactctacaagtattatataagctaaagacatctaaagtatttgaaaagtcaagaaataaagatgacaggccaaacacagacattgtagatgaagatccatatgccattcagatcatctcctggtgtccagaaagtagaatgctgtgcatcgctggagtttcagctcatgtcattatttatagattcagcaagcaggaagtaatcacagaagtcattccgatgcttgaagttcgattattatatgagataaatgatgtggaaactccggagggtgagcagccaccacctttgccaacacccgtgggagggtccaaccctcagcccatccctcctcagtctcatccatctaccagtagcagttcatctgatgggcttcgtgataatgtaccttgtttaaaagttaaaaactcaccacttaaacagtctccaggttatcaaacagaactagttattcagttggtttgggtgggtggagaaccaccacaacaaataaccagcctggcagtcaattcttcctatggactggtggtttttggcaattgcaatggcattgctatggttgactacctccagaaagcagtgctgctcaacctgggcactattgaattatatggctctaatgatccttatcggagagaaccccgatctcctcgtaaatctcgacagccttcaggagccggtctgtgtgatattagtgaagggactgttgttccagaggatcgctgcaaatctccaacctctggttcttcatcaccacacaattcagatgatgaacaaaaaatgaataattttatagaaaaggtgaagaccaaaagcagaaagttttccaagatggtagccaatgatatagcaaagatgtcaaggaagttaagcttacctactgacctaaagcctgatttagatgtaaaggataactcctttagccgatcacggagttcaagtgtaacaagcattgacaaagaatcccgagaagcgatctccgctcttcatttctgtgaaacgtttactcgaaagacggactcgtccccttccccttgtctatgggttggaacaacgctaggaacagtgcttgtcattgcactgaaccttcccccagggggagagcaaagacttcttcagccagtaattgtgtctccaagtggtactatattgaggttaaaaggtgcaatcttgagaatggcatttctggataccacaggctgcttaataccacctgcgtatgaaccctggagagagcacaatgttcctgaagaaaaagacgaaaaggagaaattgaaaaaacggcggcctgtctcagtatccccctcctcttctcaggaaattagtgaaaaccagtatgcagtgatatgttctgaaaagcaagcaaaagtaatctcactgccaacccagaactgtgcttataagcaaaatattacagagacctcgtttgtgcttcgtggagatattgtagcattgagtaacagtatctgccttgcctgtttctgtgccaatggacatataatgacttttagtttgccaagtttaagacctctgttggatgtgtattacttgccccttaccaatatgcggatagccagaacgttctgctttaccaacaatggacaagcattataccttgtttcacctacagaaatccagagacttacttatagtcaagagacctgtgaaaatcttcaggaaatgttgggtgaactcttcactcctgtagaaacacctgaagcaccaaacaggggattctttaaaggcttatttggaggtggtgcacaatctcttgacagagaagaactatttggagaatcgtcctcaggaaaggcttcaaggagccttgcacagcatattcctggccctggtggcattgaaggcgtaaaaggggcagcatctggagttgttggtgaattagcacgagccaggctggcactagatgaaagagggcagaaacttggcgatctggaagaaagaactgcggccatgttatcaagtgcagagtcattttctaaacatgctcatgagattatgttgaaatacaaagataagaagtggtaccagttctga

SEQ ID NO: 188528 - DNA, 521 bp, Homo sapiens
  Payload ID: 17092
  Gene Symbol: STXBP5
  Gene Name: syntaxin binding protein 5 (tomosyn)
  ENST ID: ENST00000367475
  CDS Start-End: 1-521
gaaagcagtgctgctcaacctgggcactattgaattatatggctctaatgatccttatcggagagaaccccgatctcctcgtaaatctcgacagccttcaggagccggtctgtgtgatattagtgaagggactgttgttccagaggatcgctgcaaatctccaacctctggttcttcatcaccacacaattcagatgatgaacaaaaaatgaataattttatagaaaaggcaaagatgtcaaggaagttaagcttacctactgacctaaagcctgatttagatgtaaaggataactcctttagccgatcacggagttcaagtgtaacaagcattgacaaagaatcccgagaagcgatctccgctcttcatttctgtgaaacgtttactcgaaagacggactcgtccccttccccttgtctatgggttggaacaacgctaggaacagtgcttgtcattgcactgaaccttcccccagggggagagcaaagacttcttcagccagtaattgtgtctccaagtg

SEQ ID NO: 188529 - DNA, 3297 bp, Homo sapiens
  Payload ID: 17092
  Gene Symbol: STXBP5
  Gene Name: syntaxin binding protein 5 (tomosyn)
  Uniprot ID: Q5T5C0
  ENST ID: ENST00000367480
  CDS Start-End: 1-3297
atgaggaaattcaacatcaggaaggtgctggacggcctgaccgccggctcgtcctcggcgtcgcagcagcaacagcagcagcatccgcctgggaaccgggagccggagatccaggaaacgctccagtccgagcactttcagctctgcaagactgttcgccatggatttccctatcaaccctcagccctggcctttgatcctgtacagaagatcctggcagtgggaactcagactggtgctttaaggctctttggtcgtccaggagtagaatgttattgccagcatgacagtggagctgcagtaatccagctccagttcctgattaatgagggagcgcttgtgagtgccttggctgatgacaccttacacttatggaatttacgtcagaagaggcctgccatactacattcgcttaaattttgcagagaaagggttacattttgccatctgcctttccagagtaagtggctctatgtgggcactgaacgaggtaatatacatattgtcaatgtggagtccttcacactctcaggctacgtcattatgtggaataaagccattgaactgtcatctaaatctcacccaggacctgtggtccatataagtgataatccaatggacgagggaaagcttttgattggctttgaatctggaacagtagttttatgggacctcaaatcaaagaaagccgactacagatacacatatgatgaggctatccactctgttgcttggcatcatgaaggaaaacaatttatttgcagtcattcagatggcaccttgactatatggaatgtaaggtcccctgctaaaccagtacagacaatcactccacatggaaaacagttaaaggatgggaagaagccagaaccatgcaaacctatcctcaaggtggaattcaaaacgactagatctggggagccttttattattttatcaggaggtttgtcatatgatactgtaggaagaagaccttgcttaacagtgatgcatgggaaaagcactgctgtgctagaaatggactattcaattgttgattttctaacgctgtgtgaaacaccatacccaaatgattttcaagaaccatatgctgtggttgttcttctagaaaaggatttagtacttatagaccttgcacaaaatggatatcctatatttgaaaatccctaccctttgagtatacatgagtcccctgttacatgttgcgaatattttgcggattgtcctgtggaccttattcctgcactttattctgttggagctagacagaaacgtcaaggttacagcaaaaaggaatggcccatcaacggaggtaattggggcttgggtgctcaaagttacccagaaataattattacagggcatgctgatgggtcagttaagttctgggatgcttctgcaataactctacaagtattatataagctaaagacatctaaagtatttgaaaagtcaagaaataaagatgacaggccaaacacagacattgtagatgaagatccatatgccattcagatcatctcctggtgtccagaaagtagaatgctgtgcatcgctggagtttcagctcatgtcattatttatagattcagcaagcaggaagtaatcacagaagtcattccgatgcttgaagttcgattattatatgagataaatgatgtggaaactccggagggtgagcagccaccacctttgccaacacccgtgggagggtccaaccctcagcccatccctcctcagtctcatccatctaccagtagcagttcatctgatgggcttcgtgataatgtaccttgtttaaaagttaaaaactcaccacttaaacagtctccaggttatcaaacagaactagttattcagttggtttgggtgggtggagaaccaccacaacaaataaccagcctggcagtcaattcttcctatggactggtggtttttggcaattgcaatggcattgctatggttgactacctccagaaagcagtgctgctcaacctgggcactattgaattatatggctctaatgatccttatcggagagaaccccgatctcctcgtaaatctcgacagccttcaggagccggtctgtgtgatattagtgaagggactgttgttccagaggatcgctgcaaatctccaacctctgatgtaaaggataactcctttagccgatcacggagttcaagtgtaacaagcattgacaaagaatcccgagaagcgatctccgctcttcatttctgtgaaacgtttactcgaaagacggactcgtccccttccccttgtctatgggttggaacaacgctaggaacagtgcttgtcattgcactgaaccttcccccagggggagagcaaagacttcttcagccagtaattgtgtctccaagtggtactatattgaggttaaaaggtgcaatcttgagaatggcatttctggataccacaggctgcttaataccacctgcgtatgaaccctggagagagcacaatgttcctgaagaaaaagacgaaaaggagaaattgaaaaaacggcggcctgtctcagtatccccctcctcttctcaggaaattagtgaaaaccagtatgcagtgatatgttctgaaaagcaagcaaaagtaatctcactgccaacccagaactgtgcttataagcaaaatattacagagacctcgtttgtgcttcgtggagatattgtagcattgagtaacagtatctgccttgcctgtttctgtgccaatggacatataatgacttttagtttgccaagtttaagacctctgttggatgtgtattacttgccccttaccaatatgcggatagccagaacgttctgctttaccaacaatggacaagcattataccttgtttcacctacagaaatccagagacttacttatagtcaagagacctgtgaaaatcttcaggaaatgttgggtgaactcttcactcctgtagaaacacctgaagcaccaaacaggggattctttaaaggcttatttggaggtggtgcacaatctcttgacagagaagaactatttggagaatcgtcctcaggaaaggcttcaaggagccttgcacagcatattcctggccctggtggcattgaaggcgtaaaaggggcagcatctggagttgttggtgaattagcacgagccaggctggcactagatgaaagagggcagaaacttggcgatctggaagaaagaactgcggccatgttatcaagtgcagagtcattttctaaacatgctcatgagattatgttgaaatacaaagataagaagtggtaccagttctga

SEQ ID NO: 188530 - DNA, 9177 bp, Homo sapiens
  Payload ID: 17092
  Gene Symbol: STXBP5
  Gene Name: syntaxin binding protein 5 (tomosyn)
  Uniprot ID: Q5T5C0
  ENST ID: ENST00000367481
  CDS Start-End: 109-3456
actcctccgtttccgcggtcgaagctgccttcggccccgggtggtctcccccgcccggggaccccctgtgcctcccctcccgggctgcgggggagcccctccgagaccatgaggaaattcaacatcaggaaggtgctggacggcctgaccgccggctcgtcctcggcgtcgcagcagcaacagcagcagcatccgcctgggaaccgggagccggagatccaggaaacgctccagtccgagcactttcagctctgcaagactgttcgccatggatttccctatcaaccctcagccctggcctttgatcctgtacagaagatcctggcagtgggaactcagactggtgctttaaggctctttggtcgtccaggagtagaatgttattgccagcatgacagtggagctgcagtaatccagctccagttcctgattaatgagggagcgcttgtgagtgccttggctgatgacaccttacacttatggaatttacgtcagaagaggcctgccatactacattcgcttaaattttgcagagaaagggttacattttgccatctgcctttccagagtaagtggctctatgtgggcactgaacgaggtaatatacatattgtcaatgtggagtccttcacactctcaggctacgtcattatgtggaataaagccattgaactgtcatctaaatctcacccaggacctgtggtccatataagtgataatccaatggacgagggaaagcttttgattggctttgaatctggaacagtagttttatgggacctcaaatcaaagaaagccgactacagatacacatatgatgaggctatccactctgttgcttggcatcatgaaggaaaacaatttatttgcagtcattcagatggcaccttgactatatggaatgtaaggtcccctgctaaaccagtacagacaatcactccacatggaaaacagttaaaggatgggaagaagccagaaccatgcaaacctatcctcaaggtggaattcaaaacgactagatctggggagccttttattattttatcaggaggtttgtcatatgatactgtaggaagaagaccttgcttaacagtgatgcatgggaaaagcactgctgtgctagaaatggactattcaattgttgattttctaacgctgtgtgaaacaccatacccaaatgattttcaagaaccatatgctgtggttgttcttctagaaaaggatttagtacttatagaccttgcacaaaatggatatcctatatttgaaaatccctaccctttgagtatacatgagtcccctgttacatgttgcgaatattttgcggattgtcctgtggaccttattcctgcactttattctgttggagctagacagaaacgtcaaggttacagcaaaaaggaatggcccatcaacggaggtaattggggcttgggtgctcaaagttacccagaaataattattacagggcatgctgatgggtcagttaagttctgggatgcttctgcaataactctacaagtattatataagctaaagacatctaaagtatttgaaaagtcaagaaataaagatgacaggccaaacacagacattgtagatgaagatccatatgccattcagatcatctcctggtgtccagaaagtagaatgctgtgcatcgctggagtttcagctcatgtcattatttatagattcagcaagcaggaagtaatcacagaagtcattccgatgcttgaagttcgattattatatgagataaatgatgtggaaactccggagggtgagcagccaccacctttgccaacacccgtgggagggtccaaccctcagcccatccctcctcagtctcatccatctaccagtagcagttcatctgatgggcttcgtgataatgtaccttgtttaaaagttaaaaactcaccacttaaacagtctccaggttatcaaacagaactagttattcagttggtttgggtgggtggagaaccaccacaacaaataaccagcctggcagtcaattcttcctatggactggtggtttttggcaattgcaatggcattgctatggttgactacctccagaaagcagtgctgctcaacctgggcactattgaattatatggctctaatgatccttatcggagagaaccccgatctcctcgtaaatctcgacagccttcaggagccggtctgtgtgatattagtgaagggactgttgttccagaggatcgctgcaaatctccaacctctgcaaagatgtcaaggaagttaagcttacctactgacctaaagcctgatttagatgtaaaggataactcctttagccgatcacggagttcaagtgtaacaagcattgacaaagaatcccgagaagcgatctccgctcttcatttctgtgaaacgtttactcgaaagacggactcgtccccttccccttgtctatgggttggaacaacgctaggaacagtgcttgtcattgcactgaaccttcccccagggggagagcaaagacttcttcagccagtaattgtgtctccaagtggtactatattgaggttaaaaggtgcaatcttgagaatggcatttctggataccacaggctgcttaataccacctgcgtatgaaccctggagagagcacaatgttcctgaagaaaaagacgaaaaggagaaattgaaaaaacggcggcctgtctcagtatccccctcctcttctcaggaaattagtgaaaaccagtatgcagtgatatgttctgaaaagcaagcaaaagtaatctcactgccaacccagaactgtgcttataagcaaaatattacagagacctcgtttgtgcttcgtggagatattgtagcattgagtaacagtatctgccttgcctgtttctgtgccaatggacatataatgacttttagtttgccaagtttaagacctctgttggatgtgtattacttgccccttaccaatatgcggatagccagaacgttctgctttaccaacaatggacaagcattataccttgtttcacctacagaaatccagagacttacttatagtcaagagacctgtgaaaatcttcaggaaatgttgggtgaactcttcactcctgtagaaacacctgaagcaccaaacaggggattctttaaaggcttatttggaggtggtgcacaatctcttgacagagaagaactatttggagaatcgtcctcaggaaaggcttcaaggagccttgcacagcatattcctggccctggtggcattgaaggcgtaaaaggggcagcatctggagttgttggtgaattagcacgagccaggctggcactagatgaaagagggcagaaacttggcgatctggaagaaagaactgcggccatgttatcaagtgcagagtcattttctaaacatgctcatgagattatgttgaaatacaaagataagaagtggtaccagttctgacaaccagaatccaataagtccaacttcagccagaaggaaaaaagttttccatttttattacattctttaggaaagttaacgttaaagggatgttcgtcactgaatactgttctttcctagcacagtcatgcactgttttacctcagtcatgtggctttaactgaggagtgttcacacgcactcgaaatggagtatatggtgtgtgccagttatgagttgaccatttgggaattaaacaggtcacacgtgacagatgaagaaaccaagggggctgctgaggagacctggtgcagggactaatcctggatcattcctgtattaaactttcatatgccaaaagggtttgtgccgttttatctgccatcagtgtttgacctgtttagggcagaggcaataagtcagaagtcttgaagttgaaatagttatatgtgtgtcattggactggattataaacagctgtcttggactttccctctcttaacactgactggtcatcagtatcattagtgaaaaagaaacaaattgtttgttatcatctctttagacagataagctgaatggtgggctttaaataataaaaacatacacatagttgacttgtgtatgagctactcttggattcttgttattatagacttgtatttagttcatattttgtcaaaagcaaaacaagaagatacatcacttttcattgaaaagaaaagtgtagagcatgactgaattgctcatcattctgggagtttccatgtagtggctatgcagtgtggaaagtgagaaaaacctccattgtggtgaggagaatacttcaatgtcccttgtccttgttctcattaattcagctaaaggtggatttgaccaaaataatgctggttaaatttgtagaaatgttgaaattggctgtgttttaaattttgcttgaatttttataaaatgtttaaccaaatgtacctttgcattctttaattaaaattgcttaaaaaaaaactttcattatttcagtaaaatgctcagctcccttttcaaaatgccctttatttgctaactgttccaatacactcaggtgatgagccaattaaatgttagtgcacatgctatcgcatggaaaattacaagcatctgttgtcaataattatataagagtttagtctgatgacctacaaaatattttgtgtagaaatatactataaatctgtacatatcctttcaaggttttaaaaaaccaaaaagaaaggaaaatatgtacactgtgataactaaattatttctgtattggaatataatacaatttgagaccagcaatggacaatgaatgattgtttcatagaatagcattacgggcaggaaagaaaccacctagtagatctagaagtaagcaatctcagaatacagactaatctgagattattattgattgttgttaaagcaacccagcaaaagcaaaatggaagcattaaaattaatgttaatgaaatttaaatattgtcttctataaaaaattcctttaaatgattttgttttttcattaagagataatcagagcacaaattgatagtaaacaggatggttgtttttctattctatatgatcattaaaggaatatgtaggacatcttaactttttcatacagtctgttatgcatattttcctctacttttcattaataaagcttttatgtttacattttataacatgcactactagatgcaaaagtttacatcaaagtttactttaaatatcatttggtagggactaaatgtgtgtgatagagataattgatcaagccaaaagaaatattttttaaataagcccttttcaaaagtttttgaatttatagaaagcaccaatgaataacatatttctgtttcgttaatgtcagctgcctgaacattcagcagtttataaattgcttaatttgtgttatctattatccagtaaacccatagttccatgatatgtcacaggaattgttaggtcctattttaaaggtacagttttgtgaatgtcatcaataaaatcaacagttatggatttgaagaagttgggaaagcattatgtagattaatatactggttggttccctatctatgtggaaggtcatattagctgcaattatttaatttgctgtgttattttgtgttatataacacaaatatatttgtatattaacttcatttttactgtcatttttcctgttgtatacaaaatgaactaatcttgtaattattttcaaatatagaagtatatacattagatggatttccaagattttgtaagaaaatcttaaatcagtgttttgagttatttaatttttaaattaatctacaaattatgcacaacaaactagagactcagttaggattagaaagcttaaagtatgtttgagtgtaggaaataagcttctcagagttatacttgattctgtctgtagataagagacagtctacagtaataactaacccagggaatttactgtaatttgagaggtaacatctctatttttttctttttaaatacagaaagtaatagtcaccagcaagccacgatttcaggaaaactgactaaaaaaaaaagtcaaaatagaaaatatcagaaaaatgaaagatttttgtgtgccctctccatatcctcattgtttttgttgcatttgtccttgactctaaaatcactgaagtattcatgattagtagtttgtaagtaggaagtggtttttctgtatgtaccatatatccagttcatttcagttttcaaactaaaatccatatgtatttgctgagaaagttatttgaaatcttatattctgacaaattctgtacattacatccatttgaagttttgcatcatcttaacacttttgctttgcatttcaattgtacaaagtgtttccaaaaaaatggttatagattcgactgagctattactaacttctccatttgattttttatggatgtgaaaaatgctgctacttgtctatgttattatgtgtaagtatattacaatttaattaagtacaatagtttaaagaacgaagcaatttttttttttttggcttagaacttcttaattgtaggttcctctgaagcgatttcatgtagatatgtgagtgttttaaacaagtctgaaagtgttacatacttttaggttacaggggtgctggggagacagctgaggaaaggaagaatatgtggaagacaccacggagttcaaagttttaccctgagttctatcttccatgtatgttttgcttaaggcatttctcatgtgacattagaaaagctatatccaaaggtaaattttttgtggcaaagatttattttacactttaacttttgggattttatttgtttcagcaaaataaagagcactgaactttaaacttgaattttttctgcacttttttaggtaatgaaaactttttattatcatttaatccacattgctcagtttaaaccaagtgatacatgtgtataaaacataccaaaatcatgaatatgctgctagctgtaccttaaataaactgatcagttttaaaacctttaatagggttttatatagatttaaaaaatagtaaaataatctgctgtatgtttcagtgttcttggtcttaaattattgcaacactttcagatttgttttaagatcatacagtaacatgttatatttatacatactgctagaaaatatacttttagttttaaaatggaatttttataaatgtactttaattttaaaatggtgaacttgttaagtttaagtcaaagtacttaaaaagtatgtatattatccatacaaaaagttatgttttacgcttataataagaaatactggtatctcatatcgagatacaattaattttaaaaaatcatacatcatttaaaaatcttcacacatgaacaggaaagatatcatttctatgctttaaaaaaccctctattgagcattttcaaatattaattttattttgggggaaaatgcccacaacaataattgcaagatctttctcaatagcttcagtttgctgttggatgcctaccttaactattgttttaaaatatagatatatatatatatatttaaaatagttttccaggtattttcttctaccttttttaaaaataaatttccaaaaatgaaaacagagtttatgtatttttgtcaatgaaggtttttattttgtagtttatagaatttgttccttatcagtttgatacttgatcaacattcttagactttttaatctgtatttactttggggggaaaaaagcactcctatatcttaaatgtccttcttttttcttttcccttttagggtatttgttctcttggattgaaatttatgcccacagatttttcttttcatttgaaaatgaatgtgaagatactgtttacagcttttgttaattgcacttttcatcactctgatcaatttcttgtaaagtgctatgggaattatttttcctgtgaatattaatgattttactactgcctccgaagttttaaaaaaggttctgtagacagaaaacagttgttgcaaccaaaaacaaccaaaaaaagaaaaaaagggaaaactggcttacctttctcagatgaattaaatgattttaataacttcccaattaccagggttataacattgctttcttcagttattaatacagtcaaattaattttaacaatataggcacaattcatttacaaattcagtacagtagtccagggctacatgtaagtggtctctttattttattctttacatcagaaaaatcatgaatgtcagttttgccagtattttacaatgaggcttatcgtttaaaattttatagtgtatgacatgtaaataaaccagtatttattgtaggttgtttgattcaggcatttcaaatggatataggttaatggcaatggaatcctatttatttggtagttggttttgtttgtttttgtttatttacttttgctatttgttttgtattgtctaaactttgcttcaactgaagacagtgtaaggagttgaaaatacaatcaacatagcaatggaaagcaatgcaaagagggtaaatcttgttttaatttttttaactttttttttttgtaaataaatagtactgtgatactttaggtgtgacctctattccacatgatagttagaaccagaaaaacacttttgctttctagttatactattggttcattgtaaatgcattaccaaaagacaatatgaaaaagagcaagattaagtttttctaacattgtccacttcaggggcaagcatgcttggtatagagctctagcttgtgtataccttaaactgtaacttgcaggtgtttttcagttgctgcactttttatttaatcttgctcagtcccagtaactatctcaaaggtaattgctggaatatgcattttgaaatacggtttaaaaaaaatctgtgtattgtttcatctaaaaagaaaagcactattggaaacactaaaaacgtgttaaactttgtagttattttgcattcctgtactttacaaactgtcatcacagcaaaaagtttaaaattaggtaatgaaatatttttgtaaataaataccgttaagctggtattttaaaaaatgtattataaattaattaatgtttctggaaaatgttcatatatatgtatatgaatgtctctttatgctgaagggctctgattgggcaaaataaaatactctaatctctcctgaaactaaacaa

SEQ ID NO: 188531 - DNA, 791 bp, Homo sapiens
  Payload ID: 17092
  Gene Symbol: STXBP5
  Gene Name: syntaxin binding protein 5 (tomosyn)
  ENST ID: ENST00000392291
  CDS Start-End: 1-791
attgaattatatggctctaatgatccttatcggagagaaccccgatctcctcgtaaatctcgacagccttcaggaggtgtgctgattgtgacttcttgcatgtgcggcctttctagcttatattctgaatctatgaaaaaactacgttcttcttttttaaccggtctgtgtgatattagtgaagggactgttgttccagaggatcgctgcaaatctccaacctctgcaaagatgtcaaggaagttaagcttacctactgacctaaagcctgatttagatgtaaaggataactcctttagccgatcacggagttcaagtgtaacaagcattgacaaagaatcccgagaagcgatctccgctcttcatttctgtgaaacgtttactcgaaagacggactcgtccccttccccttgtctatgggttggaacaacgctaggaacagtgcttgtcattgcactgaaccttcccccagggggagagcaaagacttcttcagccagtaattgtgtctccaagtggtactatattgaggttaaaaggtgcaatcttgagaatggcatttctggataccacaggctgcttaataccacctgcgtatgaaccctggagagagcacaatgttcctgaagaaaaagacgaaaaggagaaattgaaaaaacggcggcctgtctcagtatccccctcctcttctcaggaaattagtgaaaaccagtatgcagtgatatgttctgaaaagcaagcaaaagtaatctcactgccaacccagaactgtgcttataagcaaaatattac

SEQ ID NO: 188532 - DNA, 2160 bp, Homo sapiens
  Payload ID: 17092
  Gene Symbol: STXBP5
  Gene Name: syntaxin binding protein 5 (tomosyn)
  ENST ID: ENST00000546097
  CDS Start-End: 109-1035
actcctccgtttccgcggtcgaagctgccttcggccccgggtggtctcccccgcccggggaccccctgtgcctcccctcccgggctgcgggggagcccctccgagaccatgaggaaattcaacatcaggaaggtgctggacggcctgaccgccggctcgtcctcggcgtcgcagcagcaacagcagcagcatccgcctgggaaccgggagccggagatccaggaaacgctccagtccgagcactttcagctctgcaagactgttcgccatggatttccctatcaaccctcagccctggcctttgatcctgtacagaagatcctggcagtgggaactcagactggtgctttaaggctctttggtcgtccaggagtagaatgttattgccagcatgacagtggagctgcagtaatccagctccagttcctgattaatgagggagcgcttgtgagtgccttggctgatgacaccttacacttatggaatttacgtcagaagaggcctgccatactacattcgcttaaattttgcagagaaagggttacattttgccatctgcctttccagagtaagtggctctatgtgggcactgaacgaggtaatatacatattgtcaatgtggagtccttcacactctcaggctacgtcattatgtggaataaagccattgaactgtcatctaaatctcacccaggacctgtggtccatataagtgataatccaatggacgagggaaagcttttgattggctttgaatctggaacagtagttttatgggacctcaaatcaaagaaagccgactacagatacacatatgatgaggctatccactctgttgcttggcatcatgaaggaaaacaatttatttgcagtcattcagatggcaccttgactatatggaatgtaaggtcccctgctaaaccagtacagacaatcactccacatggaaaacagttaaaggatgggaagaagccagaaccatgcaaacctatcctcaaggtggaattcaaaacgactagatctggggtttgttgagatccaacagatatattccaacaatagctatattccaacaatagattaaatgaactctaagaggtgtatcatctgtttgactcttgcatccttcattgtgtgacctgtagcatagttatctgacttctttgtggttcattttcctcacttatgacatagatggataaaatgtcagacattagttgtttaattgagatgataatgtatgtaaaacatttcaagcagtttctggtatataataaactctataaatgattgagaagccatttttttaaggaaatcccctgccaccaattgatttttatttgttacatttgtcctatggcaaaggaattaaaataggaaaagcatggtagcaaagaaagaaaaacaggaagaaaatctgaaaaaaaaaatctatgattataatacaaaatgaattggctaaatatttaaattaatagtgactaattaggttctattcttatctagttattttaacaaatattgactggcaacaaaggcagcagttcagggaagattttttcctctgtgcttcacctgttccagtttttactcctaaataatgttaatatttatgagttcaggtttcttcaagatggcagtaatacttttcctttcatagaattagaaatgaaaatttaaaatgttgctcttttgtaggcatttgtaaatacagtcatccactacctaatagcatcatgatcagtggtggactgtatatacaatgacggtcccaataaattataatattgtactttactgtaccttttctatgtttatatacacaaatacttaccattgtgttacagttgcctacaatacttagtacagtaatatgctatataggtttgtaacctaggagtaataggctatacaatatagcctagatatgtagtatatcatcgagatttgtgtaagttacactctatgatgttcatacaatgacaaaattgtccaatgatgcattcctcagaaggtatcctttgttgttaaatgacgtagttatactgttaactggatcagtaagatcaccattttgtaacagtgttctctactttctcaatttcttttgtcacctaagatgggaaattcagtaaattcaacatattcttcttttctctc

SEQ ID NO: 188533 - DNA, 9496 bp, Homo sapiens
  Payload ID: 17093
  Gene Symbol: STXBP5L
  Gene Name: syntaxin binding protein 5-like
  Uniprot ID: Q9Y2K9
  ENST ID: ENST00000273666
  CDS Start-End: 272-3832
gacgtccccgggcaccccgcccccttcacctcccagctttgccggggaagaagcagggcggggcaagctaggggccggcccgggggcggggcctgcctcccacggcgggagggcggagcctgctctggagcctgactgctcggttaggacctcggagagcgccaggcgccgcgaccagagggcccagagaagcggccggagcccgcctacctcggccccctcagcttcccgggctggcaggcggctagaggcgtctgaggaagtgtttaaaatgaagaagtttaatttccgaaaagttttggatggcttaactgcctcctcccctggcagtggtagcagcagtggcagtaacagtggtggtggggctggaagtggttccgtacatccggcggggactgcaggggttctcagagaggaaattcaggaaactttgacttcggagtatttccagatttgcaagacagttcggcatggttttcctcatcagcccacagcattagcctttgatccagttcagaaaatcttggctattgggacgagaacaggtgctatacgaatactcgggagacctggtgttgattgctattgccaacatgaaagtggtgcagctgtcctacagctccaatttttgatcaatgagggtgccttggtcagtgcaagttcagatgatacacttcatttgtggaaccttagacaaaaaaggccagccatactccattctcttaaatttaaccgggaacgaattacttactgtcatctacctttccagagtaaatggctttatgttggaacagaaagaggaaatacacatattgtaaatattgaatctttcattctttctggatatgttatcatgtggaacaaggcaattgaactatccactaagactcatccaggtccagttgtacatttaagcgatagcccaagagatgaaggcaaactgctaataggttatgaaaatggtactgtagtattctgggacttgaaatctaaaagagcagaactgagagtttattatgatgaggctattcattcaattgattggcatcatgagggcaaacagttcatgtgcagccattcagatggtagtttgactttatggaacctgaaaagcccaagtcgccctttccagaccacaattccacatggaaaaagtcaaagagaaggaagaaaatctgaatcttgtaaaccaattcttaaagtagaatacaagacctgcaaaaacagcgaaccattcataatattctctggtgggctgtcctatgacaaagcttgtagaagaccaagtttaaccatcatgcatggaaaagcaattacagtacttgaaatggatcatcctattgttgaatttctaactttatgtgaaacgccctatccaaatgaatttcaagaaccctatgctgtcgtggtacttctggagaaagatctcattgtagttgatctgacacaaagcaattttccaatctttgaaaatccatatcccatggacattcatgaatcaccagttacatgcacagcatactttgcagattgtcctccggatttgattctagtactgtattctataggagtcaagcataaaaaacaaggatacagtaataaggagtggccaatcagtggaggagcttggaaccttggagcacaaacatatccagaaattattattactggtcatgcagatggatcaataaaattttgggatgcttctgcaataactctgcagatgctgtacaagctaaaaacttcaaaagtgtttgaaaaacagaaggtaggagaaggaaaacaaacatgtgaaattgtagaggaagacccatttgccattcagatgatttactggtgtccagagagcagaatattctgtgtatcaggagtctctgcatatgtcataatttataaattcagcagacatgaaattacaacagaaatagtgtcattagaggtacgacttcagtatgatgttgaagatattattacccctgaaccagaaacaagtcctccgtttccagatctctcagcccagcttccttcttcaaggagtctttctgggagcactaacactgttgctagtgaaggagtaacaaaggacagtattccatgcctcaatgtgaagacacggccagtgcgaatgcctccaggatatcaagcagaacttgttattcaattggtgtgggtagatggtgaacctccacaacagattactagtcttgctgtaagctcagcatatggaatagttgcatttgggaactgcaatgggttggctgtggtggattttatacagaagacagtactgttaagcatggggaccattgacctatatagatcaagtgacttataccagcgacaaccacggtctcctcgaaaaaacaaacagttcattgcagacaacttttgcatgcgtggcctgtctaacttttatcctgatttaacgaaacggatccgtacttcctatcagagtttaactgaactgaatgacagtccagttcccctagaacttgagcgctgcaagtctcctacctcagaccatgtaaatggacactgcacaagtccaacttctcagagttgcagttctggaaaacgtctttctagtgccgatgtttcaaaagtaaatcgctggggtcctggaagaccaccatttcgaaaggcccagtcagcagcctgcatggagatttctttaccagttacaacagaagaaaaccgagaaaattcctataatcgttctagaagctctagtatctccagtattgacaaagattctaaagaagcaattacagcactatacttcatggactcctttgcacggaaaaatgactctaccatctctccttgtctgttcgttggaaccagtctgggaatggtgttaatcatctccttaaacctaccattagcagatgaacaaaggtttacagagccagtcatggtattgccaagtggtacattcctctcattgaaaggagctgtgctaacattctcctgtatggaccgaatgggtggattaatgcaaccgccatatgaagtttggagggatccaaacaacatagatgaaaatgaaaaatcttggagaaggaaagtggtaatgaactcatcttctgcatcccaagaaataggagatcatcagtatacaataatctgctcagaaaaacaagccaaagtcttctcactgccttctcagacttgcctttatgttcataacatcacggagacatcttttatactgcaagcaaatgtggtggtcatgtgtagcagtgcctgcttggcatgcttttgtgctaacggacatatcatgataatgagcctacctagtcttcgcccaatgttggatgttaattatttgccactgacagacatgaggatagcacgaacattttgttttaccaatgaaggacaggcattatacctcgtctctcctactgaaattcagcggttaacatacagccaagaaatgtgtgataatctacaggacatgctaggagatttgtttactcccatagagacaccagaagctcaaaacagaggctttctcaagggactgtttggtggaagcggacaaacatttgacagagaagagctctttggggaagcttcggcaggaaaagcatcccgcagccttgcgcaacacattcctggaccaggtagtatagaagggatgaaaggcgctgctggaggggtgatgggagagctgacccgtgcacggattgcacttgatgaaagaggacagaggctaggagagctggaagagaaaactgcaggcatgatgaccagtgcagaagcattttccaaacatgcacatgagttaatgctgaaatacaaggataagaaatggtaccaattctgacttctaaagaagctgtgactgctttgagaaaccatattcagggaaaccaaatttattcccagcatcactactcaactgctagaagccagtttcttctacaaaatgttccatttacagtcaatctgaaattttcataaaagagatgtatcagagacactgtgcaacccaaaggctggagccctggttaaaatcccaaaatacggctgaatttgccttttcccatgtggaatggagctatcatcttggcatgtcattcgataaggatttatatttagtaactacggggagtcctcttgatttgaaaattcctgtacaaacaaaagcattaatgcacttaatgaaaaaaaatctttgcatgataaattaacatcttaaggggaaaagaaaaaaaagcatgttgtgatagaagaaaaaaagattcatggtaaactatttctatcaattgggccacactcaacaatttaaaaaatctgcatttgaagatgtcagtgcatttcaaatatatttgccatacccaactgaaacggaaaacaaaacaaaacaagaacccagagttttctcctcatctgtaactttcattgtactagaaccttattgaattcttatggcaagagtctgattaatgttctctctccatgttttacatcattcacagttgtgtcaaaatcaaatattgccagtatagtaaattattcccaacacaatcagtttcatttctatcaccttcagaatgggttgctgtttttagcacaaaccatgcagggttgggtcacctcaaagcattttcttcagcctggcttgtactctataggggagttggtagtaggtgtggggaatctataggaacaatagagttagctatgagaactgacttcacaaaaagggaaatttcacacaccccaatttcagcttctaaagtgatatattttaaaagcttcatttgtatccttgtctgccagttacacagtatattactgttcaaacccagtagggtctgcaatcgaaaggtgctcttgcagcctgacattcacaaaccaaactggtcattctctttagtgtgattcagtaaaatctcagttaatgttttgggaaagggattctgatttatgacatttctgatttacaagggctttccttagaaaatacctttcggtttgatacttaccactggaaattggttcgatacttaccactggaaatctttataaaatatagtgatctgtttgctatcttggtctcagtcatcattatagacaatagaaatacataaagagtttaatgatacaaaatcaatgcttttgtccctaggtcaaataatataagccactagattatgtcaatagatgccaaacacttgtcccttattaaagactcttttaaagctggaataaagaatatccttaacatgatacaaggtatctataactcaccagaaaagcaccagagtcaaaaccaaatagagacacctactaccatttaacatgattctggaagtcaaaagttataggaatgtatatatacacattccaggacccatcctgtaatatgttgtttcgtcaagaaaagttttaattatggttttggcttattgaatttttgtttatcaaggtctcattggatttacatttgtgtttcttaagacttcacaattttcctggatttcaggttattttattagccaaaaaatcgtatttttatttcctttttagtctaattttttgctagaagttgtactttctagcaaatgtttctagtggtacaatgttctcagtaattttgaggagaacaaagatgagtgaaagagttagataatgtacactaggatagcatttctcagagtccttgaatcctcttgttaagaaagcctctctgaatctcccagactcctgtgaacagccttacggtaacagaatctggcttggaaacacagacattacatgactgtataatttatagaattataaaattatatggtaaaaatattaaagaaacttaagagtaggatctagaaaatactagtggccaaattgcaatgtattctttgtaccatctgtttcaaagacttagttttctgattttcagaacaaatactttatcgtttctgtattttaaaaaaaactaaaagagtaaaatattagtttattttagaaataatgaaattcagtccaaagtagcagtacatttgatgagtatttctgaagccttcaataagatttaacttgttttaacttgatctacatcgagatttctcaaaagcagcactattagctgaaagtctttgttgtggggaactgtcctgtgtattgtaggatgttagcaacatccctggcctctgtctactagatgccagtaagaacctcctagtaatgacaatcaaaatgtctccagtcattgccaaaatttctcccagttcacagccactattctacatcatacaaagaggtagattgtgtgaatatgtaatatatgttgttgtataaaactgtacaataagtatacaatgtcttagcaagataaattattatacccaaaattacatgtgtggttcatatgcaataagatacaattttgaagaaagcttataggaatcagtgaaaaataacaactacagaatattttaaggcacacagagaaaatatcaaaaaggacattatagcatttcactgtagaagtgcttaaaaccttggcctcagtgaatagatcaaaagtttataattagcacaccaattggaagtaaacaggtgcttctcaaatgcttgaaaagaaaaggctctttgaagtagttaaaacgtgtctttcaaaattgcttttataagcccttccttaacgtaagggtaacttcatctcacaaactcctggttagtggaatccaaattaatgaggttttactgtatcaaaattatttttataattcaaagagatgatagcaataagaagaatctaatgtggatgtgatttttctctttgaacaattctgttctgttgcactgaccttagcacgcacgcacacacacacacaccatcgccaccactaccatcatcatcttatcctcatctttggaaaataagtactgttgatccatgtaatcctttgcatagtctcatctttactatctttcttctatttcggaacataagaaaaatactcctaataacttggacaatgatacagaaagtgactctgagccttagttaccatcaaaattacattctatctgctaaagcgacatcagaagataaggcttgcaaaccacagtcccaacaagttgaccttgtctccctatgatttccttggaagataaggcctttttagtgttacagtagaaaatgggccttttcatttattcatctgtgagaagctagaggtatttgtttccctgataataacgtgagcaatagtccctaccttgaaatcatccattagtcttggagtttggagggaggaatgattgattcctcatttgttttaatcacctacaaaagcagtactactgactttgcttcttacacttcactgagccccagactttagggccccaatcattgtcaagatcattgtctaactggaactctgaaaggacagtgacagaactgaatgagatgttttccagtgattcagtcacaaagacaattttctcagatcttttgaaagtgattctcaaataaataaatcaaaatccaactcctttccctcaaagtttctagggatctgaaggaaaaggtttactgttggagtccctttttatgtgacccatgtaccagttttaaaggcatcatctatactttatctacatgaagggatcaccatgactttgagagaaaaaagaatcagattaggcctaacattggttgaagaagattaaaatagattcttatattcaagcagaagggaaaaatgaagccaatctagaaaagtaagctaaaaatcctctccttggcttaggatcattgggtcaaactgggagtatatctgtgtgattacaacctgctgctatgagaaaaaagaattgtaacttgaccatgttggctcacacagggcaatgcaaaagaagtcaaaacattcatatcaggtcttggtatctgtgtcaggagaaacgtggtggctttcacagcttcttcacctctgtcctctgtcatgcaactccatttttggctaggtactatttcacatgcacactgtcctgggtgccagaaatacttgtggtgtacttggtttgagcagtacctctagtatgcaccattccagggaacatggttgtcaacataacaagtttagtgtgtgtatttgcagacaacatagccctgaaagcatgaaatgtagaataggtaaggtctgtcttagaaaaggaggaggaagtaccaatttggtgcaagaagatcgtggtgaggaaggacatgggagccacagtgaagtgaaagaggctttaaggaatcagatgcacagatggatgctttgatttacacatttatctagaggagtgattctcaaccttgactgtacataagaatcacctcaggaaatttttaaattcccaattatattaaaatcatttggagtgggaaccagacaccaatatttgcgaaagcctccaaggcggttctaatgtccagccaaagttgattatcactgctttatggccaactaaggaaaccttgtttgtctgccttggctggtgctccagccccagttctgagtggtcagggaaggcaagatgtaagatatagtaatggtatttattctgtatgtctcacagaacaaaagcatttgagaatttctgaccaggcagtgctccatcaactcttaataatcatctttgtgatattctcctatgtgacttgtccatcaattattccaattcaaaggtctaggttttttttcaattgtcttacacatgtgacatcacaagataccagaagtagcacagtaaattcaagagcatataaagctaagtggaaaactaattcttcatatttagacagtggaaattctcaaaacaatcatttgctaaattaggtccaaatttattattcattcttcttctggaggagacatgggtaccaggtacctgttctgctgtaggtatatttcactggacttggtcttagcaaaaaggaagaacaaatcttcctttttgattgttatctcaatcaaaagctcccagggccacttggatttattttcttagtctttggacatgtgtttaaaggaaaagaatacctgtaacttcctatatgacatccagtgccctgaaagggtgcttacaccttcaaaaaaggagagtccagcctatcaaaggcagtaacacataatgagaagaaactcagagttattgcctttcatactgctttccctctgctgttggcccacccttcttgactgcaaagccagaaaataaactagatggtggttttggacaattgtacacaggaacagaatctctaataacctataatttttagtacttaattatgtgatgttttattctaggaaataagaaacagatgacatcattgatgtatctttctttcatcttcagaatttttgcatcttttcagaaaatgacaaattactatttttctgttgcactcagcaattgtgactatacttaacaaaattcttgtagtctgtagagatatcaataaaattgtatatgtttgtacata

SEQ ID NO: 188534 - DNA, 479 bp, Homo sapiens
  Payload ID: 17093
  Gene Symbol: STXBP5L
  Gene Name: syntaxin binding protein 5-like
  ENST ID: ENST00000495504
  CDS Start-End: 99-479
cccccaacgtcgtttttctgaaaataaaatactctgagccgaacgtttcgaagaaggaaagtccgcccttaagagagagacagagtcttgtgtttaaaatgaagaagtttaatttccgaaaagttttggatggcttaactgcctcctcccctggcagtggtagcagcagtggcagtaacagtggtggtggggctggaagtggttccgtacatccggcggggactgcaggggttctcagagaggaaattcaggaaactttgacttcggagtatttccagatttgcaagacagttcggcatggttttcctcatcagcccacagcattagcctttgatccagttcagaaaatcttggctattgggacgagaacaggtgctatacgaatactcgggagacctggtgttgattgctattgccaacatgaaagtggtgcagctgtcctacagctccaatttttgatcaatgagggtgccttggtc

SEQ ID NO: 188535 - DNA, 3067 bp, Homo sapiens
  Payload ID: 17093
  Gene Symbol: STXBP5L
  Gene Name: syntaxin binding protein 5-like
  ENST ID: ENST00000472879
  CDS Start-End: 55-3063
ccctcagcttcccgggctggcaggcggctagaggcgtctgaggaagtgtttaaaatgaagaagtttaatttccgaaaagttttggatggcttaactgcctcctcccctggcagtggtagcagcagtggcagtaacagtggtggtggggctggaagtggttccgtacatccggcggggactgcaggggttctcagagaggaaattcaggaaactttgacttcggagtatttccagatttgcaagacagttcggcatggttttcctcatcagcccacagcattagcctttgatccagttcagaaaatcttggctattgggacgagaacaggtgctatacgaatactcgggagacctggtgttgattgctattgccaacatgaaagtggtgcagctgtcctacagctccaatttttgatcaatgagggtgccttggtcagtgcaagttcagatgatacacttcatttgtggaaccttagacaaaaaaggccagccatactccattctcttaaatttaaccgggaacgaattacttactgtcatctacctttccagagtaaatggctttatgttggaacagaaagaggaaatacacatattgtaaatattgaatctttcattctttctggatatgttatcatgtggaacaaggcaattgaactatccactaagactcatccaggtccagttgtacatttaagcgatagcccaagagatgaaggcaaactgctaataggttatgaaaatggtactgtagtattctgggacttgaaatctaaaagagcagaactgagagtttattatgatgaggctattcattcaattgattggcatcatgagggcaaacagttcatgtgcagccattcagatggtagtttgactttatggaacctgaaaagcccaagtcgccctttccagaccacaattccacatggaaaaagtcaaagagaaggaagaaaatctgaatcttgtaaaccaattcttaaagtagaatacaagacctgcaaaaacagcgaaccattcataatattctctggtgggctgtcctatgacaaagcttgtagaagaccaagtttaaccatcatgcatggaaaagcaattacagtacttgaaatggatcatcctattgttgaatttctaactttatgtgaaacgccctatccaaatgaatttcaagaaccctatgctgtcgtggtacttctggagaaagatctcattgtagttgatctgacacaaagcaattttccaatctttgaaaatccatatcccatggacattcatgaatcaccagttacatgcacagcatactttgcagattgtcctccggatttgattctagtactgtattctataggagtcaagcataaaaaacaaggatacagtaataaggagtggccaatcagtggaggagcttggaaccttggagcacaaacatatccagaaattattattactggtcatgcagatggatcaataaaattttgggatgcttctgcaataactctgcagatgctgtacaagctaaaaacttcaaaagtgtttgaaaaacagaaggtaggagaaggaaaacaaacatgtgaaattgtagaggaagacccatttgccattcagatgatttactggtgtccagagagcagaatattctgtgtatcaggagtctctgcatatgtcataatttataaattcagcagacatgaaattacaacagaaatagtgtcattagaggtacgacttcagtatgatgttgaagatattattacccctgaaccagaaacaagtcctccgtttccagatctctcagcccagcttccttcttcaaggagtctttctgggagcactaacactgttgctagtgaaggagtaacaaaggacagtattccatgcctcaatgtgaagacacggccagtgcgaatgcctccaggatatcaagcagaacttgttattcaattggtgtgggtagatggtgaacctccacaacagattactagtcttgctgtaagctcagcatatggaatagttgcatttgggaactgcaatgggttggctgtggtggattttatacagaagacagtactgttaagcatggggaccattgacctatatagatcaagtgacttataccagcgacaaccacggtctcctcgaaaaaacaaacagttcattgcaggtttaactgaactgaatgacagtccagttcccctagaacttgagcgctgcaagtctcctacctcagaccatgtaaatggacactgcacaagtccaacttctcagagttgcagttctggaaaacgtctttctagtgccgatgtttcaaaagtaaatcgctggggtcctggaagaccaccatttcgaaaggcccagtcagcagcctgcatggagatttctttaccagttacaacagaagaaaaccgagaaaattcctataatcgttctagaagctctagtatctccagtattgacaaagattctaaagaagcaattacagcactatacttcatggactcctttgcacggaaaaatgactctaccatctctccttgtctgttcgttggaaccagtctgggaatggtgttaatcatctccttaaacctaccattagcagatgaacaaaggtttacagagccagtcatggtattgccaagtggtacattcctctcattgaaaggagctgtgctaacattctcctgtatggaccgaatgggtggattaatgcaaccgccatatgaagtttggagggatccaaacaacatagatgaaaatgaaaaatcttggagaaggaaagtggtaatgaactcatcttctgcatcccaagaaataggagatcatcagtatacaataatctgctcagaaaaacaagccaaagtcttctcactgccttctcagacttgcctttatgttcataacatcacggagacatcttttatactgcaagcaaatgtggtggtcatgtgtagcagtgcctgcttggcatgcttttgtgctaacggacatatcatgataatgaggtacttgccttcttataaattatctggtaatcacaacaataccagcaaggtacaatcctaaaaaa

SEQ ID NO: 188536 - DNA, 3813 bp, Homo sapiens
  Payload ID: 17093
  Gene Symbol: STXBP5L
  Gene Name: syntaxin binding protein 5-like
  ENST ID: ENST00000471454
  CDS Start-End: 139-3627
gactgctcggttaggacctcggagagcgccaggcgccgcgaccagagggcccagagaagcggccggagcccgcctacctcggccccctcagcttcccgggctggcaggcggctagaggcgtctgaggaagtgtttaaaatgaagaagtttaatttccgaaaagttttggatggcttaactgcctcctcccctggcagtggtagcagcagtggcagtaacagtggtggtggggctggaagtggttccgtacatccggcggggactgcaggggttctcagagaggaaattcaggaaactttgacttcggagtatttccagatttgcaagacagttcggcatggttttcctcatcagcccacagcattagcctttgatccagttcagaaaatcttggctattgggacgagaacaggtgctatacgaatactcgggagacctggtgttgattgctattgccaacatgaaagtggtgcagctgtcctacagctccaatttttgatcaatgagggtgccttggtcagtgcaagttcagatgatacacttcatttgtggaaccttagacaaaaaaggccagccatactccattctcttaaatttaaccgggaacgaattacttactgtcatctacctttccagagtaaatggctttatgttggaacagaaagaggaaatacacatattgtaaatattgaatctttcattctttctggatatgttatcatgtggaacaaggcaattgaactatccactaagactcatccaggtccagttgtacatttaagcgatagcccaagagatgaaggcaaactgctaataggttatgaaaatggtactgtagtattctgggacttgaaatctaaaagagcagaactgagagtttattatgatgaggctattcattcaattgattggcatcatgagggcaaacagttcatgtgcagccattcagatggtagtttgactttatggaacctgaaaagcccaagtcgccctttccagaccacaattccacatggaaaaagtcaaagagaaggaagaaaatctgaatcttgtaaaccaattcttaaagtagaatacaagacctgcaaaaacagcgaaccattcataatattctctggtgggctgtcctatgacaaagcttgtagaagaccaagtttaaccatcatgcatggaaaagcaattacagtacttgaaatggatcatcctattgttgaatttctaactttatgtgaaacgccctatccaaatgaatttcaagaaccctatgctgtcgtggtacttctggagaaagatctcattgtagttgatctgacacaaagcaattttccaatctttgaaaatccatatcccatggacattcatgaatcaccagttacatgcacagcatactttgcagattgtcctccggatttgattctagtactgtattctataggagtcaagcataaaaaacaaggatacagtaataaggagtggccaatcagtggaggagcttggaaccttggagcacaaacatatccagaaattattattactggtcatgcagatggatcaataaaattttgggatgcttctgcaataactctgcagatgctgtacaagctaaaaacttcaaaagtgtttgaaaaacagaaggtaggagaaggaaaacaaacatgtgaaattgtagaggaagacccatttgccattcagatgatttactggtgtccagagagcagaatattctgtgtatcaggagtctctgcatatgtcataatttataaattcagcagacatgaaattacaacagaaatagtgtcattagaggtacgacttcagtatgatgttgaagatattattacccctgaaccagaaacaagtcctccgtttccagatctctcagcccagcttccttcttcaaggagtctttctgggagcactaacactgttgctagtgaaggagtaacaaaggacagtattccatgcctcaatgtgaagacacggccagtgcgaatgcctccaggatatcaagcagaacttgttattcaattggtgtgggtagatggtgaacctccacaacagattactagtcttgctgtaagctcagcatatggaatagttgcatttgggaactgcaatgggttggctgtggtggattttatacagaagacagtactgttaagcatggggaccattgacctatatagatcaagtgacttataccagcgacaaccacggtctcctcgaaaaaacaaacagttcattgcaggtttaactgaactgaatgacagtccagttcccctagaacttgagcgctgcaagtctcctacctcagaccatgtaaatggacactgcacaagtccaacttctcagagttgcagttctggaaaacgtctttctagtgccgatgtttcaaaagtaaatcgctggggtcctggaagaccaccatttcgaaaggcccagtcagcagcctgcatggagatttctttaccagttacaacagaagaaaaccgagaaaattcctataatcgttctagaagctctagtatctccagtattgacaaagattctaaagaagcaattacagcactatacttcatggactcctttgcacggaaaaatgactctaccatctctccttgtctgttcgttggaaccagtctgggaatggtgttaatcatctccttaaacctaccattagcagatgaacaaaggtttacagagccagtcatggtattgccaagtggtacattcctctcattgaaaggagctgtgctaacattctcctgtatggaccgaatgggtggattaatgcaaccgccatatgaagtttggagggatccaaacaacatagatgaaaatgaaaaatcttggagaaggaaagtggtaatgaactcatcttctgcatcccaagaaataggagatcatcagtatacaataatctgctcagaaaaacaagccaaagtcttctcactgccttctcagacttgcctttatgttcataacatcacggagacatcttttatactgcaagcaaatgtggtggtcatgtgtagcagtgcctgcttggcatgcttttgtgctaacggacatatcatgataatgagcctacctagtcttcgcccaatgttggatgttaattatttgccactgacagacatgaggatagcacgaacattttgttttaccaatgaaggacaggcattatacctcgtctctcctactgaaattcagcggttaacatacagccaagaaatgtgtgataatctacaggacatgctaggagatttgtttactcccatagagacaccagaagctcaaaacagaggctttctcaagggactgtttggtggaagcggacaaacatttgacagagaagagctctttggggaagcttcggcaggaaaagcatcccgcagccttgcgcaacacattcctggaccaggtagtatagaagggatgaaaggcgctgctggaggggtgatgggagagctgacccgtgcacggattgcacttgatgaaagaggacagaggctaggagagctggaagagaaaactgcaggcatgatgaccagtgcagaagcattttccaaacatgcacatgagttaatgctgaaatacaaggataagaaatggtaccaattctgacttctaaagaagctgtgactgctttgagaaaccatattcagggaaaccaaatttattcccagcatcactactcaactgctagaagccagtttcttctacaaaatgttccatttacagtcaatctgaaattttcataaaagagatgtatcagagacactgtgcaacccaaaggctggagccctggtt

SEQ ID NO: 188537 - DNA, 3396 bp, Homo sapiens
  Payload ID: 17093
  Gene Symbol: STXBP5L
  Gene Name: syntaxin binding protein 5-like
  ENST ID: ENST00000471262
  CDS Start-End: 9-3396
tgtttaaaatgaagaagtttaatttccgaaaagttttggatggcttaactgcctcctcccctggcagtggtagcagcagtggcagtaacagtggtggtggggctggaagtggttccgtacatccggcggggactgcaggggttctcagagaggaaattcaggaaactttgacttcggagtatttccagatttgcaagacagttcggcatggttttcctcatcagcccacagcattagcctttgatccagttcagaaaatcttggctattgggacgagaacaggtgctatacgaatactcgggagacctggtgttgattgctattgccaacatgaaagtggtgcagctgtcctacagctccaatttttgatcaatgagggtgccttggtcagtgcaagttcagatgatacacttcatttgtggaaccttagacaaaaaaggccagccatactccattctcttaaatttaaccgggaacgaattacttactgtcatctacctttccagagtaaatggctttatgttggaacagaaagaggaaatacacatattgtaaatattgaatctttcattctttctggatatgttatcatgtggaacaaggcaattgaactatccactaagactcatccaggtccagttgtacatttaagcgatagcccaagagatgaaggcaaactgctaataggttatgaaaatggtactgtagtattctgggacttgaaatctaaaagagcagaactgagagtttattatgatgaggctattcattcaattgattggcatcatgagggcaaacagttcatgtgcagccattcagatggtagtttgactttatggaacctgaaaagcccaagtcgccctttccagaccacaattccacatggaaaaagtcaaagagaaggaagaaaatctgaatcttgtaaaccaattcttaaagtagaatacaagacctgcaaaaacagcgaaccattcataatattctctggtgggctgtcctatgacaaagcttgtagaagaccaagtttaaccatcatgcatggaaaagcaattacagtacttgaaatggatcatcctattgttgaatttctaactttatgtgaaacgccctatccaaatgaatttcaagaaccctatgctgtcgtggtacttctggagaaagatctcattgtagttgatctgacacaaagcaattttccaatctttgaaaatccatatcccatggacattcatgaatcaccagttacatgcacagcatactttgcagattgtcctccggatttgattctagtactgtattctataggagtcaagcataaaaaacaaggatacagtaataaggagtggccaatcagtggaggagcttggaaccttggagcacaaacatatccagaaattattattactggtcatgcagatggatcaataaaattttgggatgcttctgcaataactctgcagatgctgtacaagctaaaaacttcaaaagtgtttgaaaaacagaaggtaggagaaggaaaacaaacatgtgaaattgtagaggaagacccatttgccattcagatgatttactggtgtccagagagcagaatattctgtgtatcaggagtctctgcatatgtcataatttataaattcagcagacatgaaattacaacagaaatagtgtcattagaggtacgacttcagtatgatgttgaagatattattacccctgaaccagaaacaagtcctccgtttccagatctctcagcccagcttccttcttcaaggagtctttctgggagcactaacactgttgctagtgaaggagtaacaaaggacagtattccatgcctcaatgtgaagacacggccagtgcgaatgcctccaggatatcaagcagaacttgttattcaattggtgtgggtagatggtgaacctccacaacagattactagtcttgctgtaagctcagcatatggaatagttgcatttgggaactgcaatgggttggctgtggtggattttatacagaagacagtactgttaagcatggggaccattgacctatatagatcaagtgacttataccagcgacaaccacggtctcctcgaaaaaacaaacagttcattgcagacaacttttgcatgcgtggcctgtctaacttttatcctgatttaacgaaacggatccgtacttcctatcagagtttaactgaactgaatgacagtccagttcccctagaacttgagcgctgcaagtctcctacctcagaaaaccgagaaaattcctataatcgttctagaagctctagtatctccagtattgacaaagattctaaagaagcaattacagcactatacttcatggactcctttgcacggaaaaatgactctaccatctctccttgtctgttcgttggaaccagtctgggaatggtgttaatcatctccttaaacctaccattagcagatgaacaaaggtttacagagccagtcatggtattgccaagtggtacattcctctcattgaaaggagctgtgctaacattctcctgtatggaccgaatgggtggattaatgcaaccgccatatgaagtttggagggatccaaacaacatagatgaaaatgaaaaatcttggagaaggaaagtggtaatgaactcatcttctgcatcccaagaaataggagatcatcagtatacaataatctgctcagaaaaacaagccaaagtcttctcactgccttctcagacttgcctttatgttcataacatcacggagacatcttttatactgcaagcaaatgtggtggtcatgtgtagcagtgcctgcttggcatgcttttgtgctaacggacatatcatgataatgagcctacctagtcttcgcccaatgttggatgttaattatttgccactgacagacatgaggatagcacgaacattttgttttaccaatgaaggacaggcattatacctcgtctctcctactgaaattcagcggttaacatacagccaagaaatgtgtgataatctacaggacatgctaggagatttgtttactcccatagagacaccagaagctcaaaacagaggctttctcaagggactgtttggtggaagcggacaaacatttgacagagaagagctctttggggaagcttcggcaggaaaagcatcccgcagccttgcgcaacacattcctggaccaggtagtatagaagggatgaaaggcgctgctggaggggtgatgggagagctgacccgtgcacggattgcacttgatgaaagaggacagaggctaggagagctggaagagaaaactgcaggcatgatgaccagtgcagaagcattttccaaacatgcacatgagttaatgctgaaatacaaggataagaaatggtaccaattct

SEQ ID NO: 188538 - DNA, 3036 bp, Homo sapiens
  Payload ID: 17093
  Gene Symbol: STXBP5L
  Gene Name: syntaxin binding protein 5-like
  ENST ID: ENST00000497029
  CDS Start-End: 30-3032
ggctagaggcgtctgaggaagtgtttaaaatgaagaagtttaatttccgaaaagttttggatggcttaactgcctcctcccctggcagtggtagcagcagtggcagtaacagtggtggtggggctggaagtggttccgtacatccggcggggactgcaggggttctcagagaggaaattcaggaaactttgacttcggagtatttccagatttgcaagacagttcggcatggttttcctcatcagcccacagcattagcctttgatccagttcagaaaatcttggctattgggacgagaacaggtgctatacgaatactcgggagacctggtgttgattgctattgccaacatgaaagtggtgcagctgtcctacagctccaatttttgatcaatgagggtgccttggtcagtgcaagttcagatgatacacttcatttgtggaaccttagacaaaaaaggccagccatactccattctcttaaatttaaccgggaacgaattacttactgtcatctacctttccagagtaaatggctttatgttggaacagaaagaggaaatacacatattgtaaatattgaatctttcattctttctggatatgttatcatgtggaacaaggcaattgaactatccactaagactcatccaggtccagttgtacatttaagcgatagcccaagagatgaaggcaaactgctaataggttatgaaaatggtactgtagtattctgggacttgaaatctaaaagagcagaactgagagtttattatgatgaggctattcattcaattgattggcatcatgagggcaaacagttcatgtgcagccattcagatggtagtttgactttatggaacctgaaaagcccaagtcgccctttccagaccacaattccacatggaaaaagtcaaagagaaggaagaaaatctgaatcttgtaaaccaattcttaaagtagaatacaagacctgcaaaaacagcgaaccattcataatattctctggtgggctgtcctatgacaaagcttgtagaagaccaagtttaaccatcatgcatggaaaagcaattacagtacttgaaatggatcatcctattgttgaatttctaactttatgtgaaacgccctatccaaatgaatttcaagaaccctatgctgtcgtggtacttctggagaaagatctcattgtagttgatctgacacaaagcaattttccaatctttgaaaatccatatcccatggacattcatgaatcaccagttacatgcacagcatactttgcagattgtcctccggatttgattctagtactgtattctataggagtcaagcataaaaaacaaggatacagtaataaggagtggccaatcagtggaggagcttggaaccttggagcacaaacatatccagaaattattattactggtcatgcagatggatcaataaaattttgggatgcttctgcaataactctgcagatgctgtacaagctaaaaacttcaaaagtgtttgaaaaacagaaggtaggagaaggaaaacaaacatgtgaaattgtagaggaagacccatttgccattcagatgatttactggtgtccagagagcagaatattctgtgtatcaggagtctctgcatatgtcataatttataaattcagcagacatgaaattacaacagaaatagtgtcattagaggtacgacttcagtatgatgttgaagatattattacccctgaaccagaaacaagtcctccgtttccagatctctcagcccagcttccttcttcaaggagtctttctgggagcactaacactgttgctagtgaaggagtaacaaaggacagtattccatgcctcaatgtgaagacacggccagtgcgaatgcctccaggatatcaagcagaacttgttattcaattggtgtgggtagatggtgaacctccacaacagattactagtcttgctgtaagctcagcatatggaatagttgcatttgggaactgcaatgggttggctgtggtggattttatacagaagacagtactgttaagcatggggaccattgacctatatagatcaagtgacttataccagcgacaaccacggtctcctcgaaaaaacaaacagttcattgcagacaacttttgcatgcgtggcctgtctaacttttatcctgatttaacgaaacggatccgtacttcctatcagagtttaactgaactgaatgacagtccagttcccctagaacttgagcgctgcaagtctcctacctcaggacttgctaccagaacccctgagtcagcactaggcttttataggaatgaaatatcagctatgagacagaggaatcaagtatatcacttgccagaaaaccgagaaaattcctataatcgttctagaagctctagtatctccagtattgacaaagattctaaagaagcaattacagcactatacttcatggactcctttgcacggaaaaatgactctaccatctctccttgtctgttcgttggaaccagtctgggaatggtgttaatcatctccttaaacctaccattagcagatgaacaaaggtttacagagccagtcatggtattgccaagtggtacattcctctcattgaaaggagctgtgctaacattctcctgtatggaccgaatgggtggattaatgcaaccgccatatgaagtttggagggatccaaacaacatagatgaaaatgaaaaatcttggagaaggaaagtggtaatgaactcatcttctgcatcccaagaaataggagatcatcagtatacaataatctgctcagaaaaacaagccaaagtcttctcactgccttctcagacttgcctttatgttcataacatcacggagacatcttttatactgcaagcaaatgtggtggtcatgtgtagcagtgcctgcttggcatgcttttgtgctaacggacatatcatgataatgaggtacttgccttcttataaattatctggtaatcacaacaataccagcaaggtacaatcctaaaaaa

SEQ ID NO: 188539 - DNA, 2321 bp, Homo sapiens
  Payload ID: 17093
  Gene Symbol: STXBP5L
  Gene Name: syntaxin binding protein 5-like
  Uniprot ID: Q9Y2K9
  ENST ID: ENST00000461772
  CDS Start-End: 108-332
ggcgccgcgaccagagggcccagagaagcggccggagcccgcctacctcggccccctcagcttcccgggctggcaggcggctagaggcgtctgaggaagtgtttaaaatgaagaagtttaatttccgaaaagttttggatggcttaactgcctcctcccctggcagtggtagcagcagtggcagtaacagtggtggtggggctggaagtggttccgtacatccggcggggactgcaggggttctcagagaggaaattcaggaaactttgacttcggagtatttccagatttgcaagttcggcatggttttcctcatcagcccacagcattagcctttgatccagttcagaaaatcttggctattgggacgagaacaggtgctatacgaatactcgggagacctggtgttgattgctattgccaacatgaaagtggtgcagctgtcctacagctccaatttttgatcaatgagggtgccttggtcagtgcaagttcagatgatacacttcatttgtggaaccttagacaaaaaaggccagccatactccattctcttaaatttaaccgggaacgaattacttactgtcatctacctttccagagtaaatggctttatgttggaacagaaagaggaaatacacatattgtaaatattgaatctttcattctttctggatatgttatcatgtggaacaaggcaattgaactatccactaagactcatccaggtccagttgtacatttaagcgatagcccaagagatgaaggcaaactgctaataggttatgaaaatggtactgtagtattctgggacttgaaatctaaaagagcagaactgagagtttattatgatgaggctattcattcaattgattggcatcatgagggcaaacagttcatgtgcagccattcagatggtagtttgactttatggaacctgaaaagcccaagtcgccctttccagaccacaattccacatggtaagatgtatgctttcaaaaggaataaacactggcaattcagtgccttgacttgaagtaagagagatggtattaatgcgtttggtagaaaaaagtaataggacatagcttctggttctaaacatcccttttataccacctacagatcccaacattgtaccccaaactttccatacttcccttcttcctaccaacccacatccctgttttgtaagctgtagttatgtactgtcccaaccaaaaattggataatggatggttgatatatctggggcagaggagataatataggaaattttgtcacttttaagggctgaggagccagtgagagaatggcactatttagatgtgactttcagagttaattcctatactactttatagtctgttgttttctagattctcccacttgtttccatttctgccatttgattccagtaagttatgaagactgtggttttaattttaggttttacttttcttattgccttccacattgagaagagcattttaatcctaaatgaggattttaatcttaattgaggatttatattggatctgtatacctaatggggaagaataagcaattcaaatgtataaatatatataattcagatgactaaattatttgataatattggtgatgatctgagttctatgtttacctcatatcattgattatttgtaataatagatatgtcagaaactaacagttgatcaaacatattctatgttacagtttctgagcgttcgttatcatgtcacatttggaaagtagtggtatgttttctgtaatgggtgacccatagatcacaagcattcttagaattatttcatgctgtttgtctgccatttttttgtaccatagttacatgctccatcagtaaatgatcaaattattgcaacattcttccaggatgtaaatgttttagtctttagctggtttacttagagattactttacatttagatgcttacttagagatgctttatttagagattgccattacagaaaccttgggtagatattagctatacataccactcaggattaactatttatttctacgataggggataagttctgtccacacacccccagctaacccccaatactcatgccttttatatgtaaaagtataatatgagctagtcataaattttctacttacttccttatgttcttctcaaatatcagtttctattagttcttttggctagactggacatttgatacttttattttttttaccatatccatatttatttcatcagtttggattgttttctattattctgcttttctgttgaaataaagttctgtttacaggttgttcaaca

SEQ ID NO: 188540 - DNA, 3114 bp, Homo sapiens
  Payload ID: 17093
  Gene Symbol: STXBP5L
  Gene Name: syntaxin binding protein 5-like
  ENST ID: ENST00000492541
  CDS Start-End: 30-3110
ggctagaggcgtctgaggaagtgtttaaaatgaagaagtttaatttccgaaaagttttggatggcttaactgcctcctcccctggcagtggtagcagcagtggcagtaacagtggtggtggggctggaagtggttccgtacatccggcggggactgcaggggttctcagagaggaaattcaggaaactttgacttcggagtatttccagatttgcaagacagttcggcatggttttcctcatcagcccacagcattagcctttgatccagttcagaaaatcttggctattgggacgagaacaggtgctatacgaatactcgggagacctggtgttgattgctattgccaacatgaaagtggtgcagctgtcctacagctccaatttttgatcaatgagggtgccttggtcagtgcaagttcagatgatacacttcatttgtggaaccttagacaaaaaaggccagccatactccattctcttaaatttaaccgggaacgaattacttactgtcatctacctttccagagtaaatggctttatgttggaacagaaagaggaaatacacatattgtaaatattgaatctttcattctttctggatatgttatcatgtggaacaaggcaattgaactatccactaagactcatccaggtccagttgtacatttaagcgatagcccaagagatgaaggcaaactgctaataggttatgaaaatggtactgtagtattctgggacttgaaatctaaaagagcagaactgagagtttattatgatgaggctattcattcaattgattggcatcatgagggcaaacagttcatgtgcagccattcagatggtagtttgactttatggaacctgaaaagcccaagtcgccctttccagaccacaattccacatggaaaaagtcaaagagaaggaagaaaatctgaatcttgtaaaccaattcttaaagtagaatacaagacctgcaaaaacagcgaaccattcataatattctctggtgggctgtcctatgacaaagcttgtagaagaccaagtttaaccatcatgcatggaaaagcaattacagtacttgaaatggatcatcctattgttgaatttctaactttatgtgaaacgccctatccaaatgaatttcaagaaccctatgctgtcgtggtacttctggagaaagatctcattgtagttgatctgacacaaagcaattttccaatctttgaaaatccatatcccatggacattcatgaatcaccagttacatgcacagcatactttgcagattgtcctccggatttgattctagtactgtattctataggagtcaagcataaaaaacaaggatacagtaataaggagtggccaatcagtggaggagcttggaaccttggagcacaaacatatccagaaattattattactggtcatgcagatggatcaataaaattttgggatgcttctgcaataactctgcagatgctgtacaagctaaaaacttcaaaagtgtttgaaaaacagaaggtaggagaaggaaaacaaacatgtgaaattgtagaggaagacccatttgccattcagatgatttactggtgtccagagagcagaatattctgtgtatcaggagtctctgcatatgtcataatttataaattcagcagacatgaaattacaacagaaatagtgtcattagaggtacgacttcagtatgatgttgaagatattattacccctgaaccagaaacaagtcctccgtttccagatctctcagcccagcttccttcttcaaggagtctttctgggagcactaacactgttgctagtgaaggagtaacaaaggacagtattccatgcctcaatgtgaagacacggccagtgcgaatgcctccaggatatcaagcagaacttgttattcaattggtgtgggtagatggtgaacctccacaacagattactagtcttgctgtaagctcagcatatggaatagttgcatttgggaactgcaatgggttggctgtggtggattttatacagaagacagtactgttaagcatggggaccattgacctatatagatcaagtgacttataccagcgacaaccacggtctcctcgaaaaaacaaacagttcattgcagacaacttttgcatgcgtggcctgtctaacttttatcctgatttaacgaaacggatccgtacttcctatcagagtttaactgaactgaatgacagtccagttcccctagaacttgagcgctgcaagtctcctacctcagaccatgtaaatggacactgcacaagtccaacttctcagagttgcagttctggaaaacgtctttctagtgccgatgtttcaaaagtaaatcgctggggtcctggaagaccaccatttcgaaaggcccagtcagcagcctgcatggagatttctttaccagttacaacagaagaaaaccgagaaaattcctataatcgttctagaagctctagtatctccagtattgacaaagattctaaagaagcaattacagcactatacttcatggactcctttgcacggaaaaatgactctaccatctctccttgtctgttcgttggaaccagtctgggaatggtgttaatcatctccttaaacctaccattagcagatgaacaaaggtttacagagccagtcatggtattgccaagtggtacattcctctcattgaaaggagctgtgctaacattctcctgtatggaccgaatgggtggattaatgcaaccgccatatgaagtttggagggatccaaacaacatagatgaaaatgaaaaatcttggagaaggaaagtggtaatgaactcatcttctgcatcccaagaaataggagatcatcagtatacaataatctgctcagaaaaacaagccaaagtcttctcactgccttctcagacttgcctttatgttcataacatcacggagacatcttttatactgcaagcaaatgtggtggtcatgtgtagcagtgcctgcttggcatgcttttgtgctaacggacatatcatgataatgaggtacttgccttcttataaattatctggtaatcacaacaataccagcaaggtacaatcctaaaaaa

SEQ ID NO: 188541 - DNA, 4132 bp, Homo sapiens
  Payload ID: 17094
  Gene Symbol: STXBP6
  Gene Name: syntaxin binding protein 6 (amisyn)
  Uniprot ID: Q8NFX7
  ENST ID: ENST00000323944
  CDS Start-End: 453-1085
gaggcctggggcgggtcgcgggtcccggcccccagcccccagcccctagccgctgctctttgccccgggccagggcgctcgggctcgcccacggcggcactgagcatgctcagaggcggccgcgcgggcaggtttgcttcgcaggcgctcgcactcggcggcgggcgggcgcgcggctgcagctggagctccagcgcccggagttggagttgccgggagtttccccccaacccctcccttttcgcgcgcggcagcaggagccggcgcgggagccgcgagcggcggcgagccagcacccgggccggctaagccttgtccggagcccggagccccgcgcggggcagccccccggggaggagcctcgtgctctgggacgcgtgccgcgcactggcacggcaggggcgcgagccaggctgcacgattcactgcgtgctgtcctcacttgttctacaatgagtgccaaatctgctatcagcaaggaaatttttgcacctcttgatgaaaggatgctgggagctgtccaagtcaagaggaggacaaagaaaaagattcctttcttggcaactggaggtcaaggcgaatatttaacttatatctgcctgtcagtgacaaacaagaaacccacacaggcgtccatcacaaaggtcaaacagtttgaaggctccacatcatttgttcggagatcacagtggatgctcgagcagcttcgccaggttaatggtatcgatcctaatggggattcggcagagtttgatttgttgtttgaaaatgcttttgaccagtgggtagccagcacagcgtcagaaaaatgcaccttcttccagatcctccaccatacctgccagaggtacctcacggacaggaagccagagtttattaactgccaatccaaaattatgggaggaaacagcatcctccattcagctgctgacagcgtgaccagcgcagtgcagaaggcaagccaggccttgaatgagcgtggagagcgattaggccgagcagaggagaagacagaagacctgaagaacagcgcccagcagtttgcagaaactgcgcacaagcttgccatgaagcacaaatgttgagaaactgcctatcctggtgactcttcttaagagaaactgaagagtttgttcagcagtttttacaagaattcgggacctccgcttgcttctttttttccaatatttggacacttagagtggtttttgttttttcttttcagatgttaatgtgaaagaaagggtgttgcatttttacatttccctaatgatcttgctaataaatgctacaatagcatcagcttcattttgggtttttgcctcctcccactgtgtgtatgtgtgtatatgtatgttttgaatatgttttctttattaaaaaatattttttgtagtttgaatatgaaatttggaccaaatgataaactgcgctgagtctaaactggcaacatgtatttttttctctgatattaagcaggaaggcattttaatgtggtgacatcagatgttatttttcctagatgaaaataaaagtcaagcagtgattagtttcactcactgtcctagctacacttaatttgaagattaaaattctacattgtggaaaacaattgaatttattgggaaaaacagcagtcttagattttgctccttgcatagtaatcttttgcatgaaccatcaccagcgttcaaaaaaaaaaaaaaatcagaatcgcagatagaaatctctttcctgagttacagtttaaatactcttgctacttgtatccagggtgtttacttggaattatcatatgaagggtaaaaatttgagagtaaagccctaaagaaaagcctacctaaaaccctctgtgtactcacagatgtttctcttgtcactgtcatagtgatggtcgctggtatggaaaagtgcttatatttttatcaaaaaattgatttgtccaggtaaaggtctgtgtcaatgataatgtgaacaagtagtacatttaaaatgtttgtcttgtctttttacagtcatgcctattttagagacaccttcataatgtccttgggagagggcctttagtttcttggtatctggattttggaggttttgatgttgtttttgctatctatttatttaatgtaatttaatatgtgagtttcttgacaaattgcatttcatggcaattgcaccttgcctggtctgatataaaacaccacaatcacaaacctttacattgcagtcagtttcaatacagttggtcacacacctcgtgattttctattactcaagataataaggggcttagggtctagaagttctgtttcctagagggttaaaatgctaaacataaaaaaagctgtgctttttttgtgaaactaggagacaagctgcacatctcagacacattgtaagcctaccactgcagcgcattgatttttaagctgcctgaatcttcaggacccctatctattccatcctatccattttgctgattgagtcgatatgtattgcagcctcttacataggagcataagatgacttttggattgttaatactgatttaaatagctgaagttctcctaataaagcattcccaaggagagagaaagtttgtctactgggggtaaaaatatcagatggtgcacattaaaagggagatgagatttgtcggagacagatttcagaatccttttagatgatccaattcaagaaaaccctctataaaatttaataaactgtataagttaactataatattttatactttctttttggtgtcttaaaaatttaaagaagcgaggaacatgccatttggtgagtaccgttggaagctattttaatttctaggaaaagccccaaatatcactccaaatagattttgtttgcagatctcagttcagaatgcacacacacacacacacacacacacacacacacacagagatgtatttatctttccaaattggattctggtttcagagatagagagttggtataaataattgaaaggataaatctaaaaccccctgacagtccgccaaattcaagaacagaagtggttgccaactctctaacaacaatgtttgggaagctgattccaaagtagctgaggatgaggtcataagcatactgtgaaacccaagattcttcttccctggtagaattacaatagttactcttgataaatataagtattccatgtcttgccctctttcctcactctctgcttatccttttagacctaagtttcattggaaatagcctgaattagaagaaagcccatccgaatctttattagccccctctaatgattagtttccaggctgcgttcatacctttgacctctcagtgtcaaagtcctacctaggcctccccacaacagagagggccgtaacagcaatccctgcccctcctttacctcccagcctcttgcagaggagcccagtgataacacatgtgaagttctttgctgtcctcttgtagaaggtgctgcagtgcaaagtattaatacggtcttagacaaaataactgtcatgatttgggaccagtttggttgagcttgtcagaagacatttcatttgtttcatttctgcacttctctatgaattttgggatactatatttctgtgaaggacttattgtatagacaactcaaaaaggaaagaaactttccagtattaccacttcttcctggaatatagctgtagtatttctcactagtattattagatacctgtgtacagaaagtatgcagttattcaggttaatgtttcatattaaagaatgtatttgtaaaatgtaacatgatcagtagttaccttttttcaagctctgaagaagttcagattacgtgttagacttaagttacagtgaaaactgttttaatactacttttgtggctagcaaaggttgtgcatctatttaaaattatttacaggatgctctaaataaggggcattaaagataggtttagctcttaattttagaaattgtgacactactgatgtctgtcatacagttattcttcagaagttctctgagatgtcaaatataatttttgtttaattcagagataagtaacacctgctctattgattcactattacaacaaaccctaattttgtcattaaatattttaactctg

SEQ ID NO: 188542 - DNA, 4021 bp, Homo sapiens
  Payload ID: 17094
  Gene Symbol: STXBP6
  Gene Name: syntaxin binding protein 6 (amisyn)
  Uniprot ID: Q8NFX7
  ENST ID: ENST00000396700
  CDS Start-End: 336-968
ctcccttttcgcgcgcggcagcaggagccggcgcgggagccgcgagcggcggcgagccagcacccgggccggctaagccttgtccggagcccggagccccgcgcggggcagccccccggggaggagcctcgtgctctgggacgcgtgccgcgcactggcacggcaggggcgcgagccaggctgcacgtttcctgtttagaaagttctgctccttcataaggaccttgaagtactaggaggaaaggtgctttgtgtgtggagttttccatgaagtgcagtcccaactaaaaggctgcgttaaagattcactgcgtgctgtcctcacttgttctacaatgagtgccaaatctgctatcagcaaggaaatttttgcacctcttgatgaaaggatgctgggagctgtccaagtcaagaggaggacaaagaaaaagattcctttcttggcaactggaggtcaaggcgaatatttaacttatatctgcctgtcagtgacaaacaagaaacccacacaggcgtccatcacaaaggtcaaacagtttgaaggctccacatcatttgttcggagatcacagtggatgctcgagcagcttcgccaggttaatggtatcgatcctaatggggattcggcagagtttgatttgttgtttgaaaatgcttttgaccagtgggtagccagcacagcgtcagaaaaatgcaccttcttccagatcctccaccatacctgccagaggtacctcacggacaggaagccagagtttattaactgccaatccaaaattatgggaggaaacagcatcctccattcagctgctgacagcgtgaccagcgcagtgcagaaggcaagccaggccttgaatgagcgtggagagcgattaggccgagcagaggagaagacagaagacctgaagaacagcgcccagcagtttgcagaaactgcgcacaagcttgccatgaagcacaaatgttgagaaactgcctatcctggtgactcttcttaagagaaactgaagagtttgttcagcagtttttacaagaattcgggacctccgcttgcttctttttttccaatatttggacacttagagtggtttttgttttttcttttcagatgttaatgtgaaagaaagggtgttgcatttttacatttccctaatgatcttgctaataaatgctacaatagcatcagcttcattttgggtttttgcctcctcccactgtgtgtatgtgtgtatatgtatgttttgaatatgttttctttattaaaaaatattttttgtagtttgaatatgaaatttggaccaaatgataaactgcgctgagtctaaactggcaacatgtatttttttctctgatattaagcaggaaggcattttaatgtggtgacatcagatgttatttttcctagatgaaaataaaagtcaagcagtgattagtttcactcactgtcctagctacacttaatttgaagattaaaattctacattgtggaaaacaattgaatttattgggaaaaacagcagtcttagattttgctccttgcatagtaatcttttgcatgaaccatcaccagcgttcaaaaaaaaaaaaaaatcagaatcgcagatagaaatctctttcctgagttacagtttaaatactcttgctacttgtatccagggtgtttacttggaattatcatatgaagggtaaaaatttgagagtaaagccctaaagaaaagcctacctaaaaccctctgtgtactcacagatgtttctcttgtcactgtcatagtgatggtcgctggtatggaaaagtgcttatatttttatcaaaaaattgatttgtccaggtaaaggtctgtgtcaatgataatgtgaacaagtagtacatttaaaatgtttgtcttgtctttttacagtcatgcctattttagagacaccttcataatgtccttgggagagggcctttagtttcttggtatctggattttggaggttttgatgttgtttttgctatctatttatttaatgtaatttaatatgtgagtttcttgacaaattgcatttcatggcaattgcaccttgcctggtctgatataaaacaccacaatcacaaacctttacattgcagtcagtttcaatacagttggtcacacacctcgtgattttctattactcaagataataaggggcttagggtctagaagttctgtttcctagagggttaaaatgctaaacataaaaaaagctgtgctttttttgtgaaactaggagacaagctgcacatctcagacacattgtaagcctaccactgcagcgcattgatttttaagctgcctgaatcttcaggacccctatctattccatcctatccattttgctgattgagtcgatatgtattgcagcctcttacataggagcataagatgacttttggattgttaatactgatttaaatagctgaagttctcctaataaagcattcccaaggagagagaaagtttgtctactgggggtaaaaatatcagatggtgcacattaaaagggagatgagatttgtcggagacagatttcagaatccttttagatgatccaattcaagaaaaccctctataaaatttaataaactgtataagttaactataatattttatactttctttttggtgtcttaaaaatttaaagaagcgaggaacatgccatttggtgagtaccgttggaagctattttaatttctaggaaaagccccaaatatcactccaaatagattttgtttgcagatctcagttcagaatgcacacacacacacacacacacacacacacacacacagagatgtatttatctttccaaattggattctggtttcagagatagagagttggtataaataattgaaaggataaatctaaaaccccctgacagtccgccaaattcaagaacagaagtggttgccaactctctaacaacaatgtttgggaagctgattccaaagtagctgaggatgaggtcataagcatactgtgaaacccaagattcttcttccctggtagaattacaatagttactcttgataaatataagtattccatgtcttgccctctttcctcactctctgcttatccttttagacctaagtttcattggaaatagcctgaattagaagaaagcccatccgaatctttattagccccctctaatgattagtttccaggctgcgttcatacctttgacctctcagtgtcaaagtcctacctaggcctccccacaacagagagggccgtaacagcaatccctgcccctcctttacctcccagcctcttgcagaggagcccagtgataacacatgtgaagttctttgctgtcctcttgtagaaggtgctgcagtgcaaagtattaatacggtcttagacaaaataactgtcatgatttgggaccagtttggttgagcttgtcagaagacatttcatttgtttcatttctgcacttctctatgaattttgggatactatatttctgtgaaggacttattgtatagacaactcaaaaaggaaagaaactttccagtattaccacttcttcctggaatatagctgtagtatttctcactagtattattagatacctgtgtacagaaagtatgcagttattcaggttaatgtttcatattaaagaatgtatttgtaaaatgtaacatgatcagtagttaccttttttcaagctctgaagaagttcagattacgtgttagacttaagttacagtgaaaactgttttaatactacttttgtggctagcaaaggttgtgcatctatttaaaattatttacaggatgctctaaataaggggcattaaagataggtttagctcttaattttagaaattgtgacactactgatgtctgtcatacagttattcttcagaagttctctgagatgtcaaatataatttttgtttaattcagagataagtaacacctgctctattgattcactattacaacaaaccctaattttgtcattaaatattttaactctgtgatga

SEQ ID NO: 188543 - DNA, 1970 bp, Homo sapiens
  Payload ID: 17094
  Gene Symbol: STXBP6
  Gene Name: syntaxin binding protein 6 (amisyn)
  Uniprot ID: Q8NFX7
  ENST ID: ENST00000419632
  CDS Start-End: 716-1348
ccaggctgcacggtaggaccggggcgaggggagccaggcggtcagggcggaggccaagcccgggagatgcggttgcagccgccacggctgttggggcgcctggcgctccgtccgaggcgggtggctgtgaggccaggggagtaggcaggctcccagagagattcttccaagttggcgggtggcgggagagggggccgcgcgccccggcgcagctgctttgtgcgcgcagagagggactcgtgtccctggttctctccaaccctgggacccgttgtgcgggcagtattgggcaagccgcagaacggagcgatttcctccgagaaagttgaggatggagcctttttttccgcaccgtccccgcgatggcatgggccccgagaatgctgccccgaggctcccagtgtgggggagctcggggtcgctgcgcctctagcttgagcgcagaaatccgcgaatcactccgatcttcgcgaactctggcatcttctaggaaaatcattactgccaaaactgaggcgagcttttctggcgggcacggcaccctgcccccagggcgctggccctgggcgatgccccctttccgatctcaggcttggtcaagggcgccaggttccgaattcgcgcttgccgtgcacgccggcatcgagcctcaccaacaccgccgggcaacgtggctggagtagattcactgcgtgctgtcctcacttgttctacaatgagtgccaaatctgctatcagcaaggaaatttttgcacctcttgatgaaaggatgctgggagctgtccaagtcaagaggaggacaaagaaaaagattcctttcttggcaactggaggtcaaggcgaatatttaacttatatctgcctgtcagtgacaaacaagaaacccacacaggcgtccatcacaaaggtcaaacagtttgaaggctccacatcatttgttcggagatcacagtggatgctcgagcagcttcgccaggttaatggtatcgatcctaatggggattcggcagagtttgatttgttgtttgaaaatgcttttgaccagtgggtagccagcacagcgtcagaaaaatgcaccttcttccagatcctccaccatacctgccagaggtacctcacggacaggaagccagagtttattaactgccaatccaaaattatgggaggaaacagcatcctccattcagctgctgacagcgtgaccagcgcagtgcagaaggcaagccaggccttgaatgagcgtggagagcgattaggccgagcagaggagaagacagaagacctgaagaacagcgcccagcagtttgcagaaactgcgcacaagcttgccatgaagcacaaatgttgagaaactgcctatcctggtgactcttcttaagagaaactgaagagtttgttcagcagtttttacaagaattcgggacctccgcttgcttctttttttccaatatttggacacttagagtggtttttgttttttcttttcagatgttaatgtgaaagaaagggtgttgcatttttacatttccctaatgatcttgctaataaatgctacaatagcatcagcttcattttgggtttttgcctcctcccactgtgtgtatgtgtgtatatgtatgttttgaatatgttttctttattaaaaaatattttttgtagtttgaatatgaaatttggaccaaatgataaactgcgctgagtctaaactggcaacatgtatttttttctctgatattaagcaggaaggcattttaatgtggtgacatcagatgttatttttcctagatgaaaataaaagtcaagcagtgattagtttcactcactgtcctagctacacttaatttgaagattaaaattctacattgtggaaaacaattgaatttattgggaaaaacagcagtcttagattttgctccttgcatagtaatcttttgcatgaaccatcaccagcgttcaaaaaaaaaaaaaaa

SEQ ID NO: 188544 - DNA, 3355 bp, Homo sapiens
  Payload ID: 17094
  Gene Symbol: STXBP6
  Gene Name: syntaxin binding protein 6 (amisyn)
  ENST ID: ENST00000548182
  CDS Start-End: 137-334
gcgagccaggctgcacgaatgtaagctccatgagggaaagtactttgttgctcttcttctcctcagtatcctcagcgttaggacaatgcagtgatattgaatgaattcactgcgtgctgtcctcacttgttctacaatgagtgccaaatctgctatcagcaaggaaatttttgcacctcttgatgaaaggatgctgggagctgtccaagtcaagaggaggacaaagaaaaagattcctttcttggcaactggaggtcaaggcgaatatttaacttatatctgcctgtcagatatcaagtcagcttcaaaggagaaaacatttagtgaattttagagagaagaccagctaatgaggatgaaacgtgtgttatggttgaacatcccagcgtgtctgctaagaaattcagtttaagaaaaggccattatcacattgtagtggtggactgaaaaagtgacaaacaagaaacccacacaggcgtccatcacaaaggtcaaacagtttgaaggctccacatcatttgttcggagatcacagtggatgctcgagcagcttcgccaggttaatggtatcgatcctaatggggattcggcagagtttgatttgttgtttgaaaatgcttttgaccagtgggtagccagcacagcgtcagaaaaatgcaccttcttccagatcctccaccatacctgccagaggtacctcacggacaggaagccagagtttattaactgccaatccaaaattatgggaggaaacagcatcctccattcagctgctgacagcgtgaccagcgcagtgcagaaggcaagccaggccttgaatgagcgtggagagcgattaggccgagcagaggagaagacagaagacctgaagaacagcgcccagcagtttgcagaaactgcgcacaaggtgacctttcggggaagaaaataactggctttaacagaaacaccacttctgctgaggaaacaaggatggataacctaaaaagcaatgagaagaatattcccagctgagttgcggtgacctcttctggaggctcacgctcaggtccagctggggatccagctctaagtggatgactcctgccttctcttcctgcatcccctttgcacagcgctgtcttgtcatctcattcattctctgtcgtgacagggtcttactgcactgttgcccgtggggcccatttcgagttccttcaaggagaattggctagatctatctgaaaatgcagacagccctgctggaggccagagcctcagattgctgctgttggtgcagaggcagagagtgaacttggattgaaggtctccctagttccttcctcctttctccagcctctgtgacacagagataatgatgacatggaaatgctggcattacagcctcagcttctttaacaacaacagcagcttccgtgatttcagtgggagacggatagtggaaatctggggaaacatttaagttgttgagttgggtagaggaggctaaagggaataactttataacagtcttcagttctgggaagggtgatggtacaggcatttttctttcatgtcttcccacacagaatagagcaatcaatagtgcactgataaaattctgctaaaacaagagtttaggttaatgattaaaccatgaaccaggttaccaaggaagattgtaaaattgctcttcctaaggtggcatagacaatacctggatgtcgtccacgtaggcgtccctcccagagggggctgtacaaacactggattggataacctaaccagatggcctgaattcttggccctggtagccctgtttccctgatactgtggccaagtttgcgaggcaattgggaaagcaatatggaatagtagttaacatcttgtgtttgaatatagcgctgtcatttaccatcttggtgaccttgggcaaatgcttaatttctctaagcctcagttttctcatcagtagaatagagcactattctttatgagaatagtacctacgtactagagtgttcagagaattgaatgagttcaaagctattagcacagtatgtagcacatataaatctaaattactattatttgtaatcattttcataaattttttttctactgaccctgccctattcagtcacataatgagcactgtagagggattggagaattgatactggtgattgaggatcctcaacacagggacagggaaggaatggaggagaagattttgtgcctcccaaacccaaagggaaaggggtgtgggagggccctcatgctaaatgttgatactatctaaacacagatcagcccttgaaacaggacccatcaggatagaaactaatgcggccaccaaaggcaaaggggtctctggcttgaccagtgggaaaatttatgcctagcagttacctgctttcactcgggaggggtgaggcgtggacagcttgtgtttattttggtttcccctccctcaggtcatctcggggggaagaggaggggttactagtgtctgttaatgtgtatgagagtgagagagtgtcatggccagacttgcagttgtgtgaaactgggatgtgtgcctatgaatcactggcactggcagtattcctaacaagcagattgacctctttagataaggtgtggctattttcccagggaccaggactcttgatttggacctgctagcataggctgaccatgaagctgtcattttactggacaagccacagccaggcctgctggtgaggggagagttcagagatggaacccaagcattctaccccctagacaagcatggctctgttgactcagaaggagtaagctgtgcttacaagtgggggccagaacacatggcagagtcctgagctgaaaatggcaatgccaggtggcagctcctagagctcccagttgaataagggtgccgaaccccagctggagagtttggcacacctttgtagagtccagtagaaaataacttggccttctaacttgttccaggactcctgcagtgacccaggtgcaagagtcaatggatcacttttgcacaaccctgacttcaaaatacgcaggtgcttgttgtctacagtgcagatagaaaatgatccttccgccctgccttcctagactgactcccccacctccactctggtgagcctggtttgaggaaatgtggtcctttcttgagctccgggcttcatgcaaagttaacctcaggaaagtgcaccacaatcgcagaaacagatctgctcactttcccttgccaaaaagcacaatgttgcagcagacgcaatgctttgacggccccgccatagtcagtgagtcagtagacaagagcattacccacactcagacatcctcagatgacatttcttgc

SEQ ID NO: 188545 - DNA, 682 bp, Homo sapiens
  Payload ID: 17094
  Gene Symbol: STXBP6
  Gene Name: syntaxin binding protein 6 (amisyn)
  Uniprot ID: Q8NFX7
  ENST ID: ENST00000548369
  CDS Start-End: 139-465
acagatagaatactggcagaatggaaatgactggcatgtcagtgatgagtttatagagaagcatttaggattttcctaggtcctgcagtcagtgggtgttcttgctgcaagtgcgtcagtcaaacccaatcaaaagaaatgtcggcttgtttcctagacactagacgagcggcctttctgcagtgtgacctgccttcctcttacaggatactcaccctgccggagtctggtcactgtgggtcagctgagccagtttctgatgctcctgctctcctcctttcaggaaacagcatcctccattcagctgctgacagcgtgaccagcgcagtgcagaaggcaagccaggccttgaatgagcgtggagagcgattaggccgagcagaggagaagacagaagacctgaagaacagcgcccagcagtttgcagaaactgcgcacaagcttgccatgaagcacaaatgttgagaaactgcctatcctggtgactcttcttaagagaaactgaagagtttgttcagcagtttttacaagaattcgggacctccgcttgcttctttttttccaatatttggacacttagagtggtttttgttttttcttttcagatgttaatgtgaaagaaagggtgttgcatttttacatttccctaatgatcttgctaataaatgctacaatagcatca

SEQ ID NO: 188546 - DNA, 1311 bp, Homo sapiens
  Payload ID: 17094
  Gene Symbol: STXBP6
  Gene Name: syntaxin binding protein 6 (amisyn)
  Uniprot ID: Q8NFX7
  ENST ID: ENST00000550887
  CDS Start-End: 270-902
tttcctgtttagaaagttctgctccttcataaggaccttgaagtactaggaggaaaggtgctttgtgtgtggagttttccatgaagtgcagtcccaactaaaaggctgcgttaaaggctagagtagtgcagtggcgtgatctcagctcactccagcctctgcctcccgggctcaagtgacccacctgcctcagcctcccaagtagctgggacaacagatgtgagccaccacacccagattcactgcgtgctgtcctcacttgttctacaatgagtgccaaatctgctatcagcaaggaaatttttgcacctcttgatgaaaggatgctgggagctgtccaagtcaagaggaggacaaagaaaaagattcctttcttggcaactggaggtcaaggcgaatatttaacttatatctgcctgtcagtgacaaacaagaaacccacacaggcgtccatcacaaaggtcaaacagtttgaaggctccacatcatttgttcggagatcacagtggatgctcgagcagcttcgccaggttaatggtatcgatcctaatggggattcggcagagtttgatttgttgtttgaaaatgcttttgaccagtgggtagccagcacagcgtcagaaaaatgcaccttcttccagatcctccaccatacctgccagaggtacctcacggacaggaagccagagtttattaactgccaatccaaaattatgggaggaaacagcatcctccattcagctgctgacagcgtgaccagcgcagtgcagaaggcaagccaggccttgaatgagcgtggagagcgattaggccgagcagaggagaagacagaagacctgaagaacagcgcccagcagtttgcagaaactgcgcacaagcttgccatgaagcacaaatgttgagaaactgcctatcctggtgactcttcttaagagaaactgaagagtttgttcagcagtttttacaagaattcgggacctccgcttgcttctttttttccaatatttggacacttagagtggtttttgttttttcttttcagatgttaatgtgaaagaaagggtgttgcatttttacatttccctaatgatcttgctaataaatgctacaatagcatcagcttcattttgggtttttgcctcctcccactgtgtgtatgtgtgtatatgtatgttttgaatatgttttctttattaaaaaatattttttgtagtttgaatatgaaatttggaccaaatgataaactgcgctgagtctaaactggcaacatgtatttttttctctgatattaagcaggaaggcattttaatg

SEQ ID NO: 188547 - DNA, 1223 bp, Homo sapiens
  Payload ID: 17094
  Gene Symbol: STXBP6
  Gene Name: syntaxin binding protein 6 (amisyn)
  Uniprot ID: Q8NFX7
  ENST ID: ENST00000546511
  CDS Start-End: 74-706
attacgcttccctagggactgggtgggagagaataggatcgattcactgcgtgctgtcctcacttgttctacaatgagtgccaaatctgctatcagcaaggaaatttttgcacctcttgatgaaaggatgctgggagctgtccaagtcaagaggaggacaaagaaaaagattcctttcttggcaactggaggtcaaggcgaatatttaacttatatctgcctgtcagtgacaaacaagaaacccacacaggcgtccatcacaaaggtcaaacagtttgaaggctccacatcatttgttcggagatcacagtggatgctcgagcagcttcgccaggttaatggtatcgatcctaatggggattcggcagagtttgatttgttgtttgaaaatgcttttgaccagtgggtagccagcacagcgtcagaaaaatgcaccttcttccagatcctccaccatacctgccagaggtacctcacggacaggaagccagagtttattaactgccaatccaaaattatgggaggaaacagcatcctccattcagctgctgacagcgtgaccagcgcagtgcagaaggcaagccaggccttgaatgagcgtggagagcgattaggccgagcagaggagaagacagaagacctgaagaacagcgcccagcagtttgcagaaactgcgcacaagcttgccatgaagcacaaatgttgagaaactgcctatcctggtgactcttcttaagagaaactgaagagtttgttcagcagtttttacaagaattcgggacctccgcttgcttctttttttccaatatttggacacttagagtggtttttgttttttcttttcagatgttaatgtgaaagaaagggtgttgcatttttacatttccctaatgatcttgctaataaatgctacaatagcatcagcttcattttgggtttttgcctcctcccactgtgtgtatgtgtgtatatgtatgttttgaatatgttttctttattaaaaaatattttttgtagtttgaatatgaaatttggaccaaatgataaactgcgctgagtctaaactggcaacatgtatttttttctctgatattaagcaggaaggcattttaatgtggtgacatcagatgttatttttcctagatgaaaataaaagtcaagcagtgattagtttcactcactgtcctagctacacttaatttgaagattaaaattctacattg

SEQ ID NO: 188548 - DNA, 2342 bp, Homo sapiens
  Payload ID: 17095
  Gene Symbol: SNTA1
  Gene Name: syntrophin, alpha 1
  Uniprot ID: Q13424
  ENST ID: ENST00000217381
  CDS Start-End: 273-1790
cccttctgacccaccccgctaggtagtcccacacggcggccctcggctcccgggccccgccccggcctcctgcatttgcccgaggccccctccccagcactggccacaccccagggtagccccgcccccagagctcctcccccagcggccggggtagggtggcggctggcccagccgggcccccgctgccctctgccctgggcgcttggtcggagcgggctgggcaaagcgggacagggcgagcgcggcggcccgggggctcggaggcgaagatggcgtccggcaggcgcgccccgcgcaccgggctgctggagctgcgcgccggggcgggctcgggggccggcggcgagcgatggcagcgggtgctgctgagtctggcggaggacgtgctgaccgtgagccccgccgacggcgaccctggtcccgagcccggcgctccgcgggagcaggagcccgcgcagctcaacggcgccgcggagccgggcgccgggcccccgcagctgccagaggcgctactgctccagcggcgccgcgtgacggtgcgcaaggccgacgccggtgggctgggcatcagcatcaaaggcggccgggagaacaagatgcctattctcatttccaagatcttcaagggattggcagctgaccagacagaggccctttttgtgggggatgccatcctgtctgtgaatggggaagacttgtcctctgctacccatgatgaggcggtgcaggtcctcaagaagacaggcaaggaggtggtgctggaggtcaagtatatgaaggacgtctcaccgtatttcaagaactctactggtgggacctcggtcggctgggactcacctcctgcctcaccccttcagcggcagccttcctcccctggccccacaccccggaacttcagcgaggccaaacacatgtccttgaagatggcatatgtctcgaagaggtgcacccccaatgacccggagcccaggtatctggagatctgctcggcagatggtcaagacaccctcttcctgagggccaaggatgaggctagtgcgaggtcgtgggcgactgccatccaagcccaggtcaatactctgacgccgcgggtcaaggatgagctgcaggcactgttggcagccaccagcacagctgggagccaggacatcaagcagattggctggctaactgagcagctgcccagtgggggcacagcccccaccctggccctgctaactgaaaaggaactgctcctctacttgtctctccccgagacccgcgaggccctgagccggccagcccgtactgccccactcatcgccaccagactggtgcactcaggcccctccaagggctcagtgccctacgatgcagagctctcttttgccctgcgcacgggcacgcgtcacggtgtggacactcacctgttcagcgtggagtcaccgcaggagctggctgcctggacccgccagcttgtggatggctgtcaccgggccgccgagggtgtgcaggaggtgtctacagcctgcacgtggaatgggcgtccctgcagcctgtctgtgcacatcgacaagggcttcacactgtgggcggctgagccaggtgcagcccgagctgtgctcctgcgacagcccttcgagaagctgcagatgtcttcagatgacggtgccagtctccttttcctggattttggaggtgctgaaggcgagatccagctggacctgcactcgtgtcccaaaaccatagtcttcatcatccactccttcctgtcggccaaagtcacccgcctcgggctgttggcctagaagtcgccggatgcactagccctgaagaggggtgtccatgacatggcctgagctgggcctccaccgactgcctgctcacccctgggctgagggaagggagaggagaggaacaagggcctccgaaaccccaaccctgagggagactggattggtcttggggcccaggacccagacgcaggacagagtggactctgcctgtgatggggtggccttcctgctgcccccctccaccagtgccttttgcagagagatattttgtgtacacagaagccattccgagtctgggacctgcccctgtgcggatcctgaccccagccaacagctgagctgccgggcctcctcgaggcccctaagccacccccagaggtcccatctgaagctggagtaccctggggtcagcagcaagagaaagaagaggagattttctgtttgtttttcccctcagccctgccaccgtggggagtctggtttttctcttcatcctgtctctctcctccttactcttggataaataaacagcctgtgagcacacaggcagcccggcccagtgta

SEQ ID NO: 188549 - DNA, 5164 bp, Homo sapiens
  Payload ID: 17096
  Gene Symbol: SNTB1
  Gene Name: syntrophin, beta 1 (dystrophin-associated protein A1, 59kDa, basic component 1)
  Uniprot ID: Q13884
  ENST ID: ENST00000395601
  CDS Start-End: 416-2032
gtgttgtgtttggagagagggtagacagcagtgggaaggggacgtaactgagaagcatgaaacaccttgagtggaccatgagacctgcttagagttaggggaaagcttgagaggttcaaggatagaagaactcagggtggttcaggtgtgacatgggttatgtgggcatttctggattgctctgggaaggttgctccaccccggtcaggatcaggcgagggggaaccagcctgagtgcagctgccaactcccgccgagtgcgtctgcgaactcccggagcggagtcccgcgtgccgccacctccccgcgggacgcactctcctcgctcccccgggccccgcgtcctccccccggccacccttccccacttttccccccttttccaatcacatggcattttaagaatgccggaaagatggcggtagcggcggcggcggcggcggctgggccggctggcgcgggaggcggccgggcgcagcggagcgggctgctggaagttttggtgcgggatcgctggcacaaagttctggtgaacttgagcgaggacgccctggttctgagcagcgaggagggcgctgcggcgtacaacggcatcgggaccgccaccaatggctcgttctgcaggggcgccggggctgggcacccgggcgcgggcggcgcgcagcccccggactcgcccgccggggtccgcaccgctttcaccgacctgcccgagcaggtgcccgagtccatctcgaaccagaagcgtggcgtgaaggtgctgaagcaggagctgggcgggctggggatcagcatcaaggggggcaaggagaacaagatgcccatcctcatcagcaagatcttcaaggggctggcggcggaccagacccaagccctgtacgtgggcgacgccatcctgtccgtgaacggagccgacctgcgggacgccacccacgacgaggcggtgcaggcgttgaagcgcgcgggcaaggaagtgctgctggaagtgaagtacatgcgagaagccacgccctatgtgaagaaaggatccccagtatccgagattgggtgggaaacacctccgcctgaatcccctcggttagggggcagcacctcagaccccccgtcatcgcagtccttctccttccacagagaccggaaaagcatccccctcaaaatgtgctacgtcactcggagtatggccttggccgaccctgagaacaggcagcttgaaatccactctccagatgctaagcacacggtgatcctaaggagcaaggactcagccacggcccaggcatggttcagtgccatccattccaacgttaatgacctgctgacccgagtgattgctgaggtcagagagcagctggggaaaacaggcattgctgggagccgagagattaggcatcttggctggcttgcagaaaaggtgccaggggagagcaagaaacagtggaaaccagccctggttgtgctgactgagaaagaccttttaatctatgacagcatgccacggaggaaggaagcctggttcagcccagttcacacataccctcttcttgccaccaggctggtccattcaggtccaggaaagggatcaccccaggctggtgtggatctgtcctttgcaacgcgaactggtaccaggcaagggattgaaacacatctcttcagagcagagaccagcagggacctctcccactggacaaggagcatagtacagggttgccacaattctgctgaactcattgctgaaatcagcactgcttgcacctacaaaaaccaggagtgccgtttgaccatacattatgagaatggattttctattaccactgaaccacaggagggtgcctttcccaagaccatcatacagtctccttatgaaaagctcaaaatgtcttcagatgatggaatcaggatgctgtatttagattttggaggcaaagatggagagattcaactggaccttcattcctgccccaagccaattgttttcatcattcattccttcctgtcagctaagattacaagactgggcttggtggcctgaagacaggggtgacttgcctttgagaaaagaagggctgcaatgccaccagagaacgtgatgtcagacaccatctgtagtgagcagcgcaccagatgtagcgtgctacagtcagctttagctctcaagagtcgtatgtaactgtcccagactcctctgtcagtttcagcaactacaagggataccctgcgaaagtaccatgagaaatatcagagtaaaactttctagaacagtacaaggttaaagaggtgaggtgacgggaaatacacagcatagctttgaaataatgacaaccaaggacatgaccattagaacagcatgtgcagatcttaatcatcccagttcctaggcaacttgttcaccaggtacgcaagggccgaatagttgagaaatggacattcttacctactcctcctagccccctatccccagtaacagtgatcccttttcttattgtgatttatttcctaattcttgctgagttgactttcccttgtaggaaaagaaaaatatttcaaatagaaacccaccttttatttaagtatgaagcagctgttactttttaaaaaatgaattatctttcaatggtgtagaatgattccaaagtgtctccattagcatatactgagcaggaattaaataaagcatcagatactgatctgagctgtaagctggtagaatctgagccaaagtagactgcttaaattgataagctttgctaaagagttgtatgcacaaaggatgattaattctgggactatactcacaccaaggtctgctgtcttatagccaagaattacagctttatttatagagagtgaattatgggtattttttcagaaaatattgtcatctgatatacacataaaacaactcacattgttggagttaactaattatccccatttcatggttttcagtggcaacttactgacccttgtttttgcctgtgcttgtatgcatgcattttcaagcaagtaataaagcagcctcatttaattctggataatgctgggttttacatatagactgaatgctataatcaaatctattgacagtatctgcagttctttcagaattccagggaaataatataacgacctgatatctttctacaggaatattttcagacattatatagcacattactgatttaatgcttttacttttatctttcaaaacaaattcactaaaaataacacctattgattttgaagtcacttttctcaaaccttgaaaatgagctctaggatctctataaacatttctaacacttttcctgtagtttacatagacagacatctgttgttagacctgtgtgtttttaaagaatcatatgttaacaaatacccatgcaaagagcttcaaaaagtgaaaccgtgttaaaggaacacaatttttctcactcagacatatttgtttattgaattgcaaagttttattttaaatcagcatttccccaaagaatatatcatatgacgctagttccaaggggcttgactgagtggtgttttgctggggggagacaggggtttgttaatacactttactaaatactgagctgaaaaatgttaaatagatttcacgattgcctccttgaagattttaaagttcattgtggttcttcaaggcgaaatccggtgaaccattcctcacacttacctacaggactcttttctaatggagcatcttgtgaagctagtgggtttttttgttgttgttatttgttttttttttttaatgctttagaaaacacagctttaggatattgactttttgtttatttctattttcaaatgctgaaaagtcaagtcccagtttgaataccatagaaaagctttgatgcatttgtaaattatattgcactctttcactatatattttcaaaatcactggaatgttgttatacaagagaattataattgtgtattgtaaataacatattaaaatacatatattaatgccaatagttaaattcaacaatatgtaatctaaggtgctcggttctacatgaagtatgagttaactgctcataattaagttgccaagattctattatatatttatagacaaattaaaatgatcataattacaaatatgatttctttatcacttaagctttgggctgattaatatctgtgtgggggtcaatggaaactacattctctacatttataaacatttaatttaattatttatattttaggaaaatatatttgaataaaattaatgcattttctagagtaaattaaaatgttattagcaagaaatagaaaatttgactaagataattgtgtatatgaatcatttttcccccaagttaaaatgtatcataatagagaggctctaatgaatcaatttccaatactcatttctttcttattttgaattcaagttacaatgactttacactgtagattttaatcttgtctgatgtgtgctggtgtgtatgacacaaactcataagtctggatcatgcttgggtacagtcaatgaatcaaccgagtcactttgaggaatttgtttttgtccaatttgctctgtgctcaatcccatgaattattaaatttacaatgtttgtccccaaatgaaaaccaatataaatgaatgatgttttaatctgtactttatgggaagttgcctatttgtcagtagatgtggttaagtgagtcctctggtgcagtgacatccttttaagccatctcatagggatttaaagaaggccaataggaatatagatattggtttttctttctctgacttgaactaagtaggagaaaccaaaccataaacctattacaaactacccaggcagaggcatttacttaattcatcaactagtgcaattaaaaccctgaaaacacatgatccttgttgactctgcttggttgaagcaggaaagaatggtcttgatggtcagaaagttttaaaattaatgggcagggcctttctggaccctgttttccaaacacgttagatattccgtcttgaggggattggagtaggctacagtgagggggtaatttttggatgtatctggacttttaaaaaatgtgcctatatttatagcaccatgaatattatgtaaaatttatatatgaattaaataaatattcacctctgatttccagtgca

SEQ ID NO: 188550 - DNA, 559 bp, Homo sapiens
  Payload ID: 17096
  Gene Symbol: SNTB1
  Gene Name: syntrophin, beta 1 (dystrophin-associated protein A1, 59kDa, basic component 1)
  ENST ID: ENST00000520717
  CDS Start-End: 475-559
aacatttgtccctggggtctgaggcaggcatgacctgttgaaaaccccaggccagcagagacacctgtccagggctcgatagaaaacatttcttgcatttaaggacaggaggtttaagccactcgggctacgttgactcttcattctagaatcttgggacagcgtattcccttttaactcctggggagcccagggccttggtctgagtttagcttcctccagggaacccgggtggaaaggagagacaggttgctccaccccggtcaggatcaggcgagggggaaccagcctgagtgcagctgccaactcccgccgagtgcgtctgcgaactcccggagcggagtcccgcgtgccgccacctccccgcgggacgcactctcctcgctcccccgggccccgcgtcctccccccggccacccttccccacttttccccccttttccaatcacatggcattttaagaatgccggaaagatggcggtagcggcggcggcggcggcggctgggccggctggcgcgggaggcggccgggcgcagcggagcgggctgctggaagttt

SEQ ID NO: 188551 - DNA, 2273 bp, Homo sapiens
  Payload ID: 17096
  Gene Symbol: SNTB1
  Gene Name: syntrophin, beta 1 (dystrophin-associated protein A1, 59kDa, basic component 1)
  Uniprot ID: Q13884
  ENST ID: ENST00000517992
  CDS Start-End: 301-1917
cttgctttggggttttgcaactggctgctggcttttttcccctcccctgtctcggtctctccttcttcttttaggttgctccaccccggtcaggatcaggcgagggggaaccagcctgagtgcagctgccaactcccgccgagtgcgtctgcgaactcccggagcggagtcccgcgtgccgccacctccccgcgggacgcactctcctcgctcccccgggccccgcgtcctccccccggccacccttccccacttttccccccttttccaatcacatggcattttaagaatgccggaaagatggcggtagcggcggcggcggcggcggctgggccggctggcgcgggaggcggccgggcgcagcggagcgggctgctggaagttttggtgcgggatcgctggcacaaagttctggtgaacttgagcgaggacgccctggttctgagcagcgaggagggcgctgcggcgtacaacggcatcgggaccgccaccaatggctcgttctgcaggggcgccggggctgggcacccgggcgcgggcggcgcgcagcccccggactcgcccgccggggtccgcaccgctttcaccgacctgcccgagcaggtgcccgagtccatctcgaaccagaagcgtggcgtgaaggtgctgaagcaggagctgggcgggctggggatcagcatcaaggggggcaaggagaacaagatgcccatcctcatcagcaagatcttcaaggggctggcggcggaccagacccaagccctgtacgtgggcgacgccatcctgtccgtgaacggagccgacctgcgggacgccacccacgacgaggcggtgcaggcgttgaagcgcgcgggcaaggaagtgctgctggaagtgaagtacatgcgagaagccacgccctatgtgaagaaaggatccccagtatccgagattgggtgggaaacacctccgcctgaatcccctcggttagggggcagcacctcagaccccccgtcatcgcagtccttctccttccacagagaccggaaaagcatccccctcaaaatgtgctacgtcactcggagtatggccttggccgaccctgagaacaggcagcttgaaatccactctccagatgctaagcacacggtgatcctaaggagcaaggactcagccacggcccaggcatggttcagtgccatccattccaacgttaatgacctgctgacccgagtgattgctgaggtcagagagcagctggggaaaacaggcattgctgggagccgagagattaggcatcttggctggcttgcagaaaaggtgccaggggagagcaagaaacagtggaaaccagccctggttgtgctgactgagaaagaccttttaatctatgacagcatgccacggaggaaggaagcctggttcagcccagttcacacataccctcttcttgccaccaggctggtccattcaggtccaggaaagggatcaccccaggctggtgtggatctgtcctttgcaacgcgaactggtaccaggcaagggattgaaacacatctcttcagagcagagaccagcagggacctctcccactggacaaggagcatagtacagggttgccacaattctgctgaactcattgctgaaatcagcactgcttgcacctacaaaaaccaggagtgccgtttgaccatacattatgagaatggattttctattaccactgaaccacaggagggtgcctttcccaagaccatcatacagtctccttatgaaaagctcaaaatgtcttcagatgatggaatcaggatgctgtatttagattttggaggcaaagatggagagattcaactggaccttcattcctgccccaagccaattgttttcatcattcattccttcctgtcagctaagattacaagactgggcttggtggcctgaagacaggggtgacttgcctttgagaaaagaagggctgcaatgccaccagagaacgtgatgtcagacaccatctgtagtgagcagcgcaccagatgtagcgtgctacagtcagctttagctctcaagagtcgtatgtaactgtcccagactcctctgtcagtttcagcaactacaagggataccctgcgaaagtaccatgagaaatatcagagtaaaactttctagaacagtacaaggttaaagaggtgaggtgacgggaaatacacagcatagctttgaaataatgacaaccaaggacatgaccattagaacagcatgtgcagatcttaatcatcccagttcctaggcaacttgtt

SEQ ID NO: 188552 - DNA, 9789 bp, Homo sapiens
  Payload ID: 17097
  Gene Symbol: SNTB2
  Gene Name: syntrophin, beta 2 (dystrophin-associated protein A1, 59kDa, basic component 2)
  Uniprot ID: Q13425
  ENST ID: ENST00000336278
  CDS Start-End: 39-1661
gggcgggaagagggaagcgccgaggctgcctgactggaatgagggtagctgcggcgactgcggcggctggagcggggccggccatggcggtgtggacgcgggccaccaaagcggggctggtggagctgctcctgagggagcgctgggtccgagtggtggccgagctgagcggggagagcctgagcctgacgggcgacgccgccgcggccgagctggagcccgctctgggacccgcggccgccgccttcaacggcctcccaaacggcggcggcgcgggcgactcgctgcccgggagcccaagccgcggcctggggcccccgagcccgccggcgccgcctcggggccccgcgggtgaggcgggcgcgtcgccgcccgtgcgccgggtgcgggtggtgaagcaagaggcgggcggcctgggcatcagcatcaagggcggccgcgagaaccggatgccgatcctcatctccaagatcttccccgggctggctgccgaccagagccgggcgctgcggctgggcgacgccatcctgtcggtgaacggcaccgacctgcgccaggccacccacgaccaggccgtgcaggcgctgaagcgcgcgggcaaggaggtgctgctggaggtcaagttcatccgagaagtaacaccatatatcaagaagccatcattagtatcagatctgccgtgggaaggtgcagccccccagtcaccaagctttagtggcagtgaggactctggttcgccaaaacaccagaacagcaccaaggacaggaagatcatccctctcaaaatgtgctttgctgctagaaacctaagcatgccggatctggaaaacagattgatagagctacattctcctgatagcaggaacacgttgatcctacgctgcaaagatacagccacagcacactcctggttcgtagctatccacaccaacataatggctctcctcccacaggtgttggctgaactcaacgccatgcttggggcaaccagtacagcaggaggcagtaaagaggtgaagcatattgcctggctggcagaacaggcaaaactagatggtggaagacagcaatggagacctgtcctcatggctgtgactgagaaggatttgctgctctatgactgtatgccgtggacaagagatgcctgggcgtcaccatgccacagctacccacttgttgccaccaggttggttcattctggctccggatgtcgatccccctcccttggatctgaccttacatttgctaccaggacaggctctcgacagggcattgagatgcatctcttcagggtggagacacatcgggatctgtcatcctggaccaggatacttgttcagggttgccatgctgctgctgagctgatcaaggaagtctctctaggctgcatgttaaatggccaagaggtgaggcttactattcactatgaaaatgggttcaccatctcaagggaaaatggaggctccagcagcatattgtaccgctacccctttgaaaggctgaagatgtctgctgatgatggcatccgaaatctatacttggattttggtggtcccgagggagaactgaccatggacctgcactcttgtccgaagccgattgtatttgtgttgcacacgtttttatcggccaaagtcactcgtatgggactgcttgtatgagcaacaaaaaatcagaaaagagccttgactgtcacaagaaatatttccacctcaaaaaaaaaaaagcacaaaaagaaactctttgctctccttcagcacagtgccttcccaaggacctgcaaataactgctgaaccataaccgtgtttaaagaagagcctacctttcacagtctaccttggccagatattctagcactctaaaaggctccaaaatgaagctgttgatttattctcatttcaaaatatggtttatgagtaattaggtttatttctactgctaaaaagaatggctcattgttttctttttttttcattgttttcatttttagacataatcaaatacccaagcattgttttctttttcttctccctgtaggatttgtgttgtgcttagccttgatctcttgttcagaacaattgtcccttcccaggtgctagcttgcagcagcctgttgcttcctgagcattccagataggtcgtatgtcttggaatttactgtcctcactagctccttccaccataggaagtccttgaattgtatcaccaaagggttgttccatttgccctggatctccctctatctcagcctggccatcacttcccaccttatcccaagctttgccactgtctctaggacttagaacttgtaaatttgatttgccttgccttctacttcctttctagtggtgactgagttgaaaagcaagttggaagccactgcttttaaagaaaagttttgcttggtttaggtttttccaattttatttttgttaggagccaggggataagatttattttaaatgaaaatcctcttcctaggttaagccattttttttattgcttaccaaatgtgcctttggttagggttagtggagctttattagtcactatttgaataactggaaatcactgccatttccaggagatcacctatcctagttttgaggaatagtcattgaggtgggtttccttaatggcatctcttctagtaggcagatctgtttgaacaagataaatcctaaagagccagcctgcttgaggagtagacttggtgggtgaagccagcaattccgcacaaacgtcatgttgaattgttttgggctgcccaaaaacaacaggatgcagcatcctggctgtggcctggccctttgtggcagcagtggcatggacaagcaactgctaattcgagacttactattggcttcacagcacaccctacagtgagcagggtgatgagaccgtggaacagctacctgcttttggttaagattgccagatatcattaggacacagtagcagcaagaatgctgattttgtagtgttagaaaatgaactcagcttgtttttcctaattttgaaggtggtatatatctgcaaacatttaaaatggtataatatcatataaaatgtcaaaattagcacagtccctggatctcaaagaataggtaatattgacttggatgttctttatgctctctgaagaaaggtctagggaaagttcttgtttgcttgattgatcaagagtgccacggaagaatgtgagcgctgtggagggtggaggagggtgtcacttcagatggggcaggcacagggggagaaaagaagagaaaaacacacctgtgtgcaaaatgagctatttggtttcagtgcggcctgaccgatggggaggacccatgagcagagagagttctaggtcaacattgtaactccattgtcctccttcacccataagtcagtcctccttcctcattacagtgaaaccaacaatatgcagaggttggggagagatgcctgttcttcccccagcttcatataattgtcaaagttccaaaaatgaattatctgaactgcttaaaactggaaattaaaatctagacaagaatatgtctttcaagagctttttatgttttgaaagttcataaacctaagattggctccatctgagataaattttcttttctttttttttttgagacggagtctcgttctgtctcccaggctggagtgcagtggcatgatctcggctcactgcaacctccacctcctaggttcaagtgattctcctgagtagctggggttatagctacccaccaccacacccagctaatttttgtatttttagtagaggcaggttttcaccatgttggctaggctggtcttgaactcccgacctcaagtgatccacctgccttggcctcccaaagtgctgggattataggtgtgagcccccgtgcctggcccacaataaattttcatttcagagaaggaaaaaaatctcttgaacgtccagaaatgatttctggaatcagaatttcaatatgtaataccctcaggtaggcaatcttgaaccctctatgcagtgagagcattattaatatgagatgttgaatgatgcctttacagacttcagcagcaaagccatttggttgaggttttctgtgttaatgtgaaaagctaagccactgagatttgcaggggagcttctgagccaccctgcttgttggttatatgaggatgtaaaataggtggaattaaaatgtgagcaggaaaggcaaggcatgtgtgcattttcactcattttggtcaaggttaaactgacatgtatagcactgaggtctgtagggttcttaatatcttttgagtcttgctgtgaaatgaaagtgtgggaggtttcctttgtccattagcagccccaagaaccagaacccttttgctgcttttcttacatacctaacagctctccagtcatgatgaccaaggttgttcttcaatcaaatgtgtttgtgggattttcagtccgcaaatgaagtgctctctaatgaatgggacaccatgataaatatgtatttatatttagatgccaaagtatggcaaattatttccaaatgataactacaaatgggaattttcgatattctaccttttttatagaaccagctcacttttcatttctttttcattttgaattaagaaaattgttgaggatgtggtgggttccagtgtgtggaatggaaaggaaactgcagaatagtgtctgctccccattcagagggactgcttcctgtgccccccagacccggggcttcgacagcttctccacattccacacagatgcctaggagcagcgagttggtatatgaaaagtctcccaccttttctcctaaaacttctctcctttctctccataaaaagaaaaggaaaggaacaaaagaaaaacattcagtttttctttttctgaaaaaggtaagtcctttcctgaagtcatcaaatgaaacattatctggaaattagtttctaatgttgtatatgaagaaatacttaaatataagttcctgcagtatttattagatagttgtaactgtaaactcacctccctagtagataagagtttcaggttaaatactggaacatatataggcagtcaaaaatactactttaaatgtcattcacctattttaaagccatgttttagcactttttaggccaaagaaggtctgatagtgcctgtttttatgttctgtactctcacaaactttgttactcaaaattattgcatggcaggagagattggattatttatttcttatatttttataagtaaaaaaatctttctaaacaacaaatacctaacattattactgattgttttcctaatttatcctcctaagttgaatggtaacaaagcttttccagctgaatgaatgcacttagctgataaaccagaatttgttcttttttttccttcttttttttttgagacaggttctcactctgtcaccgaggttggagtgcagtggtatgatcatagctgactgcagcctcaaccttctgggctcaaatgatcctttcacctcagcctcctgagtagctgggaccacaggtgtgtgccaccacacctggctaatttttatggatttttttttcttttttttttttcgccatgttgcccaggctggtcttgaactcttggcactcaagcagtccttctgcctcagcctcccaaagtgctgggattacagatgtgagccactgcacctggccccagaaattatgcttaaaaaaaaaattaagctgtgtggaatctggacaaggctatgtttctcctagaaacaggttttgctgtaaatggttttgatgggcgaaagtgtgagaaaaggttataatagattcttttttttaattttgtgagaaattccaggtcttcttgcttaacttatatgcatgtggatatatttgttttcaaagccatggaagaatctctgttcatatattttaatgcaaattaccttgtatgctgctatgcaaattctattaaaaggcctacctgcttaagaattaaacatttttgaaactttcagggaagacctgtagactcaagcactttctctgcttttttgtatcttatcttggacacttatgctgaattatgttcttattattttcactggttataagctattccttgtacataatatttaaactatccaaatatccagcatacatttccatgtggctgccatcggctgttgatgccatgaatgaaatggctggttagaaagccaaaggtcttcttttttcaattcctaatgaataagtaaaatgccagatctctttggtctcaaagcaaattgctctgatcagatcaaatatctatgtaatgaaaagagacttacttaaatttgggattctgcttaaactttaagttgaatttgactgtagtcattcattctttttatatatctctgtcaggtatgacattaattaccaggtggtattatactctactttgagtttggacatcactttcagttaaatttctgttgttattgtggcttttttttttttttaaccccactgaagatggaagtagagcagtctgccatctcctgctgttctttctctgtgccccctaattgcttggtaatctaaaattattctgactttccacatactgtctttaaaaaccaattgtagcaatctgcccgcctccaccctttaagctaaatctttcactgtgctggatacatagacactcgataaatgtgtgatgatagttctaaaataattatgctatatatcagggttctgtatttttgagcaatatcattattcctatgctgtgatgttaaatggaatttattttacactagtaatagactgcttaagtggctgatttgaaacctttctctaaaaaaacaaaaacatctggcagatgagtgacacaaattcattctcttaaaggatagaatttcaagttaaggataaggcacaataaataggcacatagaggacatctgtttttgtttttggttttggttttgtttttttttgtctctctgactagctaaactgccaactagaagaatggttgttatgtagtaactcagaagaatcttttaataagtttcttcttttgtttcaaaacaaacttgagcttcatttcttgccacctctattctttcttcccacgttgggtgactgaactgatgcttattctagttttagaagaggatccacatttaatgtaaggcataaatatgccttttgcaaattattgcttgttctccagtgaacatttgatcatattcaacagaaatccaccatataaaccataatccttgaattgccccttttaaaatagattggttaaaaccaaaaacctataagagagaaatgatatttcattgtattgtaggtttgggaatcctggttagatttataatttctggccgggtgcggtggctcatgcctgtattcccagtactttgggagcccaaggtgggtggatcacctgaggtaaggagtttgagaccagcctggccaacatggtgaaaccccatctctactaaaaatacaaaaagttagctgggcatggtggtgcgcgcctgtggtcccagctactcgggaggctgaggtgggagaatcccttgaacccaggaggcagaagttgcagtgagctgagatcatgccattgcactccagcctgggcaacagagcgagacttcatctccaaaaaaagaaaaagaagaaaaagatttataatttctgagtcccctaagtccctttctcagtttgcaataatcttacgtccatgctattgacactaattttgaaactggaaagctaattaatgacatattcatgtgttctttcatctaataaacatttattaatgtatagttctacaccaggcattctgaagggtccaaaagaaagttcctgccctctagtagcacataatccgttatttctcagcacaccatgccatctgtttatcattcagcagttaagtaattcatcacttcatatttttaccaaagtatatttacaagtctgtttatctggatctggcaaactggaaaatgtttgaagggatactcaggctttgatccatgccaacatgaaaggactccaagcacatttaagtaggctggtcttttcatcatgcatgattttttttttagtgcaaatttagactttagtttgggaaagagaacagtatacagtatcctttgtaagataaatcacaacaacaaaaattaagttttattgcacaaagtagataaatgagaaagtctttcttaaaaaatgcttctttaactgtaacagcaaaactaaatgcatattttatcaaccccttatttctaattgctgtattcatttccacccttaaactatttaagcatttcatctgctgaaagtccttatatacatggtagacggaatatttctccattaatgatagatcaaaatgaagatatttaaaaattaacaaaatcaggccaaggcaggaggatcactttagcccaggaggtccagaccagcctgggcaacacagcgggaccccgactccatttaaaaaattaaaaaaaaaaaaaaaacttttaacatttaaaaaataaaaattaacaaaatttcacttattccaggacacgctggcatttggactcaatgaaaagggcacctaaagaaaataaggctgactgaatgttttccataattttcacacaataacagtccctttctatccagcttgccttccatttatctctagggttagcttttcaggcaacatccttggtcattgcccagaaagtacctgagctatcagtgattggaatggcacaggaaaccgaatcacatgggtgccctccccttggttttcaagtatcttggagttgtgcacaaaaattaggtcatgccttcagtgtcttgttctttaaacctaccctttgacaatcaggtgctaatgattgtatactattaaaaccagcacataagtattgtaaatgtgtgttcctcctaggttggaagaaatgtctttccttctatctgggtcctgttaaagcgggtgtcagttgtgtcttttcacctcgatttgtgaattaatagaattggggggagaggaaatgatgatgtcaattaagtttcaggtttggcatgatcatcattctcgatgatattctcactttgtcgcaaatctgcccttatcgtaagaacaagtttcagaattttccctccactatacgactccagtattatgtttacaatccattggatgagtgcagcattataagaccttggtgcccagaaaaatctgtcctttttggtaccaaacctgaggtcttttggaagataatgtagaaaaccactacctattgaaggcctgttttggctaatctgtgcaaactctgatgatacctgcttatgtggattcttttccacactgctttcatttttaagtataaagacttagaaaactagaataatgcttttacaaataattaaaagtatgtgatgttctgggttttttccttctttttagaaccctgtatttaaacaagccttctttttaagtcttgtttgaaatttaagtctcagatcttctggataccaaatcaaaaacccaacgcgtaaaacagggcagtatttgtgttcctaattttaaaaagctttatgtatactctataaatatagatgcataaacaacacttccccttgagtagcacatcaacatacagcattgtacattacaatgaaaatgtgtaacttaagggtattatatatataaatacatatatacctttgtaacctttatactgtaaataaaaaagttgctttagtca

SEQ ID NO: 188553 - DNA, 415 bp, Homo sapiens
  Payload ID: 17097
  Gene Symbol: SNTB2
  Gene Name: syntrophin, beta 2 (dystrophin-associated protein A1, 59kDa, basic component 2)
  ENST ID: ENST00000360496
  CDS Start-End: 1-415
tcctcatctccaagatcttccccgggctggctgccgaccagagccgggcgctgcggctgggcgacgccatcctgtcggtgaacggcaccgacctgcgccaggccacccacgaccaggccgtgcaggcgctgaagcgcgcgggcaaggagtcaagttcatccgagaagtaacaccatatatcaagaagccatcattagtatcagatctgccgtgggaaggtgcagccccccagtcaccaagctttagtggcagtgaggactctggttcgccaaaacaccagaacagcaccaaggacaggaagatcatccctctcaaaatgtgctttgctgctagaaacctaagcatgccggatctggaaaacagattgatagagctacattctcctgatagcaggaacacgttgatcctacgctgc

SEQ ID NO: 188554 - DNA, 536 bp, Homo sapiens
  Payload ID: 17097
  Gene Symbol: SNTB2
  Gene Name: syntrophin, beta 2 (dystrophin-associated protein A1, 59kDa, basic component 2)
  ENST ID: ENST00000525632
  CDS Start-End: 1-488
gcggccgcgagaaccggatgccgatcctcatctccaagatcttccccgggctggctgccgaccagagccgggcgctgcggctgggcgacgccatcctgtcggtgaacggcaccgacctgcgccaggccacccacgaccaggccgtgcaggcgctgaagcgcgcgggcaaggaggtgctgctggaggtcaagttcatccgagaagtaacaccatatatcaagaagccatcattagtatcagatctgccgtgggaaggtgcagccccccagtcaccaagctttagtggcagtgaggactctggttcgccaaaacaccagaacagcaccaaggacaggaagatcatccctctcaaaatgtgctttgctgctagaaacctaagcatgccggatctggaaaacagattgatagagctacattctcctgatagcaggaacacgttgatcctacgctgcaaagatacagccacagcacactcctggcaaaactagatggtggaagacagcaatggagacctgtcctcatggctgtgactgaga

SEQ ID NO: 188555 - DNA, 1489 bp, Homo sapiens
  Payload ID: 17097
  Gene Symbol: SNTB2
  Gene Name: syntrophin, beta 2 (dystrophin-associated protein A1, 59kDa, basic component 2)
  Uniprot ID: Q13425
  ENST ID: ENST00000467311
  CDS Start-End: 21-824
gccgaggctgcctgactggaatgagggtagctgcggcgactgcggcggctggagcggggccggccatggcggtgtggacgcgggccaccaaagcggggctggtggagctgctcctgagggagcgctgggtccgagtggtggccgagctgagcggggagagcctgagcctgacgggcgacgccgccgcggccgagctggagcccgctctgggacccgcggccgccgccttcaacggcctcccaaacggcggcggcgcgggcgactcgctgcccgggagcccaagccgcggcctggggcccccgagcccgccggcgccgcctcggggccccgcgggtgaggcgggcgcgtcgccgcccgtgcgccgggtgcgggtggtgaagcaagaggcgggcggcctgggcatcagcatcaagggcggccgcgagaaccggatgccgatcctcatctccaagatcttccccgggctggctgccgaccagagccgggcgctgcggctgggcgacgccatcctgtcggtgaacggcaccgacctgcgccaggccacccacgaccaggccgtgcaggcgctgaagcgcgcgggcaaggaggtgctgctggaggtcaagttcatccgagaagtaacaccatatatcaagaagccatcattagtatcagatctgccgtgggaaggtgcagccccccagtcaccaagctttagtggcagtgaggactctggttcgccaaaacaccagaacagcaccaaggacaggaagatcatccctctcaaaatgtgctttgctgctagaaacctaagcatgccggatctggaaaacaggcaaaactagatggtggaagacagcaatggagacctgtcctcatggctgtgactgagaaggatttgctgctctatgactgtatgccgtggacaagagatgcctgggcgtcaccatgccacagctacccacttgttgccaccaggttggttcattctggctccggatgtcgatccccctcccttggatctgaccttacatttgctaccaggacaggctctcgacagggcattgagatgcatctcttcagggtggagacacatcgggatctgtcatcctggaccaggatacttgttcagggttgccatgctgctgctgagctgatcaaggaagtctctctaggctgcatgttaaatggccaagaggtgaggcttactattcactatgaaaatgggttcaccatctcaagggaaaatggaggctccagcagcatattgtaccgctacccctttgaaaggctgaagatgtctgctgatgatggcatccgaaatctatacttggattttggtggtcccgagggagaactgaccatggacctgcactcttgtccgaagccgattgtatttgtgttgcacacgtttttatcggccaaagtcactcgtatgggactgcttgtatgagcaacaaaaaatcagaaaagagccttgactgtcacaagaaatatttccacctcaaaa

SEQ ID NO: 188556 - DNA, 149 bp, Homo sapiens
  Payload ID: 17097
  Gene Symbol: SNTB2
  Gene Name: syntrophin, beta 2 (dystrophin-associated protein A1, 59kDa, basic component 2)
  ENST ID: ENST00000577080
  CDS Start-End: 1-149
tcctcatctccaagatcttccccgggctggctgccgaccagagccgggcgctgcggctgggcgacgccatcctgtcggtgaacggcaccgacctgcgccaggccacccacgaccaggccgtgcaggcgctgaagcgcgcgggcaaggag

SEQ ID NO: 188557 - DNA, 186 bp, Homo sapiens
  Payload ID: 17097
  Gene Symbol: SNTB2
  Gene Name: syntrophin, beta 2 (dystrophin-associated protein A1, 59kDa, basic component 2)
  ENST ID: ENST00000574270
  CDS Start-End: 1-186
gcggccgcgagaaccggatgccgatcctcatctccaagatcttccccgggctggctgccgaccagagccgggcgctgcggctgggcgacgccatcctgtcggtgaacggcaccgacctgcgccaggccacccacgaccaggccgtgcaggcgctgaagcgcgcgggcaaggaggtgctgctggagg

SEQ ID NO: 188558 - DNA, 600 bp, Homo sapiens
  Payload ID: 17097
  Gene Symbol: SNTB2
  Gene Name: syntrophin, beta 2 (dystrophin-associated protein A1, 59kDa, basic component 2)
  ENST ID: ENST00000571655
  CDS Start-End: 21-600
gccgaggctgcctgactggaatgagggtagctgcggcgactgcggcggctggagcggggccggccatggcggtgtggacgcgggccaccaaagcggggctggtggagctgctcctgagggagcgctgggtccgagtggtggccgagctgagcggggagagcctgagcctgacgggcgacgccgccgcggccgagctggagcccgctctgggacccgcggccgccgccttcaacggcctcccaaacggcggcggcgcgggcgactcgctgcccgggagcccaagccgcggcctggggcccccgagcccgccggcgccgcctcggggccccgcgggtgaggcgggcgcgtcgccgcccgtgcgccgggtgcgggtggtgaagcaagaggcgggcggcctgggcatcagcatcaagggcggccgcgagaaccggatgccgatcctcatctccaagatcttccccgggctggctgccgaccagagccgggcgctgcggctgggcgacgccatcctgtcggtgaacggcaccgacctgcgccaggccacccacgaccaggccgtgcaggcgctgaagcgcgcgggcaaggaggtgctgctggagg

SEQ ID NO: 188559 - DNA, 618 bp, Homo sapiens
  Payload ID: 17097
  Gene Symbol: SNTB2
  Gene Name: syntrophin, beta 2 (dystrophin-associated protein A1, 59kDa, basic component 2)
  ENST ID: ENST00000571496
  CDS Start-End: 39-618
gggcgggaagagggaagcgccgaggctgcctgactggaatgagggtagctgcggcgactgcggcggctggagcggggccggccatggcggtgtggacgcgggccaccaaagcggggctggtggagctgctcctgagggagcgctgggtccgagtggtggccgagctgagcggggagagcctgagcctgacgggcgacgccgccgcggccgagctggagcccgctctgggacccgcggccgccgccttcaacggcctcccaaacggcggcggcgcgggcgactcgctgcccgggagcccaagccgcggcctggggcccccgagcccgccggcgccgcctcggggccccgcgggtgaggcgggcgcgtcgccgcccgtgcgccgggtgcgggtggtgaagcaagaggcgggcggcctgggcatcagcatcaagggcggccgcgagaaccggatgccgatcctcatctccaagatcttccccgggctggctgccgaccagagccgggcgctgcggctgggcgacgccatcctgtcggtgaacggcaccgacctgcgccaggccacccacgaccaggccgtgcaggcgctgaagcgcgcgggcaaggaggtgctgctggagg

SEQ ID NO: 188560 - DNA, 537 bp, Homo sapiens
  Payload ID: 17097
  Gene Symbol: SNTB2
  Gene Name: syntrophin, beta 2 (dystrophin-associated protein A1, 59kDa, basic component 2)
  ENST ID: ENST00000524887
  CDS Start-End: 1-194
gcggccgcgagaaccggatgccgatcctcatctccaagatcttccccgggctggctgccgaccagagccgggcgctgcggctgggcgacgccatcctgtcggtgaacggcaccgacctgcgccaggccacccacgaccaggccgtgcaggcgctgaagcgcgcgggcaaggaggtgctgctggagggcctataatgaggaaatttctgtctgaccaatatcaggggcacatcagctgctgtactaagtttcttcaaatatcctggaattgtgtcaagttcatccgagaagtaacaccatatatcaagaagccatcattagtatcagatctgccgtgggaaggtgcagccccccagtcaccaagctttagtggcagtgaggactctggttcgccaaaacaccagaacagcaccaaggacaggaagatcatccctctcaaaatgtgctttgctgctagaaacctaagcatgccggatctggaaaacagattgatagagctacattctcctgatagcaggaacacgttgatcctacgctg

SEQ ID NO: 188561 - DNA, 186 bp, Homo sapiens; identical to SEQ ID NO: 188557
  Payload ID: 17097
  Gene Symbol: SNTB2
  Gene Name: syntrophin, beta 2 (dystrophin-associated protein A1, 59kDa, basic component 2)
  ENST ID: ENST00000613835
  CDS Start-End: 1-186

SEQ ID NO: 188562 - DNA, 2773 bp, Homo sapiens
  Payload ID: 17098
  Gene Symbol: SNTG1
  Gene Name: syntrophin, gamma 1
  Uniprot ID: Q9NSN8
  ENST ID: ENST00000276467
  CDS Start-End: 42-1484
ctgtgtcttttcagacgacatcctttgtggtgccacagcacatggatttcagaaccgcctgtgaggagacaaagacaggaatttgtttgctgcaggatggtaaccaggagcctttcaaagtgcggctgcacctagccaaagacattttgatgatccaggaacaggatgtgatatgtgtgtctggtgagcctttctattctggtgaaagaacggtgaccatcagaagacaaacagtaggaggatttggattaagcataaagggaggagcagaacataacattccagttgtcgtttcaaaaatctccaaggaacaaagagcggaactttcaggactactttttattggagatgcaattctacagataaatggcattaatgtgagaaaatgtagacatgaagaagtggttcaggttcttcggaatgctggagaagaagtgactctaacagtgtcatttttaaaaagagcacctgctttcctcaaactcccattgaatgaagattgtgcatgtgctccaagtgaccagagcagtggcacctcctctcctctctgtgacagtggcttacatctcaactaccatcccaacaatacagacacattatcatgctcgtcgtggccgacgtctccaggcttgaggtgggagaagcgatggtgcgacctcagactgatccctctacttcattcgcgcttctctcagtatgtgcccggcacagatttgagtcggcagaatgcctttcaagtcattgctgtggatggggtctgcactgggattattcagtgcctctctgctgaagactgcgttgactggctacaagcaatagcaactaacatttcaaatctcacaaagcacaatattaaaaaaatcaacagaaactttcctgtaaaccagcagattgtctacatgggctggtgtgaagcccgggagcaagaccccctccaggacagagtgtactccccgaccttcctggccctgaggggctcatgtctctacaagtttctggcacctccagtgaccacctgggactggacgagagcagagaaaacattctcagtttatgagattatgtgcaagatcctcaaggacagtgacctgctggaccgacggaaacagtgcttcaccgtgcagtctgagtctggggaggacctgtacttctcagtggagctggaaagtgacctcgcccagtgggaaagagccttccagacagcaacctttctagaagtagaacggatacagtgcaagacctatgcatgtgtgctagaaagtcatctaatgggactcacaattgatttcagcacaggatttatctgctttgatgctgcaacaaaggagttggaattttctaatttatttgctgttcttcactgcattcattccttctttgctgccaaggtagcttgtttggaccctctatttttaggcaatcaagctactgcttctactgctgccagctctgctaccacgagcaaagcaaagtatacaacttgacatactgaactcttcattgacacaccccatgactgtataagcaggacacatttactcatcattttagaccctagagaaaccataacatcaccaagtcgacagtggaggcaaatcaaaatttcggcagaaaaagaaggtcatgtggaacctcaaaaacacttctattctggatgacatctgtgaaatatactacatgaacagaacagcttgttctcactcagttgctttgtaccagtaagtgtattgctttcaccaaaagtggagacaaaagaataaattatttgaagaagtatgtaaataacataaaaatagtaagctacctatgaataaaaatacttattaaatgattacttctgtattttagattattttgtatgactagtacatgttgggcagagtcataggaaaacaaatgccctatcttgtattatgagggacataaaagagttaaaaaccataaatcagcaaggagcatgcaaaaaaatctcatcaaagaaggatgcactttaatttgctgatgtaaatttgcccttgtgttctcatcccatgatttgacactggcattccaattgtttttatcttattgtaaatattccgaagaacttccaaaggataattacattgacccatgatagatacaatgtgaaatggactattctcccttggatcactgttattgaaatgtcttattagctgccaaagtcaatcaaatatgccaacagtgtattaatttaattatgagtgatggaaaatttcatgaacctctcatttcttccttggtttgaaagagatttgtattttacctaataagatttattatcaaattaaagtttcataaattttcagtgaacccaaaaccttttgtagagaaaataatataaacaaatatggtgtgagaaacaattctttgtaatccgaagtctactagttaatcatgaactaaaatgtcccccgaaaacagtcccaaagctattatagatgttaattaaatgacattttttcattttagtactattttatgagaaacaaaggtgatatttaaagataaaagttaaaattctttaacctcccttgtcatggaaagtgattaagtaatgccaactatgcaggttgttttaggtattttgtcctaagaatgtaaatgtgaaaggctgggaaatttgaaagccttagaggtgtgcaatttactcagattccaggtattattcaactagttgtataacatggaacacagtctctgtccttcagtacagcttttttgagatattttaaaaagtcagctgtgtatg

SEQ ID NO: 188563 - DNA, 1714 bp, Homo sapiens
  Payload ID: 17098
  Gene Symbol: SNTG1
  Gene Name: syntrophin, gamma 1
  ENST ID: ENST00000520825
  CDS Start-End: 103-1149
actgctctccagaatgttgagattgcccgagaagtgaccccagcaaaagaaaaatattgctgtacctaaattcaaacgacatcctttgtggtgccacagcacatggatttcagaaccgcctgtgaggagacaaagacaggaatttgtttgctgcaggatggtaaccaggagcctttcaaagtgcggctgcacctagccaaagacattttgatgatccaggaacaggatgtgatatgtgtgtctggtgagcctttctattctggtgaaagaacggtgaccatcagaagacaaacagtaggaggatttggattaagcataaagggaggagcagaacataacattccagttgtcgtttcaaaaatctccaaggaacaaagagcggaactttcaggactactttttattggagatgcaattctacagataaatggcattaatgtgagaaaatgtagacatgaagaagtggttcaggttcttcggaatgctggagaagaagtgactctaacagtgtcatttttaaaaagagcacctgctttcctcaaactcccattgaatgaagattgtgcatgtgctccaagtgaccagagcagtggcacctcctctcctctctgtgacagtggcttacatctcaactaccatcccaacaatacagacacattatcatgctcgtcgtggccgacgtctccaggcttgaggtgggagaagcgatggtgcgacctcagactgatccctctacttcattcgcgcttctctcagtatgtgcccggcacagatttgagtcggcagaatgcctttcaagtcattgctgtggatggggtctgcactgggattattcagtgcctctctgctgaagactgcgttgactggctacaagcaatagcaactaacatttcaaatctcacaaagcacaatattaaaaaaatcaacagaaactttcctgtaaaccagcagattgtctacatgggctggtgtgaagcccgggagcaagaccccctccaggacagagtgtactccccgaccttcctggccctgaggggctcatgtctctacaagtttctggcacctccagtgaccacctgggactggacgagagcagagaaaacattctcagtttatgagattatgtgcaagatcctcaagcctgtgtaactccaggttttcaccaggacagtgacctgctggaccgacggaaacagtgcttcaccgtgcagtctgagtctggggaggacctgtacttctcagtggagctggaaagtgacctcgcccagtgggaaagagccttccagacagcaacctttctagaagtagaacggatacagtgcaagacctatgcatgtgtgctagaaagtcatctaatgggactcacaattgatttcagcacaggatttatctgctttgatgctgcaacaaaggctgtcctttggaggtataaattctctcagcttaaaggttcttcagatgatggcaagagcaaaatcaaatttttgtttcagaatccagatactaaacagattgaagcaaaggagttggaattttctaatttatttgctgttcttcactgcattcattccttctttgctgccaaggtagcttgtttggaccctctatttttaggcaatcaagctactgcttctactgctgccagctctgctaccacgagcaaagcaaagtatacaacttgacatactgaactcttcattgacacaccccatga

SEQ ID NO: 188564 - DNA, 1925 bp, Homo sapiens
  Payload ID: 17098
  Gene Symbol: SNTG1
  Gene Name: syntrophin, gamma 1
  Uniprot ID: Q9NSN8
  ENST ID: ENST00000518864
  CDS Start-End: 372-1925
cccttccagccggagctcgcgagccgcggtggcggctggtggccaccccagggaaataaagccgttgctgctgcagcaaaatggctcaaagtccaaccaaagtctggccttttcctgagcctaggctgtgggcgactcgctagcactgccctgggcctccaagctgcctgctcgctgagctcagcgctgacactcacaggagctgcgttcgccggatcctctgagaggctctgcaacgatcccgatccaattcagcagcgttttaaaagactgctctccagaatgttgagattgcccgagaagtgaccccagcaaaagaaaaatattgctgtacctaaattcaaacgacatcctttgtggtgccacagcacatggatttcagaaccgcctgtgaggagacaaagacaggaatttgtttgctgcaggatggtaaccaggagcctttcaaagtgcggctgcacctagccaaagacattttgatgatccaggaacaggatgtgatatgtgtgtctggtgagcctttctattctggtgaaagaacggtgaccatcagaagacaaacagtaggaggatttggattaagcataaagggaggagcagaacataacattccagttgtcgtttcaaaaatctccaaggaacaaagagcggaactttcaggactactttttattggagatgcaattctacagataaatggcattaatgtgagaaaatgtagacatgaagaagtggttcaggttcttcggaatgctggagaagaagtgactctaacagtgtcatttttaaaaagagcacctgctttcctcaaactcccattgaatgaagattgtgcatgtgctccaagtgaccagagcagtggcacctcctctcctctctgtgacagtggcttacatctcaactaccatcccaacaatacagacacattatcatgctcgtcgtggccgacgtctccaggcttgaggtgggagaagcgatggtgcgacctcagactgatccctctacttcattcgcgcttctctcagtatgtgcccggcacagatttgagtcggcagaatgcctttcaagtcattgctgtggatggggtctgcactgggattattcagtgcctctctgctgaagactgcgttgactggctacaagcaatagcaactaacatttcaaatctcacaaagcacaatattaaaaaaatcaacagaaactttcctgtaaaccagcagattgtctacatgggctggtgtgaagcccgggagcaagaccccctccaggacagagtgtactccccgaccttcctggccctgaggggctcatgtctctacaagtttctggcacctccagtgaccacctgggactggacgagagcagagaaaacattctcagtttatgagattatgtgcaagatcctcaaggacagtgacctgctggaccgacggaaacagtgcttcaccgtgcagtctgagtctggggaggacctgtacttctcagtggagctggaaagtgacctcgcccagtgggaaagagccttccagacagcaacctttctagaagtagaacggatacagtgcaagacctatgcatgtgtgctagaaagtcatctaatgggactcacaattgatttcagcacaggatttatctgctttgatgctgcaacaaaggctgtcctttggaggtataaattctctcagcttaaaggttcttcagatgatggcaagagcaaaatcaaatttttgtttcagaatccagatactaaacagattgaagcaaaggagttggaattttctaatttatttgctgttcttcactgcattcattccttctttgctgccaaggtagcttgtttggaccctctatttttaggcaatcaagctactgcttctactgctgccagctctgctaccacgagcaaagcaaagtatacaacttga

SEQ ID NO: 188565 - DNA, 548 bp, Homo sapiens
  Payload ID: 17098
  Gene Symbol: SNTG1
  Gene Name: syntrophin, gamma 1
  ENST ID: ENST00000523085
  CDS Start-End: 272-548
aaatagctttgtgaaaagagggtggagagctactcaaaattctacgttagagagactgaaaagacatctaatttcattgctcggcagtgaacactggacacgttggtgggagttgttctgtgctgagagcatagcaatgaatacagagacagcagacctgccttcacagactgctctccagaatgttgagattgcccgagaagtgaccccagcaaaagaaaaatattgctgtacctaaattcaaacgacatcctttgtggtgccacagcacatggatttcagaaccgcctgtgaggagacaaagacaggaatttgtttgctgcaggatggtaaccaggagcctttcaaagtgcggctgcacctagccaaagacattttgatgatccaggaacaggatgtgatatgtgtgtctggtgagcctttctattctggtgaaagaacggtgaccatcagaagacaaacagtaggaggatttggattaagcataaagggaggagcagaacataacattccagttgtcgtttcaaaaatctccaaggaacaaagag

SEQ ID NO: 188566 - DNA, 3504 bp, Homo sapiens
  Payload ID: 17098
  Gene Symbol: SNTG1
  Gene Name: syntrophin, gamma 1
  Uniprot ID: Q9NSN8
  ENST ID: ENST00000522124
  CDS Start-End: 662-2215
ttaggggctcccgtccccttacttcagcaccagaggggatggacagcgtctccggactgagctgcagccacagggacggaactacgctgccgccgccgctgtccttgccgccactgtcgtcgccacgggcagctgggctacttgctcctcgcagctaaaaggcggtgcctcctattaccccctcgcctcccggcccccttccttaatggatgaaaagtacccctccctctacacctgctgtacctaaggacaggactctgaggagtactcttgctccacagattaaactctcagcagcaacttcaagaatcatttttctataggggtctgggaggaattctggaggagagtaaagtcgaagttcttagaagctctgagaaatcatgggccgtgcggtaggggttgaaatgctcaaaggtccacacttcttgaaataaacagaatggtcttgagtggattgcaactgttttggaaatagctttgtgaaaagagggtggagagctactcaaaattctacgttagagagactgaaaagacatctaatttcattgctcggcagactgctctccagaatgttgagattgcccgagaagtgaccccagcaaaagaaaaatattgctgtacctaaattcaaacgacatcctttgtggtgccacagcacatggatttcagaaccgcctgtgaggagacaaagacaggaatttgtttgctgcaggatggtaaccaggagcctttcaaagtgcggctgcacctagccaaagacattttgatgatccaggaacaggatgtgatatgtgtgtctggtgagcctttctattctggtgaaagaacggtgaccatcagaagacaaacagtaggaggatttggattaagcataaagggaggagcagaacataacattccagttgtcgtttcaaaaatctccaaggaacaaagagcggaactttcaggactactttttattggagatgcaattctacagataaatggcattaatgtgagaaaatgtagacatgaagaagtggttcaggttcttcggaatgctggagaagaagtgactctaacagtgtcatttttaaaaagagcacctgctttcctcaaactcccattgaatgaagattgtgcatgtgctccaagtgaccagagcagtggcacctcctctcctctctgtgacagtggcttacatctcaactaccatcccaacaatacagacacattatcatgctcgtcgtggccgacgtctccaggcttgaggtgggagaagcgatggtgcgacctcagactgatccctctacttcattcgcgcttctctcagtatgtgcccggcacagatttgagtcggcagaatgcctttcaagtcattgctgtggatggggtctgcactgggattattcagtgcctctctgctgaagactgcgttgactggctacaagcaatagcaactaacatttcaaatctcacaaagcacaatattaaaaaaatcaacagaaactttcctgtaaaccagcagattgtctacatgggctggtgtgaagcccgggagcaagaccccctccaggacagagtgtactccccgaccttcctggccctgaggggctcatgtctctacaagtttctggcacctccagtgaccacctgggactggacgagagcagagaaaacattctcagtttatgagattatgtgcaagatcctcaaggacagtgacctgctggaccgacggaaacagtgcttcaccgtgcagtctgagtctggggaggacctgtacttctcagtggagctggaaagtgacctcgcccagtgggaaagagccttccagacagcaacctttctagaagtagaacggatacagtgcaagacctatgcatgtgtgctagaaagtcatctaatgggactcacaattgatttcagcacaggatttatctgctttgatgctgcaacaaaggctgtcctttggaggtataaattctctcagcttaaaggttcttcagatgatggcaagagcaaaatcaaatttttgtttcagaatccagatactaaacagattgaagcaaaggagttggaattttctaatttatttgctgttcttcactgcattcattccttctttgctgccaaggtagcttgtttggaccctctatttttaggcaatcaagctactgcttctactgctgccagctctgctaccacgagcaaagcaaagtatacaacttgacatactgaactcttcattgacacaccccatgactgtataagcaggacacatttactcatcattttagaccctagagaaaccataacatcaccaagtcgacagtggaggcaaatcaaaatttcggcagaaaaagaaggtcatgtggaacctcaaaaacacttctattctggatgacatctgtgaaatatactacatgaacagaacagcttgttctcactcagttgctttgtaccagtaagtgtattgctttcaccaaaagtggagacaaaagaataaattatttgaagaagtatgtaaataacataaaaatagtaagctacctatgaataaaaatacttattaaatgattacttctgtattttagattattttgtatgactagtacatgttgggcagagtcataggaaaacaaatgccctatcttgtattatgagggacataaaagagttaaaaaccataaatcagcaaggagcatgcaaaaaaatctcatcaaagaaggatgcactttaatttgctgatgtaaatttgcccttgtgttctcatcccatgatttgacactggcattccaattgtttttatcttattgtaaatattccgaagaacttccaaaggataattacattgacccatgatagatacaatgtgaaatggactattctcccttggatcactgttattgaaatgtcttattagctgccaaagtcaatcaaatatgccaacagtgtattaatttaattatgagtgatggaaaatttcatgaacctctcatttcttccttggtttgaaagagatttgtattttacctaataagatttattatcaaattaaagtttcataaattttcagtgaacccaaaaccttttgtagagaaaataatataaacaaatatggtgtgagaaacaattctttgtaatccgaagtctactagttaatcatgaactaaaatgtcccccgaaaacagtcccaaagctattatagatgttaattaaatgacattttttcattttagtactattttatgagaaacaaaggtgatatttaaagataaaagttaaaattctttaacctcccttgtcatggaaagtgattaagtaatgccaactatgcaggttgttttaggtattttgtcctaagaatgtaaatgtgaaaggctgggaaatttgaaagccttagaggtgtgcaatttactcagattccaggtattattcaactagttgtataacatggaacacagtctctgtccttcagtacagcttttttgagatattttaaaaagtcagctgtgtatg

SEQ ID NO: 188567 - DNA, 804 bp, Homo sapiens
  Payload ID: 17098
  Gene Symbol: SNTG1
  Gene Name: syntrophin, gamma 1
  ENST ID: ENST00000524004
  CDS Start-End: 1-361
gcagaatgcctttcaagtcattgctgtggatggggtctgcactgggattattcagtgcctctctgctgaagactgcgttgactggctacaagcaatagcaactaacatttcaaatctcacaaagcacaatattaaaaaaatcaacagaaactttcctgtaaaccagcagattgtctacatgggctggtgtgaagcccgggagcaagaccccctccaggacagagtgtactccccgaccttcctggccctgaggggctcatgtctctacaagtttctggcacctccagtgaccacctgggactggacgagagcagagaaaacattctcagtttatgagattatgtgcaagatcctcaagtgacctgctggaccgacggaaacagtgcttcaccgtgcagtctgagtctggggaggacctgtacttctcagtggagctggaaagtgacctcgcccagtgggaaagagccttccagacagcaacctttctagaagtagaacggatacagtgcaagacctatgcatgtgtgctagaaagtcatctaatgggactcacaattgatttcagcacaggatttatctgctttgatgctgcaacaaaggtaatgtgttcaggtcagctctgagaaatatgctgcaaacattctaattgaagaatgatttaaatgcctcataactcctttcagcattttaattgtaatcgtgtcaaatttaagatcttcgtttttgttaatggaagataaattatgcttcgatctgaaaaaaagtttgaatttttaataaaacatatgtagtaccacaaaacta

SEQ ID NO: 188568 - DNA, 1703 bp, Homo sapiens
  Payload ID: 17098
  Gene Symbol: SNTG1
  Gene Name: syntrophin, gamma 1
  Uniprot ID: Q9NSN8
  ENST ID: ENST00000517473
  CDS Start-End: 223-1665
ttagaagctctgagaaatcatgggccgtgcggtaggggttgaaatgctcaaaggtccacacttcttgaaataaacagaatggtcttgagtggattgcaactgttttggaaatagctttgtgaaaagagggtggagagctactcaaaattctacgttagagagactgaaaagacatctaatttcattgctcggcagacgacatcctttgtggtgccacagcacatggatttcagaaccgcctgtgaggagacaaagacaggaatttgtttgctgcaggatggtaaccaggagcctttcaaagtgcggctgcacctagccaaagacattttgatgatccaggaacaggatgtgatatgtgtgtctggtgagcctttctattctggtgaaagaacggtgaccatcagaagacaaacagtaggaggatttggattaagcataaagggaggagcagaacataacattccagttgtcgtttcaaaaatctccaaggaacaaagagcggaactttcaggactactttttattggagatgcaattctacagataaatggcattaatgtgagaaaatgtagacatgaagaagtggttcaggttcttcggaatgctggagaagaagtgactctaacagtgtcatttttaaaaagagcacctgctttcctcaaactcccattgaatgaagattgtgcatgtgctccaagtgaccagagcagtggcacctcctctcctctctgtgacagtggcttacatctcaactaccatcccaacaatacagacacattatcatgctcgtcgtggccgacgtctccaggcttgaggtgggagaagcgatggtgcgacctcagactgatccctctacttcattcgcgcttctctcagtatgtgcccggcacagatttgagtcggcagaatgcctttcaagtcattgctgtggatggggtctgcactgggattattcagtgcctctctgctgaagactgcgttgactggctacaagcaatagcaactaacatttcaaatctcacaaagcacaatattaaaaaaatcaacagaaactttcctgtaaaccagcagattgtctacatgggctggtgtgaagcccgggagcaagaccccctccaggacagagtgtactccccgaccttcctggccctgaggggctcatgtctctacaagtttctggcacctccagtgaccacctgggactggacgagagcagagaaaacattctcagtttatgagattatgtgcaagatcctcaaggacagtgacctgctggaccgacggaaacagtgcttcaccgtgcagtctgagtctggggaggacctgtacttctcagtggagctggaaagtgacctcgcccagtgggaaagagccttccagacagcaacctttctagaagtagaacggatacagtgcaagacctatgcatgtgtgctagaaagtcatctaatgggactcacaattgatttcagcacaggatttatctgctttgatgctgcaacaaaggagttggaattttctaatttatttgctgttcttcactgcattcattccttctttgctgccaaggtagcttgtttggaccctctatttttaggcaatcaagctactgcttctactgctgccagctctgctaccacgagcaaagcaaagtatacaacttgacatactgaactcttcattgacacaccccatgactgtat

SEQ ID NO: 188569 - DNA, 2884 bp, Homo sapiens
  Payload ID: 17098
  Gene Symbol: SNTG1
  Gene Name: syntrophin, gamma 1
  Uniprot ID: Q9NSN8
  ENST ID: ENST00000620202
  CDS Start-End: 42-1595
ctgtgtcttttcagacgacatcctttgtggtgccacagcacatggatttcagaaccgcctgtgaggagacaaagacaggaatttgtttgctgcaggatggtaaccaggagcctttcaaagtgcggctgcacctagccaaagacattttgatgatccaggaacaggatgtgatatgtgtgtctggtgagcctttctattctggtgaaagaacggtgaccatcagaagacaaacagtaggaggatttggattaagcataaagggaggagcagaacataacattccagttgtcgtttcaaaaatctccaaggaacaaagagcggaactttcaggactactttttattggagatgcaattctacagataaatggcattaatgtgagaaaatgtagacatgaagaagtggttcaggttcttcggaatgctggagaagaagtgactctaacagtgtcatttttaaaaagagcacctgctttcctcaaactcccattgaatgaagattgtgcatgtgctccaagtgaccagagcagtggcacctcctctcctctctgtgacagtggcttacatctcaactaccatcccaacaatacagacacattatcatgctcgtcgtggccgacgtctccaggcttgaggtgggagaagcgatggtgcgacctcagactgatccctctacttcattcgcgcttctctcagtatgtgcccggcacagatttgagtcggcagaatgcctttcaagtcattgctgtggatggggtctgcactgggattattcagtgcctctctgctgaagactgcgttgactggctacaagcaatagcaactaacatttcaaatctcacaaagcacaatattaaaaaaatcaacagaaactttcctgtaaaccagcagattgtctacatgggctggtgtgaagcccgggagcaagaccccctccaggacagagtgtactccccgaccttcctggccctgaggggctcatgtctctacaagtttctggcacctccagtgaccacctgggactggacgagagcagagaaaacattctcagtttatgagattatgtgcaagatcctcaaggacagtgacctgctggaccgacggaaacagtgcttcaccgtgcagtctgagtctggggaggacctgtacttctcagtggagctggaaagtgacctcgcccagtgggaaagagccttccagacagcaacctttctagaagtagaacggatacagtgcaagacctatgcatgtgtgctagaaagtcatctaatgggactcacaattgatttcagcacaggatttatctgctttgatgctgcaacaaaggctgtcctttggaggtataaattctctcagcttaaaggttcttcagatgatggcaagagcaaaatcaaatttttgtttcagaatccagatactaaacagattgaagcaaaggagttggaattttctaatttatttgctgttcttcactgcattcattccttctttgctgccaaggtagcttgtttggaccctctatttttaggcaatcaagctactgcttctactgctgccagctctgctaccacgagcaaagcaaagtatacaacttgacatactgaactcttcattgacacaccccatgactgtataagcaggacacatttactcatcattttagaccctagagaaaccataacatcaccaagtcgacagtggaggcaaatcaaaatttcggcagaaaaagaaggtcatgtggaacctcaaaaacacttctattctggatgacatctgtgaaatatactacatgaacagaacagcttgttctcactcagttgctttgtaccagtaagtgtattgctttcaccaaaagtggagacaaaagaataaattatttgaagaagtatgtaaataacataaaaatagtaagctacctatgaataaaaatacttattaaatgattacttctgtattttagattattttgtatgactagtacatgttgggcagagtcataggaaaacaaatgccctatcttgtattatgagggacataaaagagttaaaaaccataaatcagcaaggagcatgcaaaaaaatctcatcaaagaaggatgcactttaatttgctgatgtaaatttgcccttgtgttctcatcccatgatttgacactggcattccaattgtttttatcttattgtaaatattccgaagaacttccaaaggataattacattgacccatgatagatacaatgtgaaatggactattctcccttggatcactgttattgaaatgtcttattagctgccaaagtcaatcaaatatgccaacagtgtattaatttaattatgagtgatggaaaatttcatgaacctctcatttcttccttggtttgaaagagatttgtattttacctaataagatttattatcaaattaaagtttcataaattttcagtgaacccaaaaccttttgtagagaaaataatataaacaaatatggtgtgagaaacaattctttgtaatccgaagtctactagttaatcatgaactaaaatgtcccccgaaaacagtcccaaagctattatagatgttaattaaatgacattttttcattttagtactattttatgagaaacaaaggtgatatttaaagataaaagttaaaattctttaacctcccttgtcatggaaagtgattaagtaatgccaactatgcaggttgttttaggtattttgtcctaagaatgtaaatgtgaaaggctgggaaatttgaaagccttagaggtgtgcaatttactcagattccaggtattattcaactagttgtataacatggaacacagtctctgtccttcagtacagcttttttgagatattttaaaaagtcagctgtgtatg

SEQ ID NO: 188570 - DNA, 1888 bp, Homo sapiens
  Payload ID: 17099
  Gene Symbol: SNTG2
  Gene Name: syntrophin, gamma 2
  Uniprot ID: Q9NY99
  ENST ID: ENST00000308624
  CDS Start-End: 130-1749
gcccgagccggagccggcagaggggcgcgggcgcggacgcggcgcctggcggggccctgggaggctcggacggggtcctggcgttgagctcggccggcccggagcgcggacccagccgcaggggcggcgatgggcaccgagggacccccgcccccggccgcctcccgcggacgccagggctgcctgctggtacctgcgcggacgaaaaccactattgctctgttgtatgatgaagagtccgaaaatgcctatgacatccggctgaagctgacgaaagaggtgctgacaattcagaaacaagatgttgtctgtgtgggcggaagccaccagggcaggaatcgcagaactgttacactccgcagacagccagttggcggcttgggcctgagtataaagggaggttctgagcacaacgtccctgtcgtcatatcaaaaatattcgaagaccaagcagctgaccagacagggatgttgttcgtaggagatgctgttctccaggttaatggcatacatgtagaaaatgcaactcatgaagaagtggtgcatctgctgagaaatgctggcgatgaagttaccatcaccgttgagtatctcagggaagcgccggcatttctgaagctcccgttagggtccccagggccatccagcgaccacagcagtggggcctcctctcccctctttgacagcggtttgcatctgaacggaaactccagtaccacagccccatcgtcaccttcctcgcccatagctaaggacccgaggtatgagaagcgctggctggacaccttgtccgtgcctctgtccatggctcgcatctcaaggtacaaagccggaacggaaaaattaaggtggaatgcgttcgaggtgctcgccctggacggagtcagctctgggatcctccggttttacacagcccaggatggcaccgactggctgcgggcggtctcagccaacatcagggagctgacacttcagaacatgaagatggcgaacaaatgctgctctccttccgaccaggttgtgcatatggggtgggtaaatgagaaactccaaggagctgactcctctcaaaccttcagacccaagttcctagcactgaagggcccgtccttctacgttttcagcactcctccggtgagcacattcgattgggtgcgagcagaaaggacctatcacctctgtgaggtgctatttaaagttcacaagttctggctcacagaggactgctggttgcaagcaaacttgtatctgggtcttcaagattttgactttgaggaccagaggccctattgcttcagcatcgtggccggccatgggaagagccatgttttcaacgtggagcttggcagcgagctggccatgtgggagaagtccttccaaagagccacgttcatggaagttcagagaaccgggtccagaacatacatgtgcagctggcaaggagagatgctgtgtttcacggtggatttcgcgttgggatttacctgttttgagagtaagaccaagaatgtgctctggagatttaaattttcccagcttaagggatcttcagatgatgggaaaactcgagtaaagctgctgtttcagaatctggacaccaaacagattgagacgaaggaactcgagttccaggacctgagggctgtcctgcactgcatccactccttcatagcagccaaggtggcctccgtggaccccggcttcatggacagtcagagtcttgccagaaaatacatgtacagcagctaaaggttgtttctgttgagtgctgaaaaattaaattattttcgtaagaaatgattctttcctgcagaatattgcaactttgtgttgttttatgatgagcctatagttgtgataccaataaaacatgtcactagtttccaaa

SEQ ID NO: 188571 - DNA, 1436 bp, Homo sapiens
  Payload ID: 17099
  Gene Symbol: SNTG2
  Gene Name: syntrophin, gamma 2
  Uniprot ID: Q9NY99
  ENST ID: ENST00000407292
  CDS Start-End: 59-1297
ggggtcctggcgttgagctcggccggcccggagcgcggacccagccgcaggggcggcgatgggcaccgagggacccccgcccccggccgcctcccgcggacgccagggctgcctgctggtacctgcgcggacgaaaaccactattgctctgttgtatgatgaagagtccgaaaatgcctatgacatccggctgaagctgacgaaagaggtgctgacaattcagaaacaagatgttgtctgtgtgggcggaagccaccagggcaggaatgccccatcgtcaccttcctcgcccatagctaaggacccgaggtatgagaagcgctggctggacaccttgtccgtgcctctgtccatggctcgcatctcaaggtacaaagccggaacggaaaaattaaggtggaatgcgttcgaggtgctcgccctggacggagtcagctctgggatcctccggttttacacagcccaggatggcaccgactggctgcgggcggtctcagccaacatcagggagctgacacttcagaacatgaagatggcgaacaaatgctgctctccttccgaccaggttgtgcatatggggtgggtaaatgagaaactccaaggagctgactcctctcaaaccttcagacccaagttcctagcactgaagggcccgtccttctacgttttcagcactcctccggtgagcacattcgattgggtgcgagcagaaaggacctatcacctctgtgaggtgctatttaaagttcacaagttctggctcacagaggactgctggttgcaagcaaacttgtatctgggtcttcaagattttgactttgaggaccagaggccctattgcttcagcatcgtggccggccatgggaagagccatgttttcaacgtggagcttggcagcgagctggccatgtgggagaagtccttccaaagagccacgttcatggaagttcagagaaccgggtccagaacatacatgtgcagctggcaaggagagatgctgtgtttcacggtggatttcgcgttgggatttacctgttttgagagtaagaccaagaatgtgctctggagatttaaattttcccagcttaagggatcttcagatgatgggaaaactcgagtaaagctgctgtttcagaatctggacaccaaacagattgagacgaaggaactcgagttccaggacctgagggctgtcctgcactgcatccactccttcatagcagccaaggtggcctccgtggaccccggcttcatggacagtcagagtcttgccagaaaatacatgtacagcagctaaaggttgtttctgttgagtgctgaaaaattaaattattttcgtaagaaatgattctttcctgcagaatattgcaactttgtgttgttttatgatgagcctatagttgtgataccaataaaacatgtcactagtttccaaa

SEQ ID NO: 188572 - DNA, 666 bp, Homo sapiens
  Payload ID: 17099
  Gene Symbol: SNTG2
  Gene Name: syntrophin, gamma 2
  ENST ID: ENST00000450962
  CDS Start-End: 130-519
gcccgagccggagccggcagaggggcgcgggcgcggacgcggcgcctggcggggccctgggaggctcggacggggtcctggcgttgagctcggccggcccggagcgcggacccagccgcaggggcggcgatgggcaccgagggacccccgcccccggccgcctcccgcggacgccagggctgcctgctggtacctgcgcggacgaaaaccactattgctctgttgtatgatgaagagtccgaaaatgcctatgacatccggctgaagctgacgaaagaggtgctgacaattcagaaacaagatgttgtctgtgtgggcggaagccaccagggcaggaatcgcagaactgttacactccgcagacagccagttggcggcttgggcctgagtataaagggaggttctgagcacaacgtccctgtcgtcatatcaaaaatattcgaagaccaagcagatggagtcttgctctgtcgcccaggctggagtgcagtgctgaccagacagggatgttgttcgtaggagatgctgttctccaggttaatggcatacatgtagaaaatgcaactcatgaagaagtggtgcatctgctgagaaatgctggcgatgaagttaccatcaccgttgagtatctcagggaagcgccggcatttctgaagctcccgttag

SEQ ID NO: 188573 - DNA, 1818 bp, Homo sapiens
  Payload ID: 17099
  Gene Symbol: SNTG2
  Gene Name: syntrophin, gamma 2
  ENST ID: ENST00000452177
  CDS Start-End: 130-519
gcccgagccggagccggcagaggggcgcgggcgcggacgcggcgcctggcggggccctgggaggctcggacggggtcctggcgttgagctcggccggcccggagcgcggacccagccgcaggggcggcgatgggcaccgagggacccccgcccccggccgcctcccgcggacgccagggctgcctgctggtacctgcgcggacgaaaaccactattgctctgttgtatgatgaagagtccgaaaatgcctatgacatccggctgaagctgacgaaagaggtgctgacaattcagaaacaagatgttgtctgtgtgggcggaagccaccagggcaggaatcgcagaactgttacactccgcagacagccagttggcggcttgggcctgagtataaagggaggttctgagcacaacgtccctgtcgtcatatcaaaaatattcgaagaccaagcagatggagtcttgctctgtcgcccaggctggagtgcagtgctgaccagacagggatgttgttcgtaggagatgctgttctccaggttaatggcatacatgtagaaaatgcaactcatgaagaagtgctgcgttgacccgaggctgctgtgtgtagaatcatgtgttgtgctcttctctgctcccctggaagcctccgtcaacaggtcgagtttgcgactccacggagaaactgcactgatgtcaccaacttcgtgtcctgggctactcaccagcccatttcggactggactttgtgtccccccagattcacatgtcgaagccctaacccctaaatgagggcgtcaggagacagagacggggcctctggaagtgactagggtgagaggaggtgatgaagatggcatcctggtgatgggatcagtgcctgcaagaagaagccctctggagcgcacttcctctctccaccacgcaaggacacagccagaaggccaggccctcaccaggaaggatctggcaccttgctcgcacctgatcacagactcccagcctctggaattccgaggaaggaacctctgctgctgagaagccacccaggcatggctaagctgactcaaacaccgcagtgaatccaatggcttcagagtcattttacaggtgttgggagatttcatttcatagttgactcctttctaaggaagaaatggacttggcttacctgtcagagtttgacatgctggtgaattggaggttggaacgcatcctcctaccttgactttgtcggcgcagagcaggtgtgcactgtaatgggagctgcaggtggaaatggggagaggccaggcatggtggctcacgcttgtaatcccagcactacggggccaaggcgggaggatcacttgagtccagaaggccaagtctgcagtgagctatgattgcaccactgccttccagcctggatgacagtcaaaaaaaaagagagcgcatctagacttttagtgtctcaatcaaatttaaacaatggcaaatacattgtgcacaaaaaagctgcttttagatgctgtgttgagagagagagagatagagagagagacagaaaaggggaaagcctccaggccatggctactggtgttaatttgctgcaaaaagcagtgactgctgctgtgggctgaaggaggctgccccctaggcaggtgtgggccagggtctctcccagtgccgtcaggcttagggccatgattccaggagggagaaatctttgaaggcattggttgaattcagtagcatcaatggtcaacattcaattattttgttcatacaccacatatatgcttcaaactaaataaaaaataagactgataacaaattgaa

SEQ ID NO: 188574 - DNA, 382 bp, Homo sapiens
  Payload ID: 17099
  Gene Symbol: SNTG2
  Gene Name: syntrophin, gamma 2
  ENST ID: ENST00000627321
  CDS Start-End: 1-243
aatgtgctctggagatttaaattttcccagcttaagggatcttcagatgatgggaaaactcgagtaaagctgctgtttcagaatctggacaccaaacagattgagatgaaggaactcgagttccaggacctgagggctgtcctgcactgcatccactccttcatagcagccaaggtggcctccgtggaccccggcttcatggacagtcagagtcttgccagaaaatacatgtacagcagctaaaggttgtttctgttgagtgctgaaaaattaaattattttcgtaagaaatgattctttcctgcagaatattgcaactttgtgttgttttatgatgagcctatagttgtgataccaataaaacatgtcactagtttccaaa

SEQ ID NO: 188575 - DNA, 693 bp, Homo sapiens
  Payload ID: 17099
  Gene Symbol: SNTG2
  Gene Name: syntrophin, gamma 2
  ENST ID: ENST00000627224
  CDS Start-End: 1-693
gccccatcgtcaccttcctcgcccatagctaaggacccgaggtatgagaagcgctggctggacaccttgtccgtgcctctgtccatggctcgcatctcaaggtacaaagccggaacggaaaaattaaggtggaatgcgttcgaggtgctcgccctggacggagtcagctctgggatcctccggttttacacagcccaggatggcaccgactggctgcgggcggtctcagccaacatcagggagctgacacttcagaacatgaagatggcgaacaaatgctgctctccttccgaccaggttgtgcatatggggtgggtaaatgagaaactccaaggagctgactcctctcaaaccttcagacccaagttcctagcactgaagggcccgtccttctacgttttcagcactcctccggtgagcacattcgattgggtgcgagcagaaaggacctatcacctctgtgaggtgctatttaaagttcacaagttctggctcacagaggactgctggttgcaagcaaacttgtatctgggtcttcaagattttgactttgaggaccagaggccctattgcttcagcatcgtggccggccatgggaagagccatgttttcaacgtggagcttggcagcgagctggccatgtgggagaagtccttccaaagagccacgttcatggaagttcagagaaccggg

SEQ ID NO: 188576 - DNA, 382 bp, Homo sapiens; identical to SEQ ID NO: 188574
  Payload ID: 17099
  Gene Symbol: SNTG2
  Gene Name: syntrophin, gamma 2
  ENST ID: ENST00000625507
  CDS Start-End: 1-243

SEQ ID NO: 188577 - DNA, 3041 bp, Homo sapiens
  Payload ID: 17100
  Gene Symbol: SNCA
  Gene Name: synuclein, alpha (non A4 component of amyloid precursor)
  Uniprot ID: P37840
  ENST ID: ENST00000336904
  CDS Start-End: 90-512
gggaggagcttgcttctccattctggtgtgatccaggaacagctgtcttccagctctgaaagagtgtggtgtaaaggaattcattagccatggatgtattcatgaaaggactttcaaaggccaaggagggagttgtggctgctgctgagaaaaccaaacagggtgtggcagaagcagcaggaaagacaaaagagggtgttctctatgtaggctccaaaaccaaggagggagtggtgcatggtgtggcaacagtggctgagaagaccaaagagcaagtgacaaatgttggaggagcagtggtgacgggtgtgacagcagtagcccagaagacagtggagggagcagggagcattgcagcagccactggctttgtcaaaaaggaccagttgggcaagaatgaagaaggagccccacaggaaggaattctggaagatatgcctgtggatcctgacaatgaggcttatgaaatgccttctgaggaagggtatcaagactacgaacctgaagcctaagaaatatctttgctcccagtttcttgagatctgctgacagatgttccatcctgtacaagtgctcagttccaatgtgcccagtcatgacatttctcaaagtttttacagtgtatctcgaagtcttccatcagcagtgattgaagtatctgtacctgcccccactcagcatttcggtgcttccctttcactgaagtgaatacatggtagcagggtctttgtgtgctgtggattttgtggcttcaatctacgatgttaaaacaaattaaaaacacctaagtgactaccacttatttctaaatcctcactatttttttgttgctgttgttcagaagttgttagtgatttgctatcatatattataagatttttaggtgtcttttaatgatactgtctaagaataatgacgtattgtgaaatttgttaatatatataatacttaaaaatatgtgagcatgaaactatgcacctataaatactaaatatgaaattttaccattttgcgatgtgttttattcacttgtgtttgtatataaatggtgagaattaaaataaaacgttatctcattgcaaaaatattttatttttatcccatctcactttaataataaaaatcatgcttataagcaacatgaattaagaactgacacaaaggacaaaaatataaagttattaatagccatttgaagaaggaggaattttagaagaggtagagaaaatggaacattaaccctacactcggaattccctgaagcaacactgccagaagtgtgttttggtatgcactggttccttaagtggctgtgattaattattgaaagtggggtgttgaagaccccaactactattgtagagtggtctatttctcccttcaatcctgtcaatgtttgctttacgtattttggggaactgttgtttgatgtgtatgtgtttataattgttatacatttttaattgagccttttattaacatatattgttatttttgtctcgaaataattttttagttaaaatctattttgtctgatattggtgtgaatgctgtacctttctgacaataaataatattcgaccatgaataaaaaaaaaaaaaaagtgggttcccgggaactaagcagtgtagaagatgattttgactacaccctccttagagagccataagacacattagcacatattagcacattcaaggctctgagagaatgtggttaactttgtttaactcagcattcctcactttttttttttaatcatcagaaattctctctctctctctctctttttctctcgctctctttttttttttttttttacaggaaatgcctttaaacatcgttggaactaccagagtcaccttaaaggagatcaattctctagactgataaaaatttcatggcctcctttaaatgttgccaaatatatgaattctaggatttttccttaggaaaggtttttctctttcagggaagatctattaactccccatgggtgctgaaaataaacttgatggtgaaaaactctgtataaattaatttaaaaattatttggtttctctttttaattattctggggcatagtcatttctaaaagtcactagtagaaagtataatttcaagacagaatattctagacatgctagcagtttatatgtattcatgagtaatgtgatatatattgggcgctggtgaggaaggaaggaggaatgagtgactataaggatggttaccatagaaacttccttttttacctaattgaagagagactactacagagtgctaagctgcatgtgtcatcttacactagagagaaatggtaagtttcttgttttatttaagttatgtttaagcaaggaaaggatttgttattgaacagtatatttcaggaaggttagaaagtggcggttaggatatattttaaatctacctaaagcagcatattttaaaaatttaaaagtattggtattaaattaagaaatagaggacagaactagactgatagcagtgacctagaacaatttgagattaggaaagttgtgaccatgaatttaaggatttatgtggatacaaattctcctttaaagtgtttcttcccttaatatttatctgacggtaatttttgagcagtgaattactttatatatcttaatagtttatttgggaccaaacacttaaacaaaaagttctttaagtcatataagccttttcaggaagcttgtctcatattcactcccgagacattcacctgccaagtggcctgaggatcaatccagtcctaggtttattttgcagacttacattctcccaagttattcagcctcatatgactccacggtcggctttaccaaaacagttcagagtgcactttggcacacaattgggaacagaacaatctaatgtgtggtttggtattccaagtggggtctttttcagaatctctgcactagtgtgagatgcaaacatgtttcctcatctttctggcttatccagtatgtagctatttgtgacataataaatatatacatatatgaaaata

SEQ ID NO: 188578 - DNA, 1096 bp, Homo sapiens
  Payload ID: 17100
  Gene Symbol: SNCA
  Gene Name: synuclein, alpha (non A4 component of amyloid precursor)
  Uniprot ID: P37840
  ENST ID: ENST00000345009
  CDS Start-End: 14-352
gaattcattagccatggatgtattcatgaaaggactttcaaaggccaaggagggagttgtggctgctgctgagaaaaccaaacagggtgtggcagaagcagcaggaaagacaaaagagggtgttctctatgtaggctccaaaaccaaggagggagtggtgcatggtgtggcaacagtggctgagaagaccaaagagcaagtgacaaatgttggaggagcagtggtgacgggtgtgacagcagtagcccagaagacagtggagggagcagggagcattgcagcagccactggctttgtcaaaaaggaccagttgggcaaggaagggtatcaagactacgaacctgaagcctaagaaatatctttgctcccagtttcttgagatctgctgacagatgttccatcctgtacaagtgctcagttccaatgtgcccagtcatgacatttctcaaagtttttacagtgtatctcgaagtcttccatcagcagtgattgaagtatctgtacctgcccccactcagcatttcggtgcttccctttcactgaagtgaatacatggtagcagggtctttgtgtgctgtggattttgtggcttcaatctacgatgttaaaacaaattaaaaacacctaagtgactaccacttatttctaaatcctcactatttttttgttgctgttgttcagaagttgttagtgatttgctatcatatattataagatttttaggtgtcttttaatgatactgtctaagaataatgacgtattgtgaaatttgttaatatatataatacttaaaaatatgtgagcatgaaactatgcacctataaatactaaatatgaaattttaccattttgcgatgtgttttattcacttgtgtttgtatataaatggtgagaattaaaataaaacgttatctcattgcaaaaatattttatttttatcccatctcactttaataataaaaatcatgcttataagcaacatgaattaagaactgacacaaaggacaaaaatataaagttattaatagccatttgaagaaggaggaattttagaagaggtagagaaaatggaacattaaccctacactcggaattc

SEQ ID NO: 188579 - DNA, 1420 bp, Homo sapiens
  Payload ID: 17100
  Gene Symbol: SNCA
  Gene Name: synuclein, alpha (non A4 component of amyloid precursor)
  Uniprot ID: P37840
  ENST ID: ENST00000394986
  CDS Start-End: 423-845
agagagggggcgagcgaccgagcgccgcgacgcggaagtgaggtgcgtgcgggctgcagcgcagaccccggcccggcccctccgagagcgtcctgggcgctccctcacgccttgccttcaagccttctgcctttccaccctcgtgagcggagaactgggagtggccattcgacgacaggttagcgggtttgcctcccactcccccagcctcgcgtcgccggctcacagcggcctcctctggggacagtcccccccgggtgccgcctccgcccttcctgtgcgctccttttccttcttctttcctattaaatattatttgggaattgtttaaattttttttttaaaaaaagagagaggcggggaggagtcggagttgtggagaagcagagggactcagtgtggtgtaaaggaattcattagccatggatgtattcatgaaaggactttcaaaggccaaggagggagttgtggctgctgctgagaaaaccaaacagggtgtggcagaagcagcaggaaagacaaaagagggtgttctctatgtaggctccaaaaccaaggagggagtggtgcatggtgtggcaacagtggctgagaagaccaaagagcaagtgacaaatgttggaggagcagtggtgacgggtgtgacagcagtagcccagaagacagtggagggagcagggagcattgcagcagccactggctttgtcaaaaaggaccagttgggcaagaatgaagaaggagccccacaggaaggaattctggaagatatgcctgtggatcctgacaatgaggcttatgaaatgccttctgaggaagggtatcaagactacgaacctgaagcctaagaaatatctttgctcccagtttcttgagatctgctgacagatgttccatcctgtacaagtgctcagttccaatgtgcccagtcatgacatttctcaaagtttttacagtgtatctcgaagtcttccatcagcagtgattgaagtatctgtacctgcccccactcagcatttcggtgcttccctttcactgaagtgaatacatggtagcagggtctttgtgtgctgtggattttgtggcttcaatctacgatgttaaaacaaattaaaaacacctaagtgactaccacttatttctaaatcctcactatttttttgttgctgttgttcagaagttgttagtgatttgctatcatatattataagatttttaggtgtcttttaatgatactgtctaagaataatgacgtattgtgaaatttgttaatatatataatacttaaaaatatgtgagcatgaaactatgcacctataaatactaaatatgaaattttaccattttgcgatgtgttttattcacttgtgtttgtatataaatggtgagaattaaaataaaacgttatctcattgcaaaaata

SEQ ID NO: 188580 - DNA, 3167 bp, Homo sapiens
  Payload ID: 17100
  Gene Symbol: SNCA
  Gene Name: synuclein, alpha (non A4 component of amyloid precursor)
  Uniprot ID: P37840
  ENST ID: ENST00000394989
  CDS Start-End: 264-644
aggagaaggagaaggaggaggactaggaggaggaggacggcgacgaccagaaggggcccaagagagggggcgagcgaccgagcgccgcgacgcggaagtgaggtgcgtgcgggctgcagcgcagaccccggcccggcccctccgagagcgtcctgggcgctccctcacgccttgccttcaagccttctgcctttccaccctcgtgagcggagaactgggagtggccattcgacgacagtgtggtgtaaaggaattcattagccatggatgtattcatgaaaggactttcaaaggccaaggagggagttgtggctgctgctgagaaaaccaaacagggtgtggcagaagcagcaggaaagacaaaagagggtgttctctatgtagtggctgagaagaccaaagagcaagtgacaaatgttggaggagcagtggtgacgggtgtgacagcagtagcccagaagacagtggagggagcagggagcattgcagcagccactggctttgtcaaaaaggaccagttgggcaagaatgaagaaggagccccacaggaaggaattctggaagatatgcctgtggatcctgacaatgaggcttatgaaatgccttctgaggaagggtatcaagactacgaacctgaagcctaagaaatatctttgctcccagtttcttgagatctgctgacagatgttccatcctgtacaagtgctcagttccaatgtgcccagtcatgacatttctcaaagtttttacagtgtatctcgaagtcttccatcagcagtgattgaagtatctgtacctgcccccactcagcatttcggtgcttccctttcactgaagtgaatacatggtagcagggtctttgtgtgctgtggattttgtggcttcaatctacgatgttaaaacaaattaaaaacacctaagtgactaccacttatttctaaatcctcactatttttttgttgctgttgttcagaagttgttagtgatttgctatcatatattataagatttttaggtgtcttttaatgatactgtctaagaataatgacgtattgtgaaatttgttaatatatataatacttaaaaatatgtgagcatgaaactatgcacctataaatactaaatatgaaattttaccattttgcgatgtgttttattcacttgtgtttgtatataaatggtgagaattaaaataaaacgttatctcattgcaaaaatattttatttttatcccatctcactttaataataaaaatcatgcttataagcaacatgaattaagaactgacacaaaggacaaaaatataaagttattaatagccatttgaagaaggaggaattttagaagaggtagagaaaatggaacattaaccctacactcggaattccctgaagcaacactgccagaagtgtgttttggtatgcactggttccttaagtggctgtgattaattattgaaagtggggtgttgaagaccccaactactattgtagagtggtctatttctcccttcaatcctgtcaatgtttgctttacgtattttggggaactgttgtttgatgtgtatgtgtttataattgttatacatttttaattgagccttttattaacatatattgttatttttgtctcgaaataattttttagttaaaatctattttgtctgatattggtgtgaatgctgtacctttctgacaataaataatattcgaccatgaataaaaaaaaaaaaaaagtgggttcccgggaactaagcagtgtagaagatgattttgactacaccctccttagagagccataagacacattagcacatattagcacattcaaggctctgagagaatgtggttaactttgtttaactcagcattcctcactttttttttttaatcatcagaaattctctctctctctctctctttttctctcgctctctttttttttttttttttacaggaaatgcctttaaacatcgttggaactaccagagtcaccttaaaggagatcaattctctagactgataaaaatttcatggcctcctttaaatgttgccaaatatatgaattctaggatttttccttaggaaaggtttttctctttcagggaagatctattaactccccatgggtgctgaaaataaacttgatggtgaaaaactctgtataaattaatttaaaaattatttggtttctctttttaattattctggggcatagtcatttctaaaagtcactagtagaaagtataatttcaagacagaatattctagacatgctagcagtttatatgtattcatgagtaatgtgatatatattgggcgctggtgaggaaggaaggaggaatgagtgactataaggatggttaccatagaaacttccttttttacctaattgaagagagactactacagagtgctaagctgcatgtgtcatcttacactagagagaaatggtaagtttcttgttttatttaagttatgtttaagcaaggaaaggatttgttattgaacagtatatttcaggaaggttagaaagtggcggttaggatatattttaaatctacctaaagcagcatattttaaaaatttaaaagtattggtattaaattaagaaatagaggacagaactagactgatagcagtgacctagaacaatttgagattaggaaagttgtgaccatgaatttaaggatttatgtggatacaaattctcctttaaagtgtttcttcccttaatatttatctgacggtaatttttgagcagtgaattactttatatatcttaatagtttatttgggaccaaacacttaaacaaaaagttctttaagtcatataagccttttcaggaagcttgtctcatattcactcccgagacattcacctgccaagtggcctgaggatcaatccagtcctaggtttattttgcagacttacattctcccaagttattcagcctcatatgactccacggtcggctttaccaaaacagttcagagtgcactttggcacacaattgggaacagaacaatctaatgtgtggtttggtattccaagtggggtctttttcagaatctctgcactagtgtgagatgcaaacatgtttcctcatctttctggcttatccagtatgtagctatttgtgacataataaatatatacatatatg

SEQ ID NO: 188581 - DNA, 1290 bp, Homo sapiens
  Payload ID: 17100
  Gene Symbol: SNCA
  Gene Name: synuclein, alpha (non A4 component of amyloid precursor)
  Uniprot ID: P37840
  ENST ID: ENST00000394991
  CDS Start-End: 293-715
gacaaatcagcggtgggggcggagagccgaggagaaggagaaggaggaggactaggaggaggaggacggcgacgaccagaaggggcccaagagagggggcgagcgaccgagcgccgcgacgcggaagtgaggtgcgtgcgggctgcagcgcagaccccggcccggcccctccgagagcgtcctgggcgctccctcacgccttgccttcaagccttctgcctttccaccctcgtgagcggagaactgggagtggccattcgacgacagtgtggtgtaaaggaattcattagccatggatgtattcatgaaaggactttcaaaggccaaggagggagttgtggctgctgctgagaaaaccaaacagggtgtggcagaagcagcaggaaagacaaaagagggtgttctctatgtaggctccaaaaccaaggagggagtggtgcatggtgtggcaacagtggctgagaagaccaaagagcaagtgacaaatgttggaggagcagtggtgacgggtgtgacagcagtagcccagaagacagtggagggagcagggagcattgcagcagccactggctttgtcaaaaaggaccagttgggcaagaatgaagaaggagccccacaggaaggaattctggaagatatgcctgtggatcctgacaatgaggcttatgaaatgccttctgaggaagggtatcaagactacgaacctgaagcctaagaaatatctttgctcccagtttcttgagatctgctgacagatgttccatcctgtacaagtgctcagttccaatgtgcccagtcatgacatttctcaaagtttttacagtgtatctcgaagtcttccatcagcagtgattgaagtatctgtacctgcccccactcagcatttcggtgcttccctttcactgaagtgaatacatggtagcagggtctttgtgtgctgtggattttgtggcttcaatctacgatgttaaaacaaattaaaaacacctaagtgactaccacttatttctaaatcctcactatttttttgttgctgttgttcagaagttgttagtgatttgctatcatatattataagatttttaggtgtcttttaatgatactgtctaagaataatgacgtattgtgaaatttgttaatatatataatacttaaaaatatgtgagcatgaaactatgcacctataaatactaaatatgaaattttaccattttgcgatgtgttttattcacttgtgtttgtatataaatggtgagaattaaaataaaacgttatctcattgcaaaaata

SEQ ID NO: 188582 - DNA, 3127 bp, Homo sapiens
  Payload ID: 17100
  Gene Symbol: SNCA
  Gene Name: synuclein, alpha (non A4 component of amyloid precursor)
  Uniprot ID: P37840
  ENST ID: ENST00000420646
  CDS Start-End: 260-598
gccattcgacgacaggttagcgggtttgcctcccactcccccagcctcgcgtcgccggctcacagcggcctcctctggggacagtcccccccgggtgccgcctccgcccttcctgtgcgctccttttccttcttctttcctattaaatattatttgggaattgtttaaattttttttttaaaaaaagagagaggcggggaggagtcggagttgtggagaagcagagggactcagtgtggtgtaaaggaattcattagccatggatgtattcatgaaaggactttcaaaggccaaggagggagttgtggctgctgctgagaaaaccaaacagggtgtggcagaagcagcaggaaagacaaaagagggtgttctctatgtaggctccaaaaccaaggagggagtggtgcatggtgtggcaacagtggctgagaagaccaaagagcaagtgacaaatgttggaggagcagtggtgacgggtgtgacagcagtagcccagaagacagtggagggagcagggagcattgcagcagccactggctttgtcaaaaaggaccagttgggcaaggaagggtatcaagactacgaacctgaagcctaagaaatatctttgctcccagtttcttgagatctgctgacagatgttccatcctgtacaagtgctcagttccaatgtgcccagtcatgacatttctcaaagtttttacagtgtatctcgaagtcttccatcagcagtgattgaagtatctgtacctgcccccactcagcatttcggtgcttccctttcactgaagtgaatacatggtagcagggtctttgtgtgctgtggattttgtggcttcaatctacgatgttaaaacaaattaaaaacacctaagtgactaccacttatttctaaatcctcactatttttttgttgctgttgttcagaagttgttagtgatttgctatcatatattataagatttttaggtgtcttttaatgatactgtctaagaataatgacgtattgtgaaatttgttaatatatataatacttaaaaatatgtgagcatgaaactatgcacctataaatactaaatatgaaattttaccattttgcgatgtgttttattcacttgtgtttgtatataaatggtgagaattaaaataaaacgttatctcattgcaaaaatattttatttttatcccatctcactttaataataaaaatcatgcttataagcaacatgaattaagaactgacacaaaggacaaaaatataaagttattaatagccatttgaagaaggaggaattttagaagaggtagagaaaatggaacattaaccctacactcggaattccctgaagcaacactgccagaagtgtgttttggtatgcactggttccttaagtggctgtgattaattattgaaagtggggtgttgaagaccccaactactattgtagagtggtctatttctcccttcaatcctgtcaatgtttgctttacgtattttggggaactgttgtttgatgtgtatgtgtttataattgttatacatttttaattgagccttttattaacatatattgttatttttgtctcgaaataattttttagttaaaatctattttgtctgatattggtgtgaatgctgtacctttctgacaataaataatattcgaccatgaataaaaaaaaaaaaaaagtgggttcccgggaactaagcagtgtagaagatgattttgactacaccctccttagagagccataagacacattagcacatattagcacattcaaggctctgagagaatgtggttaactttgtttaactcagcattcctcactttttttttttaatcatcagaaattctctctctctctctctctttttctctcgctctctttttttttttttttttacaggaaatgcctttaaacatcgttggaactaccagagtcaccttaaaggagatcaattctctagactgataaaaatttcatggcctcctttaaatgttgccaaatatatgaattctaggatttttccttaggaaaggtttttctctttcagggaagatctattaactccccatgggtgctgaaaataaacttgatggtgaaaaactctgtataaattaatttaaaaattatttggtttctctttttaattattctggggcatagtcatttctaaaagtcactagtagaaagtataatttcaagacagaatattctagacatgctagcagtttatatgtattcatgagtaatgtgatatatattgggcgctggtgaggaaggaaggaggaatgagtgactataaggatggttaccatagaaacttccttttttacctaattgaagagagactactacagagtgctaagctgcatgtgtcatcttacactagagagaaatggtaagtttcttgttttatttaagttatgtttaagcaaggaaaggatttgttattgaacagtatatttcaggaaggttagaaagtggcggttaggatatattttaaatctacctaaagcagcatattttaaaaatttaaaagtattggtattaaattaagaaatagaggacagaactagactgatagcagtgacctagaacaatttgagattaggaaagttgtgaccatgaatttaaggatttatgtggatacaaattctcctttaaagtgtttcttcccttaatatttatctgacggtaatttttgagcagtgaattactttatatatcttaatagtttatttgggaccaaacacttaaacaaaaagttctttaagtcatataagccttttcaggaagcttgtctcatattcactcccgagacattcacctgccaagtggcctgaggatcaatccagtcctaggtttattttgcagacttacattctcccaagttattcagcctcatatgactccacggtcggctttaccaaaacagttcagagtgcactttggcacacaattgggaacagaacaatctaatgtgtggtttggtattccaagtggggtctttttcagaatctctgcactagtgtgagatgcaaacatgtttcctcatctttctggcttatccagtatgtagctatttgtgacataataaatatatacatatatgaaaata

SEQ ID NO: 188583 - DNA, 411 bp, Homo sapiens
  Payload ID: 17100
  Gene Symbol: SNCA
  Gene Name: synuclein, alpha (non A4 component of amyloid precursor)
  Uniprot ID: P37840
  ENST ID: ENST00000505199
  CDS Start-End: 19-399
taaaggaattcattagccatggatgtattcatgaaaggactttcaaaggccaaggagggagttgtggctgctgctgagaaaaccaaacagggtgtggcagaagcagcaggaaagacaaaagagggtgttctctatgtagtggctgagaagaccaaagagcaagtgacaaatgttggaggagcagtggtgacgggtgtgacagcagtagcccagaagacagtggagggagcagggagcattgcagcagccactggctttgtcaaaaaggaccagttgggcaagaatgaagaaggagccccacaggaaggaattctggaagatatgcctgtggatcctgacaatgaggcttatgaaatgccttctgaggaagggtatcaagactacgaacctgaagcctaagaaatatctttg

SEQ ID NO: 188584 - DNA, 570 bp, Homo sapiens
  Payload ID: 17100
  Gene Symbol: SNCA
  Gene Name: synuclein, alpha (non A4 component of amyloid precursor)
  Uniprot ID: P37840
  ENST ID: ENST00000506244
  CDS Start-End: 97-519
ggaggacggcgacgaccagaaggggcccaagagagggggcgagcgaccgagcgccgcgacgcggaagtgagtgtggtgtaaaggaattcattagccatggatgtattcatgaaaggactttcaaaggccaaggagggagttgtggctgctgctgagaaaaccaaacagggtgtggcagaagcagcaggaaagacaaaagagggtgttctctatgtaggctccaaaaccaaggagggagtggtgcatggtgtggcaacagtggctgagaagaccaaagagcaagtgacaaatgttggaggagcagtggtgacgggtgtgacagcagtagcccagaagacagtggagggagcagggagcattgcagcagccactggctttgtcaaaaaggaccagttgggcaagaatgaagaaggagccccacaggaaggaattctggaagatatgcctgtggatcctgacaatgaggcttatgaaatgccttctgaggaagggtatcaagactacgaacctgaagcctaagaaatatctttgctcccagtttcttgagatctgctgacagatgttccatcc

SEQ ID NO: 188585 - DNA, 387 bp, Homo sapiens
  Payload ID: 17100
  Gene Symbol: SNCA
  Gene Name: synuclein, alpha (non A4 component of amyloid precursor)
  ENST ID: ENST00000506691
  CDS Start-End: 188-387
gaccccggcccggcccctccgagagcgtcctgggcgctccctcacgccttgccttcaagccttctgcctttccaccctcgtgagcggagaactgggagtggccattcgacgacagagagaggcggggaggagtcggagttgtggagaagcagagggactcagtgtggtgtaaaggaattcattagccatggatgtattcatgaaaggactttcaaaggccaaggagggagttgtggctgctgctgagaaaaccaaacagggtgtggcagaagcagcaggaaagacaaaagagggtgttctctatgtaggctccaaaaccaaggagggagtggtgcatggtgtggcaacagtggctgagaagaccaaagagcaagtgacaaatgttgg

SEQ ID NO: 188586 - DNA, 731 bp, Homo sapiens
  Payload ID: 17100
  Gene Symbol: SNCA
  Gene Name: synuclein, alpha (non A4 component of amyloid precursor)
  ENST ID: ENST00000502987
  CDS Start-End: 29-376
cagtgtggtgtaaaggaattcattagccatggatgtattcatgaaaggactttcaaaggccaaggagggagttgtggctgctgctgagaaaaccaaacagggtgtggcagaagcagcaggaaagacaaaagagggtgttctctatgtaggctccaaaaccaaggagggagtggtgcatggtgtggcaacagtggctgagaagaccaaagagcaagtgacaaatgttggaggagcagtggtgacgggtgtgacagcagtagcccagaagacagtggagggagcagggagcattgcagcagccactggctttgtcaaaaaggaccagttgggcaaggtatggctgtgtacgttttgtgttacatttataagctggtgagattacggttcattttcatgtgaggcctggaggcaggagcaagatacttactgtggggaacggctacctgaccctccccttgtgaaaaagtgctacctttatattggtcttgcttgtttcaggcattaacccagataaatgccatgcaaattttataattattatgattgtttcaatttctggaagaaagttaatgaaacaaaaaatgtagtaaaatgccaaaggaacagtgacatttcagaaagaatgagggctttcatgttaattgtaagtcttggaatttctcttccttggagtaacaaatccctttgtgcctaatttcctaatttccaaaataaagttcttttacttattt

SEQ ID NO: 188587 - DNA, 905 bp, Homo sapiens
  Payload ID: 17100
  Gene Symbol: SNCA
  Gene Name: synuclein, alpha (non A4 component of amyloid precursor)
  Uniprot ID: P37840
  ENST ID: ENST00000508895
  CDS Start-End: 113-535
gatagctgagggcgggggtggatgttggatggattagaaccatcacacttgggcctgctgtttgcctgagtttgaaccacaccccgatgtggtgtaaaggaattcattagccatggatgtattcatgaaaggactttcaaaggccaaggagggagttgtggctgctgctgagaaaaccaaacagggtgtggcagaagcagcaggaaagacaaaagagggtgttctctatgtaggctccaaaaccaaggagggagtggtgcatggtgtggcaacagtggctgagaagaccaaagagcaagtgacaaatgttggaggagcagtggtgacgggtgtgacagcagtagcccagaagacagtggagggagcagggagcattgcagcagccactggctttgtcaaaaaggaccagttgggcaagaatgaagaaggagccccacaggaaggaattctggaagatatgcctgtggatcctgacaatgaggcttatgaaatgccttctgaggaagggtatcaagactacgaacctgaagcctaagaaatatctttgctcccagtttcttgagatctgctgacagatgttccatcctgtacaagtgctcagttccaatgtgcccagtcatgacatttctcaaagtttttacagtgtatctcgaagtcttccatcagcagtgattgaagtatctgtacctgcccccactcagcatttcggtgcttccctttcactgaagtgaatacatggtagcagggtctttgtgtgctgtggattttgtggcttcaatctacgatgttaaaacaaattaaaaacacctaagtgactaccacttatttctaaatcctcactatttttttgttgctgttgttcagaagttgttagtgatttgctatcatatattataagattttta

SEQ ID NO: 188588 - DNA, 297 bp, Homo sapiens
  Payload ID: 17100
  Gene Symbol: SNCA
  Gene Name: synuclein, alpha (non A4 component of amyloid precursor)
  ENST ID: ENST00000611107
  CDS Start-End: 1-297
atggatgtattcatgaaaggactttcaaaggccaaggagggagttgtggctgctgctgagaaaaccaaacagggtgtggcagaagcagcaggaaagacaaaagagggtgttctctatgtagtggctgagaagaccaaagagcaagtgacaaatgttggaggagcagtggtgacgggtgtgacagcagtagcccagaagacagtggagggagcagggagcattgcagcagccactggctttgtcaaaaaggaccagttgggcaaggaagggtatcaagactacgaacctgaagcctaa

SEQ ID NO: 188589 - DNA, 3022 bp, Homo sapiens
  Payload ID: 17100
  Gene Symbol: SNCA
  Gene Name: synuclein, alpha (non A4 component of amyloid precursor)
  Uniprot ID: P37840
  ENST ID: ENST00000618500
  CDS Start-End: 113-493
gatagctgagggcgggggtggatgttggatggattagaaccatcacacttgggcctgctgtttgcctgagtttgaaccacaccccgatgtggtgtaaaggaattcattagccatggatgtattcatgaaaggactttcaaaggccaaggagggagttgtggctgctgctgagaaaaccaaacagggtgtggcagaagcagcaggaaagacaaaagagggtgttctctatgtagtggctgagaagaccaaagagcaagtgacaaatgttggaggagcagtggtgacgggtgtgacagcagtagcccagaagacagtggagggagcagggagcattgcagcagccactggctttgtcaaaaaggaccagttgggcaagaatgaagaaggagccccacaggaaggaattctggaagatatgcctgtggatcctgacaatgaggcttatgaaatgccttctgaggaagggtatcaagactacgaacctgaagcctaagaaatatctttgctcccagtttcttgagatctgctgacagatgttccatcctgtacaagtgctcagttccaatgtgcccagtcatgacatttctcaaagtttttacagtgtatctcgaagtcttccatcagcagtgattgaagtatctgtacctgcccccactcagcatttcggtgcttccctttcactgaagtgaatacatggtagcagggtctttgtgtgctgtggattttgtggcttcaatctacgatgttaaaacaaattaaaaacacctaagtgactaccacttatttctaaatcctcactatttttttgttgctgttgttcagaagttgttagtgatttgctatcatatattataagatttttaggtgtcttttaatgatactgtctaagaataatgacgtattgtgaaatttgttaatatatataatacttaaaaatatgtgagcatgaaactatgcacctataaatactaaatatgaaattttaccattttgcgatgtgttttattcacttgtgtttgtatataaatggtgagaattaaaataaaacgttatctcattgcaaaaatattttatttttatcccatctcactttaataataaaaatcatgcttataagcaacatgaattaagaactgacacaaaggacaaaaatataaagttattaatagccatttgaagaaggaggaattttagaagaggtagagaaaatggaacattaaccctacactcggaattccctgaagcaacactgccagaagtgtgttttggtatgcactggttccttaagtggctgtgattaattattgaaagtggggtgttgaagaccccaactactattgtagagtggtctatttctcccttcaatcctgtcaatgtttgctttacgtattttggggaactgttgtttgatgtgtatgtgtttataattgttatacatttttaattgagccttttattaacatatattgttatttttgtctcgaaataattttttagttaaaatctattttgtctgatattggtgtgaatgctgtacctttctgacaataaataatattcgaccatgaataaaaaaaaaaaaaaagtgggttcccgggaactaagcagtgtagaagatgattttgactacaccctccttagagagccataagacacattagcacatattagcacattcaaggctctgagagaatgtggttaactttgtttaactcagcattcctcactttttttttttaatcatcagaaattctctctctctctctctctttttctctcgctctctttttttttttttttttacaggaaatgcctttaaacatcgttggaactaccagagtcaccttaaaggagatcaattctctagactgataaaaatttcatggcctcctttaaatgttgccaaatatatgaattctaggatttttccttaggaaaggtttttctctttcagggaagatctattaactccccatgggtgctgaaaataaacttgatggtgaaaaactctgtataaattaatttaaaaattatttggtttctctttttaattattctggggcatagtcatttctaaaagtcactagtagaaagtataatttcaagacagaatattctagacatgctagcagtttatatgtattcatgagtaatgtgatatatattgggcgctggtgaggaaggaaggaggaatgagtgactataaggatggttaccatagaaacttccttttttacctaattgaagagagactactacagagtgctaagctgcatgtgtcatcttacactagagagaaatggtaagtttcttgttttatttaagttatgtttaagcaaggaaaggatttgttattgaacagtatatttcaggaaggttagaaagtggcggttaggatatattttaaatctacctaaagcagcatattttaaaaatttaaaagtattggtattaaattaagaaatagaggacagaactagactgatagcagtgacctagaacaatttgagattaggaaagttgtgaccatgaatttaaggatttatgtggatacaaattctcctttaaagtgtttcttcccttaatatttatctgacggtaatttttgagcagtgaattactttatatatcttaatagtttatttgggaccaaacacttaaacaaaaagttctttaagtcatataagccttttcaggaagcttgtctcatattcactcccgagacattcacctgccaagtggcctgaggatcaatccagtcctaggtttattttgcagacttacattctcccaagttattcagcctcatatgactccacggtcggctttaccaaaacagttcagagtgcactttggcacacaattgggaacagaacaatctaatgtgtggtttggtattccaagtggggtctttttcagaatctctgcactagtgtgagatgcaaacatgtttcctcatctttctggcttatccagtatgtagctatttgtgacataataaatatatacatatatgaaaata

SEQ ID NO: 188590 - DNA, 4986 bp, Homo sapiens
  Payload ID: 17101
  Gene Symbol: SNCAIP
  Gene Name: synuclein, alpha interacting protein
  Uniprot ID: Q9Y6H5
  ENST ID: ENST00000261367
  CDS Start-End: 1429-4479
gctcctgccgctgcggtccgtcggtcggtcagtcagtcccttcgcgctcctgagccgccggcgcgccgggcgccccggaaaagagtgcctgagagtgccagaggcttggtggaagggcagacgagagaagaggaggcattgtattggccactgggacaactgcagactcactcttacctgtaaagaagcagttaatgttggggaatgtagtcaggattggaaaaccacggggatttctgcacattataattgagaatgtaaatattcttaaagtggcaccctgaaagagacaagcattgaaaccagacaaaataaattggatcatgaacagaatgagacatcttaaaggagatagcatgtggaggcctgctgggaagtagaggcaaattccagatgcctaggagccttagtctaaggtggggccatccaacccacagaaataaatatgggcagtggcccaagacttcctataatgagctgcacctgttgtaagtcttgtgttcttgcctatagaataaagaacctcactaccatcctgcaagtgcaaattgaaagattcctgttgtgatgccatgagttattatccgctggttatattctattggaatggctacactcaactggatattgctgtctatattgttggagcacctcaaacaggggtgcaatggttatttgttaatttacttaattaagacatgttcatccacattttatagtttcatttatttaaagatccatttggtccccagcttcgatgcatgtttctctgcttcatctccccatatttccatgttcctgctgatgtttataccatatcctggcacccagcatcatctgtgtgttgttcaccaaggccgtgggaacagagtctgtaaatcaatagttcatcacggagtacagatttcatgaaaagaaattggattggaagaaagtctcctagtgaacacgctagtatccaaagagtctggattgtatcagaatccatcacagtaggagagaatgttgttttgagtaatttccaagcagagtacatatattttcctctgaaaatctttgtaaattgaagaaaagtgacatttttataccaagcaatttgtttgataacctattttcagatttctacaaataataaaatttctgattttaaatattttttacaaatacaagttggttttcttttcattgtaagccttactgtgatttcagaagaatttttaacatttgctaaatggataatctcatttaaacatggaagtaacatcctaatcctttcttggatggactctgtatctattgtaattaagactttaaaaatggtatatacatatgggaaaaaaaggagaggaaacaggaaaattaaatcaagtgatgggtttgaggaatttataagtatttgaccgtactcaaaatgtgcaaggaagaataatggaagcccctgaataccttgatttggatgaaattgactttagtgatgacatatctgacaataggagtcaagggaacaggctacaaaagcttggattggaggacacagacagggaagatgcaatgggctttggttcccatagggccaaactgacagtagttgctgccctgggagcttgccattgtcctgagaatgagtattcagtcacatcactcaagacgatcccagaactgtgccgaagatgtgatacgcaaaacgaagacagatcagtttctagctctagctggaattgtggcatctcaactcttattacaaacacgcaaaagcccacaggaatcgctgatgtgtacagtaagttccgcccagtgaagcgggtttcgccactgaaacatcagccagagactctggagaacaatgaaagtgatgaccaaaagaaccagaaagtggttgagtaccagaaagggggtgagtctgacctgggcccccagcctcaggagcttggccctggagatggagtgggcggcccaccaggtaagagctctgagcccagcacatcgctgggtgaactggagcactacgacctcgacatggatgagattctggatgtgccttatattaaatccagtcagcagcttgcctcttttaccaaggtgacttcagaaaaaagaattttgggcttatgcacaaccatcaatggcctttctggcaaagcctgctctacaggaagttctgagagctcatcatccaacatggcaccattttgtgttctttctcccgtgaaaagccctcacttgagaaaagcatcagctgtcatccacgaccagcacaagctgtccactgaagaaaccgagatctcacctcctctggttaaatgtggctctgcatatgagcctgaaaaccagagtaaagacttcctaaacaagacatttagtgatcctcatggtcgaaaagttgagaagacaacaccagactgccagctcagggccttccacctacaatcctcagcagcagaatccaaaccagaagagcaggtcagtggcctaaaccggaccagctcccaaggcccagaagaaaggagtgagtatctgaaaaaagtgaaaagcatcttgaacattgttaaagaaggacagatctctctcctgccacacctagctgcagacaatctagacaaaattcacgacgaaaatggaaacaatctattacatattgcggcgtcacagggacacgcagagtgtctacagcacctcacttctttgatgggagaagactgcctcaatgagcgcaacactgagaagttgactccagcaggcctggccattaagaatggtcagttggagtgcgtacgctggatggtgagcgaaacagaagccattgcagaactgagttgttctaaggattttccaagccttattcattacgcaggttgctatggccaggaaaagattcttctgtggcttcttcagtttatgcaagaacagggcatctcgttggatgaagtagaccaggatggcaacagtgccgttcacgtagcctcacagcatggctaccttggatgcatacagaccttggttgaatatggagcaaatgtcaccatgcagaaccacgctggggaaaagccctcccagagcgccgagcggcaggggcacaccctgtgctccaggtacctggtggtggtggagacctgcatgtcgctggcctctcaagtggtgaagttaaccaagcagctaaaggaacaaacagtagaacgtgtcacgctgcagaaccaactccaacaatttctagaagcccagaaatcagagggcaagtcactcccttcttcacccagttcaccatcctcacctgcctccagaaagtcccagtggaaatctccagatgcagatgatgattctgtagccaaaagcaagccaggagtccaagaggggattcaggttcttggaagcctgtcagcctccagccgggctagacccaaagcaaaagatgaagattctgataaaatcttacgccagttattgggaaaggaaatctcagaaaatgtctgcacccaggaaaaactgtccttggaattccaggatgctcaggcttcctctagaaattctaaaaagatcccactggagaagagggaactgaagttagccaggctgagacagctgatgcagaggtcactgagtgagtctgacacagactccaacaactctgaggaccccaagactaccccagtgaggaaggctgaccgaccaaggccgcagcccattgtagaaagcgtagagagtatggacagcgcagaaagcctgcacctgatgattaagaaacacaccttggcatcagggggacgcaggtttcctttcagcatcaaggcctccaaatccctggatggccacagcccatctcccacctcagagagcagcgaaccagacttagaatcccagtatccaggctcagggagtattcctccaaaccagccctctggtgaccctcagcagcccagccctgacagtactgctgcccagaaagttgccacaagtcccaagagtgccctcaagtctccatcttccaagcgtaggacatctcagaacttaaaactgagagttacctttgaggagcctgtggtgcagatggagcagcctagccttgaactgaatggagaaaaagacaaagataagggcaggactctccagcggacctccacaagtaacgaatcgggggatcaactgaaaaggccttttggagcctttcgatctatcatggagacactaagtggcaaccaaaacaataataataactaccaggcagccaaccagctgaaaacctctacattgcccttgacctcacttgggaggaagacagatgccaagggaaaccctgccagctccgctagcaaaggaaagaataaggcagaaatgtacagcagctgcatcaatctttcctctaacatgctgattgaagagcatctgtgtaacgacacacggcataatgacatcaatagaaaaatgaagaaatcctacagcataaagcacattgctgagccagagtcaaaagaactcttcttgtaaatcactttttaaattttctctcactgatgccctttggaaattattggaaatttctggactatcctctttggaaagagaaccatgaaaacaatgcctcaccagcagaagaacagaatatcaggatgccttaaatttatagtagtagactgtaaaagattcattttggggtgatatctgtatatataacttgtttttttaaaagatgccgtttaaaagcatgattgggaaaatgtatgttttttaagagtagattgattcaccctacccacaggacattcaccaagccactgataccattttatatttcatcaattgcatgagtatttgctaatgttgattgaacctccctttccccataatgtgggcagatttggctcagctccttcatgagatcaggtcagtggtattgtttctgtcaagagtgttttttctgtcatttctactttttgtataaaggaaataaaacaatgttaacagccacctataagcttggggcacctactttct

SEQ ID NO: 188591 - DNA, 3745 bp, Homo sapiens
  Payload ID: 17101
  Gene Symbol: SNCAIP
  Gene Name: synuclein, alpha interacting protein
  Uniprot ID: Q9Y6H5
  ENST ID: ENST00000261368
  CDS Start-End: 263-3022
gcggccgcccaggctgcccccgcccgcgcgcgcccgttggggggcccggggagcggcgcccgcggccgggccgcattgtgacgtagcggggccgcggcagcgcctccaccgcccgcctacttcggctgaggctgttctgctcctgccgctgcggtccgtcggtcggtcagtcagtcccttcgcgctcctgagccgccggcgcgccgggcgccccgggaatttataagtatttgaccgtactcaaaatgtgcaaggaagaataatggaagcccctgaataccttgatttggatgaaattgactttagtgatgacatatcttattcagtcacatcactcaagacgatcccagaactgtgccgaagatgtgatacgcaaaacgaagacagatcagtttctagctctagctggaattgtggcatctcaactcttattacaaacacgcaaaagcccacaggaatcgctgatgtgtacagtaagttccgcccagtgaagcgggtttcgccactgaaacatcagccagagactctggagaacaatgaaagtgatgaccaaaagaaccagaaagtggttgagtaccagaaagggggtgagtctgacctgggcccccagcctcaggagcttggccctggagatggagtgggcggcccaccaggtaagagctctgagcccagcacatcgctgggtgaactggagcactacgacctcgacatggatgagattctggatgtgccttatattaaatccagtcagcagcttgcctcttttaccaaggtgacttcagaaaaaagaattttgggcttatgcacaaccatcaatggcctttctggcaaagcctgctctacaggaagttctgagagctcatcatccaacatggcaccattttgtgttctttctcccgtgaaaagccctcacttgagaaaagcatcagctgtcatccacgaccagcacaagctgtccactgaagaaaccgagatctcacctcctctggttaaatgtggctctgcatatgagcctgaaaaccagagtaaagacttcctaaacaagacatttagtgatcctcatggtcgaaaagttgagaagacaacaccagactgccagctcagggccttccacctacaatcctcagcagcagaatccaaaccagaagagcaggtcagtggcctaaaccggaccagctcccaaggcccagaagaaaggagtgagtatctgaaaaaagtgaaaagcatcttgaacattgttaaagaaggacagatctctctcctgccacacctagctgcagacaatctagacaaaattcacgacgaaaatggaaacaatctattacatattgcggcgtcacagggacacgcagagtgtctacagcacctcacttctttgatgggagaagactgcctcaatgagcgcaacactgagaagttgactccagcaggcctggccattaagaatggtcagttggagtgcgtacgctggatggtgagcgaaacagaagccattgcagaactgagttgttctaaggattttccaagccttattcattacgcaggttgctatggccaggaaaagattcttctgtggcttcttcagtttatgcaagaacagggcatctcgttggatgaagtagaccaggatggcaacagtgccgttcacgtagcctcacagcatggctaccttggatgcatacagaccttggttgaatatggagcaaatgtcaccatgcagaaccacgctggggaaaagccctcccagagcgccgagcggcaggggcacaccctgtgctccaggtacctggtggtggtggagacctgcatgtcgctggcctctcaagtggtgaagttaaccaagcagctaaaggaacaaacagtagaacgtgtcacgctgcagaaccaactccaacaatttctagaagcccagaaatcagagggcaagtcactcccttcttcacccagttcaccatcctcacctgcctccagaaagtcccagtggaaatctccagatgcagatgatgattctgtagccaaaagcaagccaggagtccaagaggggattcaggttcttggaagcctgtcagcctccagccgggctagacccaaagcaaaagatgaagattctgataaaatcttacgccagttattgggaaaggaaatctcagaaaatgtctgcacccaggaaaaactgtccttggaattccaggatgctcaggcttcctctagaaattctaaaaagatcccactggagaagagggaactgaagttagccaggctgagacagctgatgcagaggtcactgagtgagtctgacacagactccaacaactctgaggaccccaagactaccccagtgaggaaggctgaccgaccaaggccgcagcccattgtagaaagcgtagagagtatggacagcgcagaaagcctgcacctgatgattaagaaacacaccttggcatcagggggacgcaggtttcctttcagcatcaaggcctccaaatccctggatggccacagcccatctcccacctcagagagcagcgaaccagacttagaatcccagtatccaggctcagggagtattcctccaaaccagccctctggtgaccctcagcagcccagccctgacagtactgctgcccagaaagttgccacaagtcccaagagtgccctcaagtctccatcttccaagcgtaggacatctcagaacttaaaactgagagttacctttgaggagcctgtggtgcagatggagcagcctagccttgaactgaatggagaaaaagacaaagataagggcaggactctccagcggacctccacaagtaacgaatcgggggatcaactgaaaaggccttttggagcctttcgatctatcatggagacactaagtggcaaccaaaacaataataataactaccaggcagccaaccagctgaaaacctctacattgcccttgacctcacttgggaggaagacagatgccaagggaaaccctgccagctccgctagcaaaggaaagaataaggcagcataatgacatcaatagaaaaatgaagaaatcctacagcataaagcacattgctgagccagagtcaaaagaactcttcttgtaaatcactttttaaattttctctcactgatgccctttggaaattattggaaatttctggactatcctctttggaaagagaaccatgaaaacaatgcctcaccagcagaagaacagaatatcaggatgccttaaatttatagtagtagactgtaaaagattcattttggggtgatatctgtatatataacttgtttttttaaaagatgccgtttaaaagcatgattgggaaaatgtatgttttttaagagtagattgattcaccctacccacaggacattcaccaagccactgataccattttatatttcatcaattgcatgagtatttgctaatgttgattgaacctccctttccccataatgtgggcagatttggctcagctccttcatgagatcaggtcagtggtattgtttctgtcaagagtgttttttctgtcatttctactttttgtataaaggaaataaaacaatgttaacagccacctataagcttggggcacctactttctaacaaatctgtgatgttctgatttctaagggactttgcaagtattttgattgctgatatttgatttcaggaacaaactgctcagtttagcagttttcccataggcgtcaaataaaacattctatatttcattaagta

SEQ ID NO: 188592 - DNA, 2588 bp, Homo sapiens
  Payload ID: 17101
  Gene Symbol: SNCAIP
  Gene Name: synuclein, alpha interacting protein
  Uniprot ID: Q9Y6H5
  ENST ID: ENST00000379538
  CDS Start-End: 253-2064
cgcccgcggccgggccgcattgtgacgtagcggggccgcggcagcgcctccaccgcccgcctacttcggctgaggctgttctgctcctgccgctgcggtccgtcggtcggtcagtcagtcccttcgcgctcctgagccgccggcgcgccgggcgccccgggaatttataagtatttgaccgtactcaaaatgtgcaaggaagaataatggaagcccctgaataccttgatttggatgaaattgactttagtgatgacatatcttattcagtcacatcactcaagacgatcccagaactgtgccgaagatgtgatacgcaaaacgaagacagatcagaatggtcagttggagtgcgtacgctggatggtgagcgaaacagaagccattgcagaactgagttgttctaaggattttccaagccttattcattacgcaggttgctatggccaggaaaagattcttctgtggcttcttcagtttatgcaagaacagggcatctcgttggatgaagtagaccaggatggcaacagtgccgttcacgtagcctcacagcatggctaccttggatgcatacagaccttggttgaatatggagcaaatgtcaccatgcagaaccacgctggggaaaagccctcccagagcgccgagcggcaggggcacaccctgtgctccaggtacctggtggtggtggagacctgcatgtcgctggcctctcaagtggtgaagttaaccaagcagctaaaggaacaaacagtagaacgtgtcacgctgcagaaccaactccaacaatttctagaagcccagaaatcagagggcaagtcactcccttcttcacccagttcaccatcctcacctgcctccagaaagtcccagtggaaatctccagatgcagatgatgattctgtagccaaaagcaagccaggagtccaagaggggattcaggttcttggaagcctgtcagcctccagccgggctagacccaaagcaaaagatgaagattctgataaaatcttacgccagttattgggaaaggaaatctcagaaaatgtctgcacccaggaaaaactgtccttggaattccaggatgctcaggcttcctctagaaattctaaaaagatcccactggagaagagggaactgaagttagccaggctgagacagctgatgcagaggtcactgagtgagtctgacacagactccaacaactctgaggaccccaagactaccccagtgaggaaggctgaccgaccaaggccgcagcccattgtagaaagcgtagagagtatggacagcgcagaaagcctgcacctgatgattaagaaacacaccttggcatcagggggacgcaggtttcctttcagcatcaaggcctccaaatccctggatggccacagcccatctcccacctcagagagcagcgaaccagacttagaatcccagtatccaggctcagggagtattcctccaaaccagccctctggtgaccctcagcagcccagccctgacagtactgctgcccagaaagttgccacaagtcccaagagtgccctcaagtctccatcttccaagcgtaggacatctcagaacttaaaactgagagttacctttgaggagcctgtggtgcagatggagcagcctagccttgaactgaatggagaaaaagacaaagataagggcaggactctccagcggacctccacaagtaacgaatcgggggatcaactgaaaaggccttttggagcctttcgatctatcatggagacactaagtggcaaccaaaacaataataataactaccaggcagccaaccagctgaaaacctctacattgcccttgacctcacttgggaggaagacagatgccaagggaaaccctgccagctccgctagcaaaggaaagaataaggcagaaatgtacagcagctgcatcaatctttcctctaacatgctgattgaagagcatctgtgtaacgacacacggcataatgacatcaatagaaaaatgaagaaatcctacagcataaagcacattgctgagccagagtcaaaagaactcttcttgtaaatcactttttaaattttctctcactgatgccctttggaaattattggaaatttctggactatcctctttggaaagagaaccatgaaaacaatgcctcaccagcagaagaacagaatatcaggatgccttaaatttatagtagtagactgtaaaagattcattttggggtgatatctgtatatataacttgtttttttaaaagatgccgtttaaaagcatgattgggaaaatgtatgttttttaagagtagattgattcaccctacccacaggacattcaccaagccactgataccattttatatttcatcaattgcatgagtatttgctaatgttgattgaacctccctttccccataatgtgggcagatttggctcagctccttcatgagatcaggtcagtggtattgtttctgtcaagagtgttttttctgtcatttctactttttgtataaaggaaataaaacaatgttaacagccacctataagcttggggcacctactttctaacaaatctgtgatgtt

SEQ ID NO: 188593 - DNA, 1888 bp, Homo sapiens
  Payload ID: 17101
  Gene Symbol: SNCAIP
  Gene Name: synuclein, alpha interacting protein
  ENST ID: ENST00000395466
  CDS Start-End: 1-267
atggaagcccctgaataccttgatttggatgaaattgactttagtgatgacatatcttattcagtcacatcactcaagacgatcccagaactgtgccgaagatgtgatacgcaaaacgaagacagatcagccacacctagctgcagacaatctagacaaaattcacgacgaaaatggaaacaatctattacatattgcggcgtcacagggacacgcagagtgtctacagcacctcacttctttgatgggagaagactgcctcaatgagcgcaacactgagaagttgactccagcaggcctggccattaagaatggtcagttggagtgcgtacgctggatggtgagcgaaacagaagccattgcagaactgagttgttctaaggattttccaagccttattcattacgcaggttgctatggccaggaaaagattcttctgtggcttcttcagtttatgcaagaacagggcatctcgttggatgaagtagaccaggatggcaacagtgccgttcacgtagcctcacagcatggctaccttggatgcatacagaccttggttgaatatggagcaaatgtcaccatgcagaaccacgctggggaaaagccctcccagagcgccgagcggcaggggcacaccctgtgctccaggtacctggtggtggtggagacctgcatgtcgctggcctctcaagtggtgaagttaaccaagcagctaaaggaacaaacagtagaacgtgtcacgctgcagaaccaactccaacaatttctagaagcccagaaatcagagggcaagtcactcccttcttcacccagttcaccatcctcacctgcctccagaaagtcccagtggaaatctccagatgcagatgatgattctgtagccaaaagcaagccaggagtccaagaggggattcaggttcttggaagcctgtcagcctccagccgggctagacccaaagcaaaagatgaagattctgataaaatcttacgccagttattgggaaaggaaatctcagaaaatgtctgcacccaggaaaaactgtccttggaattccaggatgctcaggcttcctctagaaattctaaaaagatcccactggagaagagggaactgaagttagccaggctgagacagctgatgcagaggtcactgagtgagtctgacacagactccaacaactctgaggaccccaagactaccccagtgaggaaggctgaccgaccaaggccgcagcccattgtagaaagcgtagagagtatggacagcgcagaaagcctgcacctgatgattaagaaacacaccttggcatcagggggacgcaggtttcctttcagcatcaaggcctccaaatccctggatggccacagcccatctcccacctcagagagcagcgaaccagacttagaatcccagtatccaggctcagggagtattcctccaaaccagccctctggtgaccctcagcagcccagccctgacagtactgctgcccagaaagttgccacaagtcccaagagtgccctcaagtctccatcttccaagcgtaggacatctcagaacttaaaactgagagttacctttgaggagcctgtggtgcagatggagcagcctagccttgaactgaatggagaaaaagacaaagataagggcaggactctccagcggacctccacaagtaacgaatcgggggatcaactgaaaaggccttttggagcctttcgatctatcatggagacactaagtggcaaccaaaacaataataataactaccaggcagccaaccagctgaaaacctctacattgcccttgacctcacttgggaggaagacagatgccaagggaaaccctgccagctccgctagcaaaggaaagaataaggcagcataa

SEQ ID NO: 188594 - DNA, 3126 bp, Homo sapiens
  Payload ID: 17101
  Gene Symbol: SNCAIP
  Gene Name: synuclein, alpha interacting protein
  Uniprot ID: Q9Y6H5
  ENST ID: ENST00000395469
  CDS Start-End: 1-1767
atggaagcccctgaataccttgatttggatgaaattgactttagtgatgacatatctgacaataggagtcaagggaacaggctacaaaagcttggattggaggacacagacagggaagatgcaatgggctttggttcccatagggccaaactgacagtagttgctgccctgggagcttgccattgtcctgagaatgagtattcagtcacatcactcaagacgatcccagaactgtgccgaagatgtgatacgcaaaacgaagacagatcagtttctagctctagctggaattgtggcatctcaactcttattacaaacacgcaaaagcccacaggaatcgctgatgtgtacagtaagttccgcccagtgaagcgggtttcgccactgaaacatcagccagagactctggagaacaatgaaagtgatgaccaaaagaaccagaaagtggttgagtaccagaaagggggtgagtctgacctgggcccccagcctcaggagcttggccctggagatggagtgggcggcccaccaggtaagagctctgagcccagcacatcgctgggtgaactggagcactacgacctcgacatggatgagattctggatgtgccttatattaaatccagtcagcagcttgcctcttttaccaaggtgacttcagaaaaaagaattttgggcttatgcacaaccatcaatggcctttctggcaaagcctgctctacaggaagttctgagagctcatcatccaacatggcaccattttgtgttctttctcccgtgaaaagccctcacttgagaaaagcatcagctgtcatccacgaccagcacaagctgtccactgaagaaaccgagatctcacctcctctggttaaatgtggctctgcatatgagcctgaaaaccagagtaaagacttcctaaacaagacatttagtgatcctcatggtcgaaaagttgagaagacaacaccagactgccagctcagggccttccacctacaatcctcagcagcagaatccaaaccagaagagcaggtcagtggcctaaaccggaccagctcccaaggcccagaagaaaggagtgagtatctgaaaaaagtgaaaagcatcttgaacattgttaaagaaggacagatctctctcctgccacacctagctgcagacaatctagacaaaattcacgacgaaaatggaaacaatctattacatattgcggcgtcacagggacacgcagagtgtctacagcacctcacttctttgatgggagaagactgcctcaatgagcgcaacactgagaagttgactccagcaggcctggccattaagaatggtcagttggagtgcgtacgctggatggtgagcgaaacagaagccattgcagaactgagttgttctaaggattttccaagccttattcattacgcaggttgctatggccaggaaaagattcttctgtggcttcttcagtttatgcaagaacagggcatctcgttggatgaagtagaccaggatggcaacagtgccgttcacgtagcctcacagcatggctaccttggatgcatacagactagactcaagattcaagggacttggaatgggagtgagacatgcctttttacacaccactttagctcctatccccctatctcttctgggctgcagtgtcaaggacaagaaggagttctttttattcctgatcaggttggcgcagcaacaaataaacaggtgttatttcaaaaccaattaccagagaccaaatccagttactagagcccaagcaaatgagaacagaccttggttgaatatggagcaaatgtcaccatgcagaaccacgctggggaaaagccctcccagagcgccgagcggcaggggcacaccctgtgctccaggtacctggtggtggtggagacctgcatgtcgctggcctctcaagtggtgaagttaaccaagcagctaaaggaacaaacagtagaacgtgtcacgctgcagaaccaactccaacaatttctagaagcccagaaatcagagggcaagtcactcccttcttcacccagttcaccatcctcacctgcctccagaaagtcccagtggaaatctccagatgcagatgatgattctgtagccaaaagcaagccaggagtccaagaggggattcaggttcttggaagcctgtcagcctccagccgggctagacccaaagcaaaagatgaagattctgataaaatcttacgccagttattgggaaaggaaatctcagaaaatgtctgcacccaggaaaaactgtccttggaattccaggatgctcaggcttcctctagaaattctaaaaagatcccactggagaagagggaactgaagttagccaggctgagacagctgatgcagaggtcactgagtgagtctgacacagactccaacaactctgaggaccccaagactaccccagtgaggaaggctgaccgaccaaggccgcagcccattgtagaaagcgtagagagtatggacagcgcagaaagcctgcacctgatgattaagaaacacaccttggcatcagggggacgcaggtttcctttcagcatcaaggcctccaaatccctggatggccacagcccatctcccacctcagagagcagcgaaccagacttagaatcccagtatccaggctcagggagtattcctccaaaccagccctctggtgaccctcagcagcccagccctgacagtactgctgcccagaaagttgccacaagtcccaagagtgccctcaagtctccatcttccaagcgtaggacatctcagaacttaaaactgagagttacctttgaggagcctgtggtgcagatggagcagcctagccttgaactgaatggagaaaaagacaaagataagggcaggactctccagcggacctccacaagtaacgaatcgggggatcaactgaaaaggccttttggagcctttcgatctatcatggagacactaagtggcaaccaaaacaataataataactaccaggcagccaaccagctgaaaacctctacattgcccttgacctcacttgggaggaagacagatgccaagggaaaccctgccagctccgctagcaaaggaaagaataaggcagcataa

SEQ ID NO: 188595 - DNA, 1591 bp, Homo sapiens
  Payload ID: 17101
  Gene Symbol: SNCAIP
  Gene Name: synuclein, alpha interacting protein
  ENST ID: ENST00000414317
  CDS Start-End: 1-189
atggaagcccctgaataccttgatttggatgaaattgactttagtgatgacatatcttattcagtcacatcactcaagacgatcccagaactgtgccgaagatgtgatacgcaaaacgaagacagatcaggaaaagattcttctgtggcttcttcagtttatgcaagaacagggcatctcgttggatgaagtagaccaggatggcaacagtgccgttcacgtagcctcacagcatggctaccttggatgcatacagaccttggttgaatatggagcaaatgtcaccatgcagaaccacgctggggaaaagccctcccagagcgccgagcggcaggggcacaccctgtgctccaggtacctggtggtggtggagacctgcatgtcgctggcctctcaagtggtgaagttaaccaagcagctaaaggaacaaacagtagaacgtgtcacgctgcagaaccaactccaacaatttctagaagcccagaaatcagagggcaagtcactcccttcttcacccagttcaccatcctcacctgcctccagaaagtcccagtggaaatctccagatgcagatgatgattctgtagccaaaagcaagccaggagtccaagaggggattcaggttcttggaagcctgtcagcctccagccgggctagacccaaagcaaaagatgaagattctgataaaatcttacgccagttattgggaaaggaaatctcagaaaatgtctgcacccaggaaaaactgtccttggaattccaggatgctcaggcttcctctagaaattctaaaaagatcccactggagaagagggaactgaagttagccaggctgagacagctgatgcagaggtcactgagtgagtctgacacagactccaacaactctgaggaccccaagactaccccagtgaggaaggctgaccgaccaaggccgcagcccattgtagaaagcgtagagagtatggacagcgcagaaagcctgcacctgatgattaagaaacacaccttggcatcagggggacgcaggtttcctttcagcatcaaggcctccaaatccctggatggccacagcccatctcccacctcagagagcagcgaaccagacttagaatcccagtatccaggctcagggagtattcctccaaaccagccctctggtgaccctcagcagcccagccctgacagtactgctgcccagaaagttgccacaagtcccaagagtgccctcaagtctccatcttccaagcgtaggacatctcagaacttaaaactgagagttacctttgaggagcctgtggtgcagatggagcagcctagccttgaactgaatggagaaaaagacaaagataagggcaggactctccagcggacctccacaagtaacgaatcgggggatcaactgaaaaggccttttggagcctttcgatctatcatggagacactaagtggcaaccaaaacaataataataactaccaggcagccaaccagctgaaaacctctacattgcccttgacctcacttgggaggaagacagatgccaagggaaaccctgccagctccgctagcaaaggaaagaataaggcagta

SEQ ID NO: 188596 - DNA, 2807 bp, Homo sapiens
  Payload ID: 17101
  Gene Symbol: SNCAIP
  Gene Name: synuclein, alpha interacting protein
  ENST ID: ENST00000509154
  CDS Start-End: 234-2807
aaaaagagcgaaaggtaaagaaagagcaggttcgtggacaggagccggcgggcaggccgggggatccctgagacagggtttcaccatgttgcccaggctggtctcgaactcctggactcaagcagtctgtccatctcagcctcccaaagtgctgggattacaggtgtgagccaccacactggccaaggaatttataagtatttgaccgtactcaaaatgtgcaaggaagaataatggaagcccctgaataccttgatttggatgaaattgactttagtgatgacatatcttattcagtcacatcactcaagacgatcccagaactgtgccgaagatgtgatacgcaaaacgaagacagatcagtttctagctctagctggaattgtggcatctcaactcttattacaaacacgcaaaagcccacaggaatcgctgatgtgtacagtaagttccgcccagtgaagcgggtttcgccactgaaacatcagccagagactctggagaacaatgaaagtgatgaccaaaagaaccagaaagtggttgagtaccagaaagggggtgagtctgacctgggcccccagcctcaggagcttggccctggagatggagtgggcggcccaccaggtaagagctctgagcccagcacatcgctgggtgaactggagcactacgacctcgacatggatgagattctggatgtgccttatattaaatccagtcagcagcttgcctcttttaccaaggtgacttcagaaaaaagaattttgggcttatgcacaaccatcaatggcctttctggcaaagcctgctctacaggaagttctgagagctcatcatccaacatggcaccattttgtgttctttctcccgtgaaaagccctcacttgagaaaagcatcagctgtcatccacgaccagcacaagctgtccactgaagaaaccgagatctcacctcctctggttaaatgtggctctgcatatgagcctgaaaaccagagtaaagacttcctaaacaagacatttagtgatcctcatggtcgaaaagttgagaagacaacaccagactgccagctcagggccttccacctacaatcctcagcagcagaatccaaaccagaagagcaggtcagtggcctaaaccggaccagctcccaaggcccagaagaaaggagtgagtatctgaaaaaagtgaaaagcatcttgaacattgttaaagaaggacagatctctctcctgaatggtcagttggagtgcgtacgctggatggtgagcgaaacagaagccattgcagaactgagttgttctaaggattttccaagccttattcattacgcaggttgctatggccaggaaaagattcttctgtggcttcttcagtttatgcaagaacagggcatctcgttggatgaagtagaccaggatggcaacagtgccgttcacgtagcctcacagcatggctaccttggatgcatacagaccttggttgaatatggagcaaatgtcaccatgcagaaccacgctggggaaaagccctcccagagcgccgagcggcaggggcacaccctgtgctccaggtacctggtggtggtggagacctgcatgtcgctggcctctcaagtggtgaagttaaccaagcagctaaaggaacaaacagtagaacgtgtcacgctgcagaaccaactccaacaatttctagaagcccagaaatcagagggcaagtcactcccttcttcacccagttcaccatcctcacctgcctccagaaagtcccagtggaaatctccagatgcagatgatgattctgtagccaaaagcaagccaggagtccaagaggggattcaggttcttggaagcctgtcagcctccagccgggctagacccaaagcaaaagatgaagattctgataaaatcttacgccagttattgggaaaggaaatctcagaaaatgtctgcacccaggaaaaactgtccttggaattccaggatgctcaggcttcctctagaaattctaaaaagatcccactggagaagagggaactgaagttagccaggctgagacagctgatgcagaggtcactgagtgagtctgacacagactccaacaactctgaggaccccaagactaccccagtgaggaaggctgaccgaccaaggccgcagcccattgtagaaagcgtagagagtatggacagcgcagaaagcctgcacctgatgattaagaaacacaccttggcatcagggggacgcaggtttcctttcagcatcaaggcctccaaatccctggatggccacagcccatctcccacctcagagagcagcgaaccagacttagaatcccagtatccaggctcagggagtattcctccaaaccagccctctggtgaccctcagcagcccagccctgacagtactgctgcccagaaagttgccacaagtcccaagagtgccctcaagtctccatcttccaagcgtaggacatctcagaacttaaaactgagagttacctttgaggagcctgtggtgcagatggagcagcctagccttgaactgaatggagaaaaagacaaagataagggcaggactctccagcggacctccacaagtaacgaatcgggggatcaactgaaaaggccttttggagcctttcgatctatcatggagacactaagtggcaaccaaaacaataataataactaccaggcagccaaccagctgaaaacctctacattgcccttgacctcacttgggaggaagacagatgccaagggaaaccctgccagctccgctagcaaaggaaagaataaggca

SEQ ID NO: 188597 - DNA, 420 bp, Homo sapiens
  Payload ID: 17101
  Gene Symbol: SNCAIP
  Gene Name: synuclein, alpha interacting protein
  ENST ID: ENST00000508681
  CDS Start-End: 126-420
agtcgaggtaaaaagagcgaaaggtaaagaaagagcaggttcgtggacaggagccggcgggcaggccgggggatccctggaatttataagtatttgaccgtactcaaaatgtgcaaggaagaataatggaagcccctgaataccttgatttggatgaaattgactttagtgatgacatatcttattcagtcacatcactcaagacgatcccagaactgtgccgaagatgtgatacgcaaaacgaagacagatcagtttctagctctagctggaattgtggcatctcaactcttattacaaacacgcaaaagcccacaggaatcgctgatgtgtacagtaagttccgcccagtgaagcgggtttcgccactgaaacatcagccagagactctggagaacaatgaaagtgatgaccaaaaga

SEQ ID NO: 188598 - DNA, 1849 bp, Homo sapiens
  Payload ID: 17101
  Gene Symbol: SNCAIP
  Gene Name: synuclein, alpha interacting protein
  ENST ID: ENST00000512146
  CDS Start-End: 1-342
atggaagcccctgaataccttgatttggatgaaattgactttagtgatgacatatctgacaataggagtcaagggaacaggctacaaaagcttggattggaggacacagacagggaagatgcaatgggctttggttcccatagggccaaactgacagtagttgctgccctgggagcttgccattgtcctgagaatgagtattcagtcacatcactcaagacgatcccagaactgtgccgaagatgtgatacgcaaaacgaagacagatcagaatggtcagttggagtgcgtacgctggatggtgagcgaaacagaagccattgcagaactgagttgttctaaggattttccaagccttattcattacgcaggttgctatggccaggaaaagattcttctgtggcttcttcagtttatgcaagaacagggcatctcgttggatgaagtagaccaggatggcaacagtgccgttcacgtagcctcacagcatggctaccttggatgcatacagaccttggttgaatatggagcaaatgtcaccatgcagaaccacgctggggaaaagccctcccagagcgccgagcggcaggggcacaccctgtgctccaggtacctggtggtggtggagacctgcatgtcgctggcctctcaagtggtgaagttaaccaagcagctaaaggaacaaacagtagaacgtgtcacgctgcagaaccaactccaacaatttctagaagcccagaaatcagagggcaagtcactcccttcttcacccagttcaccatcctcacctgcctccagaaagtcccagtggaaatctccagatgcagatgatgattctgtagccaaaagcaagccaggagtccaagaggggattcaggttcttggaagcctgtcagcctccagccgggctagacccaaagcaaaagatgaagattctgataaaatcttacgccagttattgggaaaggaaatctcagaaaatgtctgcacccaggaaaaactgtccttggaattccaggatgctcaggcttcctctagaaattctaaaaagatcccactggagaagagggaactgaagttagccaggctgagacagctgatgcagaggtcactgagtgagtctgacacagactccaacaactctgaggaccccaagactaccccagtgaggaaggctgaccgaccaaggccgcagcccattgtagaaagcgtagagagtatggacagcgcagaaagcctgcacctgatgattaagaaacacaccttggcatcagggggacgcaggtttcctttcagcatcaaggcctccaaatccctggatggccacagcccatctcccacctcagagagcagcgaaccagacttagaatcccagtatccaggctcagggagtattcctccaaaccagccctctggtgaccctcagcagcccagccctgacagtactgctgcccagaaagttgccacaagtcccaagagtgccctcaagtctccatcttccaagcgtaggacatctcagaacttaaaactgagagttacctttgaggagcctgtggtgcagatggagcagcctagccttgaactgaatggagaaaaagacaaagataagggcaggactctccagcggacctccacaagtaacgaatcgggggatcaactgaaaaggccttttggagcctttcgatctatcatggagacactaagtggcaaccaaaacaataataataactaccaggcagccaaccagctgaaaacctctacattgcccttgacctcacttgggaggaagacagatgccaagggaaaccctgccagctccgctagcaaaggaaagaataaggcagcataa

SEQ ID NO: 188599 - DNA, 2410 bp, Homo sapiens
  Payload ID: 17101
  Gene Symbol: SNCAIP
  Gene Name: synuclein, alpha interacting protein
  ENST ID: ENST00000508017
  CDS Start-End: 83-283
cgcgctcctgagccgccggcgcgccgggcgccccgggaatttataagtatttgaccgtactcaaaatgtgcaaggaagaataatggaagcccctgaataccttgatttggatgaaattgactttagtgatgacatatcttattcagtcacatcactcaagacgatcccagaactgtgccgaagatgtgatacgcaaaacgaagacagatcagaatggtcagttggagtgcgtacgctggatggtgagcgaaacagaagccattgcagaactgagttgttctaaggattttccaagccttattcattacgcaggttgctatggccaggaaaagattcttctgtggcttcttcagtttatgcaagaacagggcatctcgttggatgaagtagaccaggatggcaacagtgccgttcacgtagcctcacagcatggctaccttggatgcatacagaccttggttgaatatggagcaaatgtcaccatgcagaaccacgctggggaaaagccctcccagagcgccgagcggcaggggcacaccctgtgctccaggtacctggtggtggtggagacctgcatgtcgctggcctctcaagtggtgaagttaaccaagcagctaaaggaacaaacagtagaacgtgtcacgctgcagaaccaactccaacaatttctagaagcccagaaatcagagggcaagtcactcccttcttcacccagttcaccatcctcacctgcctccagaaagtcccagtggaaatctccagatgcagatgatgattctgtagccaaaagcaagccaggagtccaagaggggattcaggttcttggaagcctgtcagcctccagccgggctagacccaaagcaaaagatgaagattctgataaaatcttacgccagttattgggaaaggaaatctcagaaaatgtctgcacccaggaaaaactgtccttggaattccaggatgctcaggcttcctctagaaattctaaaaagatcccactggagaagagggaactgaagttagccaggctgagacagctgatgcagaggtcactgagtgagtctgacacagactccaacaactctgaggaccccaagactaccccagtgaggaaggctgaccgaccaaggccgcagcccattgtagaaagcgtagagagtatggacagcgcagaaagcctgcacctgatgattaagaaacacaccttggcatcagggggacgcaggtttcctttcagcatcaaggcctccaaatccctggatggccacagcccatctcccacctcagagagcagcgaaccagacttagaatcccagtatccaggctcagggagtattcctccaaaccagccctctggtgaccctcagcagcccagccctgacagtactgctgcccagaaagttgccacaagtcccaagagtgccctcaagtctccatcttccaagcgtaggacatctcagaacttaaaactgagagttacctttgaggagcctgtggtgcagatggagcagcctagccttgaactgaatggagaaaaagacaaagataagggcaggactctccagcggacctccacaagtaacgaatcgggggatcaactgaaaaggccttttggagcctttcgatctatcatggagacactaagtggcaaccaaaacaataataataactaccaggcagccaaccagctgaaaacctctacattgcccttgacctcacttgggaggaagacagatgccaagggaaaccctgccagctccgctagcaaaggaaagaataaggcagcataatgacatcaatagaaaaatgaagaaatcctacagcataaagcacattgctgagccagagtcaaaagaactcttcttgtaaatcactttttaaattttctctcactgatgccctttggaaattattggaaatttctggactatcctctttggaaagagaaccatgaaaacaatgcctcaccagcagaagaacagaatatcaggatgccttaaatttatagtagtagactgtaaaagattcattttggggtgatatctgtatatataacttgtttttttaaaagatgccgtttaaaagcatgattgggaaaatgtatgttttttaagagtagattgattcaccctacccacaggacattcaccaagccactgataccattttatatttcatcaattgcatgagtatttgctaatgttgattgaacctccctttccccataatgtgggcagatttggctcagctccttcatgagatcaggtcagtggtattgtttctgtcaagagtgttttttctgtcatttctactttttgtataaaggaaataaaacaatgttaacagccacctataagcttggggcacctactttctaacaaatctgtgatgttctgatttctaagggact

SEQ ID NO: 188600 - DNA, 468 bp, Homo sapiens
  Payload ID: 17101
  Gene Symbol: SNCAIP
  Gene Name: synuclein, alpha interacting protein
  ENST ID: ENST00000514497
  CDS Start-End: 266-468
gcctacttcggctgaggctgttctgctcctgccgctgcggtccgtcggtcggtcagtcagtcccttcgcgctcctgagccgccggcgcgccgggcgccccggagacagggtttcaccatgttgcccaggctggtctcgaactcctggactcaagcagtctgtccatctcagcctcccaaagtgctgggattacaggtgtgagccaccacactggccaaggaatttataagtatttgaccgtactcaaaatgtgcaaggaagaataatggaagcccctgaataccttgatttggatgaaattgactttagtgatgacatatctgacaataggagtcaagggaacaggctacaaaagcttggattggaggacacagacagggaagatgcaatgggctttggttcccatagggccaaactgacagtagttgctgccctgggagcttgccattgtcctgagaatgagtattc

SEQ ID NO: 188601 - DNA, 2564 bp, Homo sapiens
  Payload ID: 17101
  Gene Symbol: SNCAIP
  Gene Name: synuclein, alpha interacting protein
  ENST ID: ENST00000512385
  CDS Start-End: 207-407
cgcccgcggccgggccgcattgtgacgtagcggggccgcggcagcgcctccaccgcccgcctacttcggctgaggctgttctgctcctgccgctgcggtccgtcggtcggtcagtcagtcccttcgcgctcctgagccgccggcgcgccgggcgccccgggaatttataagtatttgaccgtactcaaaatgtgcaaggaagaataatggaagcccctgaataccttgatttggatgaaattgactttagtgatgacatatcttattcagtcacatcactcaagacgatcccagaactgtgccgaagatgtgatacgcaaaacgaagacagatcagaatggtcagttggagtgcgtacgctggatggtgagcgaaacagaagccattgcagaactgagttgttctaaggattttccaagccttattcattacgcaggttgctatggccaggaaaagattcttctgtggcttcttcagtttatgcaagaacagggcatctcgttggatgaagtagaccaggatggcaacagtgccgttcacgtagcctcacagcatggctaccttggatgcatacagaccttggttgaatatggagcaaatgtcaccatgcagaaccacgctggggaaaagccctcccagagcgccgagcggcaggggcacaccctgtgctccaggtacctggtggtggtggagacctgcatgtcgctggcctctcaagtggtgaagttaaccaagcagctaaaggaacaaacagtagaacgtgtcacgctgcagaaccaactccaacaatttctagaagcccagaaatcagagggcaagtcactcccttcttcacccagttcaccatcctcacctgcctccagaaagtcccagtggaaatctccagatgcagatgatgattctgtagccaaaagcaagccaggagtccaagaggggattcaggttcttggaagcctgtcagcctccagccgggctagacccaaagcaaaagatgaagattctgataaaatcttacgccagttattgggaaaggaaatctcagaaaatgtctgcacccaggaaaaactgtccttggaattccaggatgctcaggcttcctctagaaattctaaaaagatcccactggagaagagggaactgaagttagccaggctgagacagctgatgcagaggtcactgagtgagtctgacacagactccaacaactctgaggaccccaagactaccccagtgaggaaggctgaccgaccaaggccgcagcccattgtagaaagcgtagagagtatggacagcgcagaaagcctgcacctgatgattaagaaacacaccttggcatcagggggacgcaggtttcctttcagcatcaaggcctccaaatccctggatggccacagcccatctcccacctcagagagcagcgaaccagacttagaatcccagtatccaggctcagggagtattcctccaaaccagccctctggtgaccctcagcagcccagccctgacagtactgctgcccagaaagttgccacaagtcccaagagtgccctcaagtctccatcttccaagcgtaggacatctcagaacttaaaactgagagttacctttgaggagcctgtggtgcagatggagcagcctagccttgaactgaatggagaaaaagacaaagataagggcaggactctccagcggacctccacaagtaacgaatcgggggatcaactgaaaaggccttttggagcctttcgatctatcatggagacactaagtggcaaccaaaacaataataataactaccaggcagccaaccagctgaaaacctctacattgcccttgacctcacttgggaggaagacagatgccaagggaaaccctgccagctccgctagcaaaggaaagaataaggcagaaatgtacagcagctgcatcaatctttcctctaacatgctgattgaagagcatctgtgtaacgacacacggcataatgacatcaatagaaaaatgaagaaatcctacagcataaagcacattgctgagccagagtcaaaagaactcttcttgtaaatcactttttaaattttctctcactgatgccctttggaaattattggaaatttctggactatcctctttggaaagagaaccatgaaaacaatgcctcaccagcagaagaacagaatatcaggatgccttaaatttatagtagtagactgtaaaagattcattttggggtgatatctgtatatataacttgtttttttaaaagatgccgtttaaaagcatgattgggaaaatgtatgttttttaagagtagattgattcaccctacccacaggacattcaccaagccactgataccattttatatttcatcaattgcatgagtatttgctaatgttgattgaacctccctttccccataatgtgggcagatttggctcagctccttcatgagatcaggtcagtggtattgtttctgtcaagagtgttttttctgtcatttctactttttgtataaaggaaataaaacaatgttaacagccacctataagcttggggcacct

SEQ ID NO: 188602 - DNA, 2359 bp, Homo sapiens
  Payload ID: 17101
  Gene Symbol: SNCAIP
  Gene Name: synuclein, alpha interacting protein
  ENST ID: ENST00000510658
  CDS Start-End: 139-339
aaagtgggaagcgcggacaaaaagtaggcggggaggagaggagagccccagctggggaaaagcaacggcagtcgaggtaaaaagagcgaaaggaatttataagtatttgaccgtactcaaaatgtgcaaggaagaataatggaagcccctgaataccttgatttggatgaaattgactttagtgatgacatatcttattcagtcacatcactcaagacgatcccagaactgtgccgaagatgtgatacgcaaaacgaagacagatcagaatggtcagttggagtgcgtacgctggatggtgagcgaaacagaagccattgcagaactgagttgttctaaggattttccaagccttattcattacgcaggttgctatggccagtcagagattcaaggattttcaattcacatctgaatgagaattttctcttgctacggaaaagattcttctgtggcttcttcagtttatgcaagaacagggcatctcgttggatgaagtagaccaggatggcaacagtgccgttcacgtagcctcacagcatggctaccttggatgcatacagaccttggttgaatatggagcaaatgtcaccatgcagaaccacgctggggaaaagccctcccagagcgccgagcggcaggggcacaccctgtgctccaggtacctggtggtggtggagacctgcatgtcgctggcctctcaagtggtgaagttaaccaagcagctaaaggaacaaacagtagaacgtgtcacgctgcagaaccaactccaacaatttctagaagcccagaaatcagagggcaagtcactcccttcttcacccagttcaccatcctcacctgcctccagaaagtcccagtggaaatctccagatgcagatgatgattctgtagccaaaagcaagccaggagtccaagaggggattcaggttcttggaagcctgtcagcctccagccgggctagacccaaagcaaaagatgaagattctgataaaatcttacgccagttattgggaaaggaaatctcagaaaatgtctgcacccaggaaaaactgtccttggaattccaggatgctcaggcttcctctagaaattctaaaaagatcccactggagaagagggaactgaagttagccaggctgagacagctgatgcagaggtcactgagtgagtctgacacagactccaacaactctgaggaccccaagactaccccagtgaggaaggctgaccgaccaaggccgcagcccattgtagaaagcgtagagagtatggacagcgcagaaagcctgcacctgatgattaagaaacacaccttggcatcagggggacgcaggtttcctttcagcatcaaggcctccaaatccctggatggccacagcccatctcccacctcagagagcagcgaaccagacttagaatcccagtatccaggctcagggagtattcctccaaaccagccctctggtgaccctcagcagcccagccctgacagtactgctgcccagaaagttgccacaagtcccaagagtgccctcaagtctccatcttccaagcgtaggacatctcagaacttaaaactgagagttacctttgaggagcctgtggtgcagatggagcagcctagccttgaactgaatggagaaaaagacaaagataagggcaggactctccagcggacctccacaagtaacgaatcgggggatcaactgaaaaggccttttggagcctttcgatctatcatggagacactaagtggcaaccaaaacaataataataactaccaggcagccaaccagctgaaaacctctacattgcccttgacctcacttgggaggaagacagatgccaagggaaaccctgccagctccgctagcaaaggaaagaataaggcagcataatgacatcaatagaaaaatgaagaaatcctacagcataaagcacattgctgagccagagtcaaaagaactcttcttgtaaatcactttttaaattttctctcactgatgccctttggaaattattggaaatttctggactatcctctttggaaagagaaccatgaaaacaatgcctcaccagcagaagaacagaatatcaggatgccttaaatttatagtagtagactgtaaaagattcattttggggtgatatctgtatatataacttgtttttttaaaagatgccgtttaaaagcatgattgggaaaatgtatgttttttaagagtagattgattcaccctacccacaggacattcaccaagccactgataccattttatatttcatcaattgcatgagtatttgctaatgttgattgaacctccctttccccataatgtgggcagatttggctcag

SEQ ID NO: 188603 - DNA, 586 bp, Homo sapiens
  Payload ID: 17101
  Gene Symbol: SNCAIP
  Gene Name: synuclein, alpha interacting protein
  ENST ID: ENST00000506272
  CDS Start-End: 105-586
agctggggaaaagcaacggcagtcgaggtaaaaagagcgaaaggtaaagaaagagcaggaatttataagtatttgaccgtactcaaaatgtgcaaggaagaataatggaagcccctgaataccttgatttggatgaaattgactttagtgatgacatatctgacaataggagtcaagggaacaggctacaaaagcttggattggaggacacagacagggaagatgcaatgggctttggttcccatagggccaaactgacagtagttgctgccctgggagcttgccattgtcctgagaatgagtattcagtcacatcactcaagacgatcccagaactgtgccgaagatgtgatacgcaaaacgaagacagatcagtttctagctctagctggaattgtggcatctcaactcttattacaaacacgcaaaagcccacaggaatcgctgatgtgtacagtaagttccgcccagtgaagcgggtttcgccactgaaacatcagccagagactctggagaacaatgaaagtgatgaccaaaagaaccagaaagtggttgagtaccagaaagggggtgagtctgacctggg

SEQ ID NO: 188604 - DNA, 1885 bp, Homo sapiens
  Payload ID: 17101
  Gene Symbol: SNCAIP
  Gene Name: synuclein, alpha interacting protein
  ENST ID: ENST00000504884
  CDS Start-End: 1-267
atggaagcccctgaataccttgatttggatgaaattgactttagtgatgacatatcttattcagtcacatcactcaagacgatcccagaactgtgccgaagatgtgatacgcaaaacgaagacagatcagccacacctagctgcagacaatctagacaaaattcacgacgaaaatggaaacaatctattacatattgcggcgtcacagggacacgcagagtgtctacagcacctcacttctttgatgggagaagactgcctcaatgagcgcaacactgagaagttgactccagcaggcctggccattaagaatggtcagttggagtgcgtacgctggatggtgagcgaaacagaagccattgcagaactgagttgttctaaggattttccaagccttattcattacgcaggttgctatggccaggaaaagattcttctgtggcttcttcagtttatgcaagaacagggcatctcgttggatgaagtagaccaggatggcaacagtgccgttcacgtagcctcacagcatggctaccttggatgcatacagaccttggttgaatatggagcaaatgtcaccatgcagaaccacgctggggaaaagccctcccagagcgccgagcggcaggggcacaccctgtgctccaggtacctggtggtggtggagacctgcatgtcgctggcctctcaagtggtgaagttaaccaagcagctaaaggaacaaacagtagaacgtgtcacgctgcagaaccaactccaacaatttctagaagcccagaaatcagagggcaagtcactcccttcttcacccagttcaccatcctcacctgcctccagaaagtcccagtggaaatctccagatgcagatgatgattctgtagccaaaagcaagccaggagtccaagaggggattcaggttcttggaagcctgtcagcctccagccgggctagacccaaagcaaaagatgaagattctgataaaatcttacgccagttattgggaaaggaaatctcagaaaatgtctgcacccaggaaaaactgtccttggaattccaggatgctcaggcttcctctagaaattctaaaaagatcccactggagaagagggaactgaagttagccaggctgagacagctgatgcagaggtcactgagtgagtctgacacagactccaacaactctgaggaccccaagactaccccagtgaggaaggctgaccgaccaaggccgcagcccattgtagaaagcgtagagagtatggacagcgcagaaagcctgcacctgatgattaagaaacacaccttggcatcagggggacgcaggtttcctttcagcatcaaggcctccaaatccctggatggccacagcccatctcccacctcagagagcagcgaaccagacttagaatcccagtatccaggctcagggagtattcctccaaaccagccctctggtgaccctcagcagcccagccctgacagtactgctgcccagaaagttgccacaagtcccaagagtgccctcaagtctccatcttccaagcgtaggacatctcagaacttaaaactgagagttacctttgaggagcctgtggtgcagatggagcagcctagccttgaactgaatggagaaaaagacaaagataagggcaggactctccagcggacctccacaagtaacgaatcgggggatcaactgaaaaggccttttggagcctttcgatctatcatggagacactaagtggcaaccaaaacaataataataactaccaggcagccaaccagctgaaaacctctacattgcccttgacctcacttgggaggaagacagatgccaagggaaaccctgccagctccgctagcaaaggaaagaataaggcagta

SEQ ID NO: 188605 - DNA, 1972 bp, Homo sapiens
  Payload ID: 17101
  Gene Symbol: SNCAIP
  Gene Name: synuclein, alpha interacting protein
  ENST ID: ENST00000509023
  CDS Start-End: 95-283
agtcagtcccttcgcgctcctgagccgccggcgcgccgggcgccccgggaatttataagtatttgaccgtactcaaaatgtgcaaggaagaataatggaagcccctgaataccttgatttggatgaaattgactttagtgatgacatatcttattcagtcacatcactcaagacgatcccagaactgtgccgaagatgtgatacgcaaaacgaagacagatcaggaaaagattcttctgtggcttcttcagtttatgcaagaacagggcatctcgttggatgaagtagaccaggatggcaacagtgccgttcacgtagcctcacagcatggctaccttggatgcatacagaccttggttgaatatggagcaaatgtcaccatgcagaaccacgctggggaaaagccctcccagagcgccgagcggcaggggcacaccctgtgctccaggtacctggtggtggtggagacctgcatgtcgctggcctctcaagtggtgaagttaaccaagcagctaaaggaacaaacagtagaacgtgtcacgctgcagaaccaactccaacaatttctagaagcccagaaatcagagggcaagtcactcccttcttcacccagttcaccatcctcacctgcctccagaaagtcccagtggaaatctccagatgcagatgatgattctgtagccaaaagcaagccaggagtccaagaggggattcaggttcttggaagcctgtcagcctccagccgggctagacccaaagcaaaagatgaagattctgataaaatcttacgccagttattgggaaaggaaatctcagaaaatgtctgcacccaggaaaaactgtccttggaattccaggatgctcaggcttcctctagaaattctaaaaagatcccactggagaagagggaactgaagttagccaggctgagacagctgatgcagaggtcactgagtgagtctgacacagactccaacaactctgaggaccccaagactaccccagtgaggaaggctgaccgaccaaggccgcagcccattgtagaaagcgtagagagtatggacagcgcagaaagcctgcacctgatgattaagaaacacaccttggcatcagggggacgcaggtttcctttcagcatcaaggcctccaaatccctggatggccacagcccatctcccacctcagagagcagcgaaccagacttagaatcccagtatccaggctcagggagtattcctccaaaccagccctctggtgaccctcagcagcccagccctgacagtactgctgcccagaaagttgccacaagtcccaagagtgccctcaagtctccatcttccaagcgtaggacatctcagaacttaaaactgagagttacctttgaggagcctgtggtgcagatggagcagcctagccttgaactgaatggagaaaaagacaaagataagggcaggactctccagcggacctccacaagtaacgaatcgggggatcaactgaaaaggccttttggagcctttcgatctatcatggagacactaagtggcaaccaaaacaataataataactaccaggcagccaaccagctgaaaacctctacattgcccttgacctcacttgggaggaagacagatgccaagggaaaccctgccagctccgctagcaaaggaaagaataaggcagcataatgacatcaatagaaaaatgaagaaatcctacagcataaagcacattgctgagccagagtcaaaagaactcttcttgtaaatcactttttaaattttctctcactgatgccctttggaaattattggaaatttctggactatcctctttggaaagagaaccatgaaaacaatgcctcaccagcagaagaacagaatatcaggatgccttaaatttatagtagtagactgtaaaagattcattttggggtgatatctgtatatataacttgtttttttaaaagatg

SEQ ID NO: 188606 - DNA, 723 bp, Homo sapiens
  Payload ID: 17101
  Gene Symbol: SNCAIP
  Gene Name: synuclein, alpha interacting protein
  ENST ID: ENST00000514467
  CDS Start-End: 319-723
gagcacagaacattccaggcaggcaaagccacccttgccctcctctccttggccacgtcctcaggggtgggcgagcttcggggggaggggtgggggtgaagactccgtgccaacgcaaaatactctgccaaaaggcttctcagacatgagtttcccagggcaatgcccaccttccgttccccgccttcccgagtctcttctcccagtttatgctggaaccctggaatggtctggggaccaatgagatggcagcggttaacgcttggatcacggaatttataagtatttgaccgtactcaaaatgtgcaaggaagaataatggaagcccctgaataccttgatttggatgaaattgactttagtgatgacatatcttattcagtcacatcactcaagacgatcccagaactgtgccgaagatgtgatacgcaaaacgaagacagatcagtttctagctctagctggaattgtggcatctcaactcttattacaaacacgcaaaagcccacaggaatcgctgatgtgtacagtaagttccgcccagtgaagcgggtttcgccactgaaacatcagccagagactctggagaacaatgaaagtgatgaccaaaagaaccagaaagtggttgagtaccagaaagggggtgagtctgacctgggcccccagcctcaggagcttggccctggagatggagtgggcggcccaccaggtaagagctctgag

SEQ ID NO: 188607 - DNA, 1708 bp, Homo sapiens
  Payload ID: 17101
  Gene Symbol: SNCAIP
  Gene Name: synuclein, alpha interacting protein
  ENST ID: ENST00000515215
  CDS Start-End: 1-201
atggaagcccctgaataccttgatttggatgaaattgactttagtgatgacatatcttattcagtcacatcactcaagacgatcccagaactgtgccgaagatgtgatacgcaaaacgaagacagatcagaatggtcagttggagtgcgtacgctggatggtgagcgaaacagaagccattgcagaactgagttgttctaaggattttccaagccttattcattacgcaggttgctatggccaggaaaagattcttctgtggcttcttcagtttatgcaagaacagggcatctcgttggatgaagtagaccaggatggcaacagtgccgttcacgtagcctcacagcatggctaccttggatgcatacagaccttggttgaatatggagcaaatgtcaccatgcagaaccacgctggggaaaagccctcccagagcgccgagcggcaggggcacaccctgtgctccaggtacctggtggtggtggagacctgcatgtcgctggcctctcaagtggtgaagttaaccaagcagctaaaggaacaaacagtagaacgtgtcacgctgcagaaccaactccaacaatttctagaagcccagaaatcagagggcaagtcactcccttcttcacccagttcaccatcctcacctgcctccagaaagtcccagtggaaatctccagatgcagatgatgattctgtagccaaaagcaagccaggagtccaagaggggattcaggttcttggaagcctgtcagcctccagccgggctagacccaaagcaaaagatgaagattctgataaaatcttacgccagttattgggaaaggaaatctcagaaaatgtctgcacccaggaaaaactgtccttggaattccaggatgctcaggcttcctctagaaattctaaaaagatcccactggagaagagggaactgaagttagccaggctgagacagctgatgcagaggtcactgagtgagtctgacacagactccaacaactctgaggaccccaagactaccccagtgaggaaggctgaccgaccaaggccgcagcccattgtagaaagcgtagagagtatggacagcgcagaaagcctgcacctgatgattaagaaacacaccttggcatcagggggacgcaggtttcctttcagcatcaaggcctccaaatccctggatggccacagcccatctcccacctcagagagcagcgaaccagacttagaatcccagtatccaggctcagggagtattcctccaaaccagccctctggtgaccctcagcagcccagccctgacagtactgctgcccagaaagttgccacaagtcccaagagtgccctcaagtctccatcttccaagcgtaggacatctcagaacttaaaactgagagttacctttgaggagcctgtggtgcagatggagcagcctagccttgaactgaatggagaaaaagacaaagataagggcaggactctccagcggacctccacaagtaacgaatcgggggatcaactgaaaaggccttttggagcctttcgatctatcatggagacactaagtggcaaccaaaacaataataataactaccaggcagccaaccagctgaaaacctctacattgcccttgacctcacttgggaggaagacagatgccaagggaaaccctgccagctccgctagcaaaggaaagaataaggcagcataa

SEQ ID NO: 188608 - DNA, 559 bp, Homo sapiens
  Payload ID: 17101
  Gene Symbol: SNCAIP
  Gene Name: synuclein, alpha interacting protein
  ENST ID: ENST00000509652
  CDS Start-End: 518-559
attgttcttttcatttgcccgcctcatgtggttcttattcttgctgtcacccgggatcttatcgcaggcagggatgggcagttccgcggctcggaaaagctgagataaggaggggcgaagtaatagtaatagcgacagtactaacaacggtaataatagctgtagaaaagggacgtctggtgttgctgccgcccctcgctcatcagcaccagctccccgactgccctgtccagcccgggctccgccagcctccctctagtgctgttctgcgtcccaggctggtccgcgtggatttcagaggggaatgtttctctcttggccttgtctcttggcgatgactttcatctgcaggtgagacagggtttcaccatgttgcccaggctggtctcgaactcctggactcaagcagtctgtccatctcagcctcccaaagtgctgggattacaggtgtgagccaccacactggccaaggaatttataagtatttgaccgtactcaaaatgtgcaaggaagaataatggaagcccctgaataccttgatttggatgaaattgacttt

SEQ ID NO: 188609 - DNA, 2729 bp, Homo sapiens
  Payload ID: 17101
  Gene Symbol: SNCAIP
  Gene Name: synuclein, alpha interacting protein
  ENST ID: ENST00000542191
  CDS Start-End: 207-548
cgcccgcggccgggccgcattgtgacgtagcggggccgcggcagcgcctccaccgcccgcctacttcggctgaggctgttctgctcctgccgctgcggtccgtcggtcggtcagtcagtcccttcgcgctcctgagccgccggcgcgccgggcgccccgggaatttataagtatttgaccgtactcaaaatgtgcaaggaagaataatggaagcccctgaataccttgatttggatgaaattgactttagtgatgacatatctgacaataggagtcaagggaacaggctacaaaagcttggattggaggacacagacagggaagatgcaatgggctttggttcccatagggccaaactgacagtagttgctgccctgggagcttgccattgtcctgagaatgagtattcagtcacatcactcaagacgatcccagaactgtgccgaagatgtgatacgcaaaacgaagacagatcagaatggtcagttggagtgcgtacgctggatggtgagcgaaacagaagccattgcagaactgagttgttctaaggattttccaagccttattcattacgcaggttgctatggccaggaaaagattcttctgtggcttcttcagtttatgcaagaacagggcatctcgttggatgaagtagaccaggatggcaacagtgccgttcacgtagcctcacagcatggctaccttggatgcatacagaccttggttgaatatggagcaaatgtcaccatgcagaaccacgctggggaaaagccctcccagagcgccgagcggcaggggcacaccctgtgctccaggtacctggtggtggtggagacctgcatgtcgctggcctctcaagtggtgaagttaaccaagcagctaaaggaacaaacagtagaacgtgtcacgctgcagaaccaactccaacaatttctagaagcccagaaatcagagggcaagtcactcccttcttcacccagttcaccatcctcacctgcctccagaaagtcccagtggaaatctccagatgcagatgatgattctgtagccaaaagcaagccaggagtccaagaggggattcaggttcttggaagcctgtcagcctccagccgggctagacccaaagcaaaagatgaagattctgataaaatcttacgccagttattgggaaaggaaatctcagaaaatgtctgcacccaggaaaaactgtccttggaattccaggatgctcaggcttcctctagaaattctaaaaagatcccactggagaagagggaactgaagttagccaggctgagacagctgatgcagaggtcactgagtgagtctgacacagactccaacaactctgaggaccccaagactaccccagtgaggaaggctgaccgaccaaggccgcagcccattgtagaaagcgtagagagtatggacagcgcagaaagcctgcacctgatgattaagaaacacaccttggcatcagggggacgcaggtttcctttcagcatcaaggcctccaaatccctggatggccacagcccatctcccacctcagagagcagcgaaccagacttagaatcccagtatccaggctcagggagtattcctccaaaccagccctctggtgaccctcagcagcccagccctgacagtactgctgcccagaaagttgccacaagtcccaagagtgccctcaagtctccatcttccaagcgtaggacatctcagaacttaaaactgagagttacctttgaggagcctgtggtgcagatggagcagcctagccttgaactgaatggagaaaaagacaaagataagggcaggactctccagcggacctccacaagtaacgaatcgggggatcaactgaaaaggccttttggagcctttcgatctatcatggagacactaagtggcaaccaaaacaataataataactaccaggcagccaaccagctgaaaacctctacattgcccttgacctcacttgggaggaagacagatgccaagggaaaccctgccagctccgctagcaaaggaaagaataaggcagaaatgtacagcagctgcatcaatctttcctctaacatgctgattgaagagcatctgtgtaacgacacacggcataatgacatcaatagaaaaatgaagaaatcctacagcataaagcacattgctgagccagagtcaaaagaactcttcttgtaaatcactttttaaattttctctcactgatgccctttggaaattattggaaatttctggactatcctctttggaaagagaaccatgaaaacaatgcctcaccagcagaagaacagaatatcaggatgccttaaatttatagtagtagactgtaaaagattcattttggggtgatatctgtatatataacttgtttttttaaaagatgccgtttaaaagcatgattgggaaaatgtatgttttttaagagtagattgattcaccctacccacaggacattcaccaagccactgataccattttatatttcatcaattgcatgagtatttgctaatgttgattgaacctccctttccccataatgtgggcagatttggctcagctccttcatgagatcaggtcagtggtattgtttctgtcaagagtgttttttctgtcatttctactttttgtataaaggaaataaaacaatgttaacagccacctataagcttggggcacctactttctaacaaatctgtgatgtt

SEQ ID NO: 188610 - DNA, 1383 bp, Homo sapiens
  Payload ID: 17102
  Gene Symbol: SNCB
  Gene Name: synuclein, beta
  Uniprot ID: Q16143
  ENST ID: ENST00000310112
  CDS Start-End: 252-656
ggtccaccccggcctggcctagcggagcccccgcgtccgcccgccgcagccgccgctccatccccagccccggccccgcatccaggcgggtcctggatattcgcgccgaacccagcactccggttcgacggggctgcagtttgcagggcccggataaccgaggcagtggcccctcccgcgtccccaggtttcaaggacgctaggactctccgcggccctgaggcttcgcactggggagtggggccgccaggatggacgtgttcatgaagggcctgtccatggccaaggagggcgttgtggcagccgcggagaaaaccaagcagggggtcaccgaggcggcggagaagaccaaggagggcgtcctctacgtcggaagcaagacccgagaaggtgtggtacaaggtgtggcttcagtggctgaaaaaaccaaggaacaggcctcacatctgggaggagctgtgttctctggggcagggaacatcgcagcagccacaggactggtgaagagggaggaattccctactgatctgaagccagaggaagtggcccaggaagctgctgaagaaccactgattgagcccctgatggagccagaaggggagagttatgaggacccaccccaggaggaatatcaggagtatgagccagaggcgtaggggcccaggagagcccccaccagcagcacaattctgtccctgtccctgccccgccccccagagccagggctgtccttagactccttctccccaatcacgagatcttccttccgctctgaggcaaccccctcggagcctgtgttagtgtctgtccatctgtctgtcctacccgcccgcgtccaaccccggggcatggacagggccagggttgcggtcgcggctgggagcctcgcccctccagtgttgcctcctcccatccagcgtctgcgcggatgtagcatgttctatgtgtttttaaacgaagatccgagcgacggctcctccccgatccccgacagtggctctccaagcggcccccgggcagccccagagcaccccgcccgactcccattaacctcgagaacctttttttttttaaccaaaaccaggagccaggctgtgccatgtcccccgccccccatcccagccggcccggtccgaacgcgggcgtcgtgtgttgtgattgtggcatggagagtccccatcccccccatgtgagcgtgtcccgggcgggtgggcccggccgcccccgagagtccatgaataaagctaatctgtctgtagccagagccgcaccggcagggctgggctgggcgccgggtgggggcgacacgtggcggcgagtcttccaggtcccagcctacccctctgtgctctttggggtctggcacacacagcccaggtacaa

SEQ ID NO: 188611 - DNA, 1234 bp, Homo sapiens
  Payload ID: 17102
  Gene Symbol: SNCB
  Gene Name: synuclein, beta
  Uniprot ID: Q16143
  ENST ID: ENST00000393693
  CDS Start-End: 260-664
tgccgcagcgccggagccggagccggagccggagcgcgcgagctcgcagggcgcgaggaacgagcggtggctggctacgcacccgagacccgggcactgctgcgctcctgctcaggacccgcgacccgagcgcctgatcccggccctatcccccctccggcccctggtccaccccggcctggcctagcggagcccccgcgtccgcccgccgcagccgccgctccatccccagccccggccccgcatccaggccgccaggatggacgtgttcatgaagggcctgtccatggccaaggagggcgttgtggcagccgcggagaaaaccaagcagggggtcaccgaggcggcggagaagaccaaggagggcgtcctctacgtcggaagcaagacccgagaaggtgtggtacaaggtgtggcttcagtggctgaaaaaaccaaggaacaggcctcacatctgggaggagctgtgttctctggggcagggaacatcgcagcagccacaggactggtgaagagggaggaattccctactgatctgaagccagaggaagtggcccaggaagctgctgaagaaccactgattgagcccctgatggagccagaaggggagagttatgaggacccaccccaggaggaatatcaggagtatgagccagaggcgtaggggcccaggagagcccccaccagcagcacaattctgtccctgtccctgccccgccccccagagccagggctgtccttagactccttctccccaatcacgagatcttccttccgctctgaggcaaccccctcggagcctgtgttagtgtctgtccatctgtctgtcctacccgcccgcgtccaaccccggggcatggacagggccagggttgcggtcgcggctgggagcctcgcccctccagtgttgcctcctcccatccagcgtctgcgcggatgtagcatgttctatgtgtttttaaacgaagatccgagcgacggctcctccccgatccccgacagtggctctccaagcggcccccgggcagccccagagcaccccgcccgactcccattaacctcgagaacctttttttttttaaccaaaaccaggagccaggctgtgccatgtcccccgccccccatcccagccggcccggtccgaacgcgggcgtcgtgtgttgtgattgtggcatggagagtccccatcccccccatgtgagcgtgtcccgggcgggtgggcccggccgccccc

SEQ ID NO: 188612 - DNA, 552 bp, Homo sapiens
  Payload ID: 17102
  Gene Symbol: SNCB
  Gene Name: synuclein, beta
  Uniprot ID: Q16143
  ENST ID: ENST00000506696
  CDS Start-End: 122-526
gtgcatgaccgtgtgactgtgccgtgcgtgtacaggcgggtcctggatattcgcgccgaacccagcactccggttcgacggggctgcagtttgcagggcccggataaccgaggccgccaggatggacgtgttcatgaagggcctgtccatggccaaggagggcgttgtggcagccgcggagaaaaccaagcagggggtcaccgaggcggcggagaagaccaaggagggcgtcctctacgtcggaagcaagacccgagaaggtgtggtacaaggtgtggcttcagtggctgaaaaaaccaaggaacaggcctcacatctgggaggagctgtgttctctggggcagggaacatcgcagcagccacaggactggtgaagagggaggaattccctactgatctgaagccagaggaagtggcccaggaagctgctgaagaaccactgattgagcccctgatggagccagaaggggagagttatgaggacccaccccaggaggaatatcaggagtatgagccagaggcgtaggggcccaggagagcccccaccagcag

SEQ ID NO: 188613 - DNA, 730 bp, Homo sapiens
  Payload ID: 17102
  Gene Symbol: SNCB
  Gene Name: synuclein, beta
  Uniprot ID: Q16143
  ENST ID: ENST00000510387
  CDS Start-End: 196-600
gaccgtgtgactgtgccgtgcgtgtacaggcgggtcctggatattcgcgccgaacccagcactccggttcgacggggctgcagtttgcagggcccggataaccgaggcagtggcccctcccgcgtccccaggtttcaaggacgctaggactctccgcggccctgaggcttcgcactggggagtggggccgccaggatggacgtgttcatgaagggcctgtccatggccaaggagggcgttgtggcagccgcggagaaaaccaagcagggggtcaccgaggcggcggagaagaccaaggagggcgtcctctacgtcggaagcaagacccgagaaggtgtggtacaaggtgtggcttcagtggctgaaaaaaccaaggaacaggcctcacatctgggaggagctgtgttctctggggcagggaacatcgcagcagccacaggactggtgaagagggaggaattccctactgatctgaagccagaggaagtggcccaggaagctgctgaagaaccactgattgagcccctgatggagccagaaggggagagttatgaggacccaccccaggaggaatatcaggagtatgagccagaggcgtaggggcccaggagagcccccaccagcagcacaattctgtccctgtccctgccccgccccccagagccagggctgtccttagactccttctccccaatcacgagatcttccttccgctctgaggcaaccccct

SEQ ID NO: 188614 - DNA, 1407 bp, Homo sapiens
  Payload ID: 17102
  Gene Symbol: SNCB
  Gene Name: synuclein, beta
  ENST ID: ENST00000614675
  CDS Start-End: 444-806
cgccagcgggggcgctgagctcagagctgccgcagcgccggagccggagccggagccggagcgcgcgagctcgcagggcgcgaggaacgagcggtggctggctacgcacccgagacccgggcactgctgcgctcctgctcaggacccgcgacccgagcgcctgatcccggccctatcccccctccggcccctggtccaccccggcctggcctagcggagcccccgcgtccgcccgccgcagccgccgctccatccccagccccggccccgcatccaggcgggtcctggatattcgcgccgaacccagcactccggttcgacggggctgcagtttgcagggcccggataaccgaggcagtggcccctcccgcgtccccaggtttcaaggacgctaggactctccgcggccctgaggcttcgcactggggagtggggccgccaggatggacgtgttcatgaagggcctgtccatggccaaggagggcgttgtggcagccgcggagaaaaccaagcagggggtcaccgaggcggcggagaagaccaaggagggcgtcctctacgtcgtggctgaaaaaaccaaggaacaggcctcacatctgggaggagctgtgttctctggggcagggaacatcgcagcagccacaggactggtgaagagggaggaattccctactgatctgaagccagaggaagtggcccaggaagctgctgaagaaccactgattgagcccctgatggagccagaaggggagagttatgaggacccaccccaggaggaatatcaggagtatgagccagaggcgtaggggcccaggagagcccccaccagcagcacaattctgtccctgtccctgccccgccccccagagccagggctgtccttagactccttctccccaatcacgagatcttccttccgctctgaggcaaccccctcggagcctgtgttagtgtctgtccatctgtctgtcctacccgcccgcgtccaaccccggggcatggacagggccagggttgcggtcgcggctgggagcctcgcccctccagtgttgcctcctcccatccagcgtctgcgcggatgtagcatgttctatgtgtttttaaacgaagatccgagcgacggctcctccccgatccccgacagtggctctccaagcggcccccgggcagccccagagcaccccgcccgactcccattaacctcgagaacctttttttttttaaccaaaaccaggagccaggctgtgccatgtcccccgccccccatcccagccggcccggtccgaacgcgggcgtcgtgtgttgtgattgtggcatggagagtccccatcccccccatgtgagcgtgtcccgggcgggtgggcccggccgcccccgagagtccatgaataaagctaatctgtctgt

SEQ ID NO: 188615 - DNA, 684 bp, Homo sapiens
  Payload ID: 17103
  Gene Symbol: SNCG
  Gene Name: synuclein, gamma (breast cancer-specific protein 1)
  ENST ID: ENST00000348795
  CDS Start-End: 69-449
caagcccgcagctcgcagggagatccagctccgtcctgcctgcagcagcacaaccctgcacacccaccatggatgtcttcaagaagggcttctccatcgccaaggagggcgtggtgggtgcggtggaaaagaccaagcagggggtgacggaagcagctgagaagaccaaggagggggtcatgtatgtgggagccaagaccaaggagaatgttgtacagagcgtgacctcaggcctgccttggggctggggctggggtggaggccagccagtgtcctcccatagtggccgagaagaccaaggagcaggccaacgccgtgagcgaggctgtggtgagcagcgtcaacactgtggccaccaagaccgtggaggaggcggagaacatcgcggtcacctccggggtggtgcgcaaggaggacttgaggccatctgccccccaacaggagggtgaggcatccaaagagaaagaggaagtggcagaggaggcccagagtgggggagactagagggctacaggccagcgtggatgacctgaagagcgctcctctgccttggacaccatcccctcctagcacaaggagtgcccgccttgagtgacatgcggctgcccacgctcctgccctcgtctccctggccacccttggcctgtccacctgtgctgctgcaccaacctcactgccctccct

SEQ ID NO: 188616 - DNA, 701 bp, Homo sapiens
  Payload ID: 17103
  Gene Symbol: SNCG
  Gene Name: synuclein, gamma (breast cancer-specific protein 1)
  Uniprot ID: O76070
  ENST ID: ENST00000372017
  CDS Start-End: 43-426
agctccgtcctgcctgcagcagcacaaccctgcacacccaccatggatgtcttcaagaagggcttctccatcgccaaggagggcgtggtgggtgcggtggaaaagaccaagcagggggtgacggaagcagctgagaagaccaaggagggggtcatgtatgtgggagccaagaccaaggagaatgttgtacagagcgtgacctcagtggccgagaagaccaaggagcaggccaacgccgtgagcgaggctgtggtgagcagcgtcaacactgtggccaccaagaccgtggaggaggcggagaacatcgcggtcacctccggggtggtgcgcaaggaggacttgaggccatctgccccccaacaggagggtgaggcatccaaagagaaagaggaagtggcagaggaggcccagagtgggggagactagagggctacaggccagcgtggatgacctgaagagcgctcctctgccttggacaccatcccctcctagcacaaggagtgcccgccttgagtgacatgcggctgcccacgctcctgccctcgtctccctggccacccttggcctgtccacctgtgctgctgcaccaacctcactgccctccctcggccccacccaccctctggtccttctgaccccacttatgctgctgtgaattttttttttaaatgattccaaataaaacttgagcccactcctgc

SEQ ID NO: 188617 - DNA, 2862 bp, Homo sapiens
  Payload ID: 17104
  Gene Symbol: SYS1
  Gene Name: Sys1 golgi trafficking protein
  Uniprot ID: Q8N2H4
  ENST ID: ENST00000243918
  CDS Start-End: 292-762
ttctgcgcatgtgctcagttcgctatccggctgcttgtacctggttcaggaggttcaggcagaggttgcacccactacgcctgcgcaacctcagccccgcccctccgctgctttccccggaaacgtttctttcctacgcagccgctcctgccgccgtggtcgctggagctttgcctctctaggccggcagcgcctctcctccatggtcctgtctgtcagcgctgttttgggagcccgccggtgaggccgggccacgctcagacacttcgatcgtcgagtctgtcactgggcatggcgggtcagttccgcagctacgtgtgggacccgctgctgatcctgtcgcagatcgtcctcatgcagaccgtgtattacggctcgctgggcctgtggctggcgctggtggacgggctagtgcgaagcagcccctcgctggaccagatgttcgacgccgagatcctgggcttttccacccctccaggccggctctccatgatgtccttcatcctcaacgccctcacctgtgccctgggcttgctgtacttcatccggcgaggaaagcagtgtctggatttcactgtcactgtccatttctttcacctcctgggctgctggttctacagctcccgtttcccctcggcgctgacctggtggctggtccaagccgtgtgcattgcactcatggctgtcatcggggagtacctgtgcatgcggacggagctcaaggagatacccctcaactcagcccctaaatccaatgtctagaatcaggccctttggacatcctgctgacacttgggccccttaacaccttgggctgctcagaccctccagatgaggtccagcccagatctgagaggaaccctggaaatgtgaagtctctgttggtttgggagagatagtgagggcctgtcaaagaaggcaggtagcagtcagcatgacagctgcaagaatgacctctgtctgttgaagccttggtatctgagaggtcaggaaggggacctctttgagggtaataacagaattggaaccatgccactcttgagccacaatacctgtcaccagcctgttgttttaagagagaaaaaaaatcaaggatatctgattggagcaaaccacttctttagtcatctgtcttacccccctgggacagctgttacctttgcagtgttgccgaatcacagcagttacctttgcagtgttgccgaatcacagcagttctgttggagaaacgcttggtttccggatccagagccacagaaagaaatgtaggtgtgaagtattaggctgctgtcagggagaggatggcagatggaggcatcaagcacaaggaaaatgcacaacctgtgccctgttatacacacgttcatgtgcacccaagaacctatgactttcttccagttccttctaccaggtccccatcctgctgccagctctcaacatagcaggccataggacccagagaagaatcccagcgttgctcaaagtctaaccatcataaagacactgcctgtcttctaggaatgaccaggcacccagctcccactggactccaattttttttcctgccttatttagaattctttggcgggaagggtatgatgggttcccagagacaagaagcccaaccttctggcctgggctgtgctgatagtgctgagggagataggaatttgctgctaagatttttctttggggtggagtttcctctgtgaggggcttgcagctatccttcctgtgtatacaaatacagtattttccatggttctgcctgcacttactttgtaatgccacggttgagattgagagagatcagcgcagccaggcaagggaactttaaagaattattaggccaccttctccctttcctggaccccagagtcattcctccatttggttaaaatactcagtgcagggaactcttacatcctgtctccttcacttgcagcgtcccctgctatgcctcaggtgaaccacataattcttgggtttccgttcctacttgctagtgatttctgaacatgttcaatggagcggcacacagtctagacccacttccgcattgaaaccttcactgttcctctttggtttcttcagagctttcccaagagagctgtcagttttcagctgtcagtaacacaaatgagtttatggtaacacaaatgagttttgctatctctctgagaagctcatctgacctcctgactctcagccctacagagtagggagttgatgctgacaggatgaagatttaggaataaatatgcctgggaagagactgggaaggttctagggtgaggcacctcagtaactcatggtaccttggccaagttggaaggaagcagtttgttaatgaggcacagtaatcctggctgcagggtctaggaggtaagaccagctgggatgaccttccctgggttaatcaatttccctctagacaacacaaactgcaggcatgtgactaactttgaaagaacacccatcatgtggctgctgtcacccttgaccagccgtggtggtggttactccatctgtggttggagcgcctctttgggattcacttcaaggtcttgtgcctatttttctgcatatcttctgtgatgacaaatctctgtcccctgagtgttaatttgatttttagaaatggccaaaagtcacgtgatccaaactttttttcagtaatatggagactgagctgcatggtagttggggatcaaaaatatgtgaccttaatgagatttttatgatttctaaagtaacaataaaagcagtttttagagttgagttccagagagggcagggcaatggcagtgacatgtttgtcattttaataataaataacatctattgagtgcttaagaggtg

SEQ ID NO: 188618 - DNA, 813 bp, Homo sapiens
  Payload ID: 17104
  Gene Symbol: SYS1
  Gene Name: Sys1 golgi trafficking protein
  Uniprot ID: Q8N2H4
  ENST ID: ENST00000372727
  CDS Start-End: 244-714
ctggaacaacttacttcccgtctttccacttcagagagggggaacctaggatcaatgaagttgatgggttttcgtctgctggagtaggaataaccgctcctgccgccgtggtcgctggagctttgcctctctaggccggcagcgcctctcctccatggtcctgtctgtcagcgctgttttgggagcccgccggtgaggccgggccacgctcagacacttcgatcgtcgagtctgtcactgggcatggcgggtcagttccgcagctacgtgtgggacccgctgctgatcctgtcgcagatcgtcctcatgcagaccgtgtattacggctcgctgggcctgtggctggcgctggtggacgggctagtgcgaagcagcccctcgctggaccagatgttcgacgccgagatcctgggcttttccacccctccaggccggctctccatgatgtccttcatcctcaacgccctcacctgtgccctgggcttgctgtacttcatccggcgaggaaagcagtgtctggatttcactgtcactgtccatttctttcacctcctgggctgctggttctacagctcccgtttcccctcggcgctgacctggtggctggtccaagccgtgtgcattgcactcatggctgtcatcggggagtacctgtgcatgcggacggagctcaaggagatacccctcaactcagcccctaaatccaatgtctagaatcaggccctttggacatcctgctgacacttgggccccttaacaccttgggctgctcagaccctccagatgaggtccagcccagatctgagaggaacc

SEQ ID NO: 188619 - DNA, 941 bp, Homo sapiens
  Payload ID: 17104
  Gene Symbol: SYS1
  Gene Name: Sys1 golgi trafficking protein
  ENST ID: ENST00000457307
  CDS Start-End: 90-263
atggtcctgtctgtcagcgctgttttgggagcccgccggtgaggccgggccacgctcagacacttcgatcgtcgagtctgtcactgggcatggcgggtcagttccgcagctacgtgtgggacccgctgctgatcctgtcgcagatcgtcctcatgcagaccgtgtattacggctcgctgggcctgtggctggcgctggtggacgggctagtgcgaagcagcccctcgctggaccagatgttcgacgccgaggaggcttgctgagatcctggggctctgccaagtcacttctccagtatatttccatttgtgattccccctcagatcctgggcttttccacccctccaggccggctctccatgatgtccttcatcctcaacgccctcacctgtgccctgggcttgctgtacttcatccggcgaggaaagcagtgtctggatttcactgtcactgtccatttctttcacctcctgggctgctggttctacagctcccgtttcccctcggcgctgacctggtggctggtccaagccgtgtgcattgcactcatggctgtcatcggggagtacctgtgcatgcggacggagctcaaggagatacccctcaactcagcccctaaatccaatgtctagaatcaggccctttggacatcctgctgacacttgggccccttaacaccttgggctgctcagaccctccagatgaggtccagcccagatctgagaggaaccctggaaatgtgaagtctctgttggtttgggagagatagtgagggcctgtcaaagaaggcaggtagcagtcagcatgacagctgcaagaatgacctctgtctgttgaagccttggtatctgagaggtcaggaaggggacctctttgagggtaataacagaattggaaccatgccactcttgagccacaatacctgtcaccagcctgttgtt

SEQ ID NO: 188620 - DNA, 795 bp, Homo sapiens
  Payload ID: 17104
  Gene Symbol: SYS1
  Gene Name: Sys1 golgi trafficking protein
  ENST ID: ENST00000414310
  CDS Start-End: 278-685
ttcccgtctttccacttcagagagggggaacctaggatcaatgaagttgatgggttttcgtctgctggagtaggaataaccgctcctgccgccgtggtcgctggagctttgcctctctaggccggcagcgcctctcctccatggtcctgtctgtcagcgctgttttgggagcccgccggtgaggccgggccacgctcagacacttcgatcgtcgagtctgtcactgttccgcagctacgtgtgggacccgctgctgatcctgtcgcagatcgtcctcatgcagaccgtgtattacggctcgctgggcctgtggctggcgctggtggacgggctagtgcgaagcagcccctcgctggaccagatgttcgacgccgagatcctgggcttttccacccctccaggccggctctccatgatgtccttcatcctcaacgccctcacctgtgccctgggcttgctgtacttcatccggcgaggaaagcagtgtctggatttcactgtcactgtccatttctttcacctcctgggctgctggttctacagctcccgtttcccctcggcgctgacctggtggctggtccaagccgtgtgcattgcactcatggctgtcatcggggagtacctgtgcatgcggacggagctcaaggagatacccctcaactcagcccctaaatccaatgtctagaatcaggccctttggacatcctgctgacacttgggccccttaacaccttgggctgctcagaccctccagatgaggtccagcccagatctgagaggaaccctggaaatgtg

SEQ ID NO: 188621 - DNA, 433 bp, Homo sapiens
  Payload ID: 17104
  Gene Symbol: SYS1
  Gene Name: Sys1 golgi trafficking protein
  ENST ID: ENST00000453003
  CDS Start-End: 79-433
agtccctcctcccgggcggggcgacgttgccatggagacaggccgctggctgaggcccggctcgtgtccctgcagggcatggcgggtcagttccgcagctacgtgtgggacccgctgctgatcctgtcgcagatcgtcctcatgcagaccgtgtattacggctcgctgggcctgtggctggcgctggtggacgggctagtgcgaagcagcccctcgctggaccagatgttcgacgccgagatcctgggcttttccacccctccaggccggctctccatgatgtccttcatcctcaacgccctcacctgtgccctgggcttgctgtacttcatccggcgaggaaagcagtgtctggatttcactgtcactgtccatttctttcacctcctgggctgctggttctacagctcccgtttcccctcggcgctgacct

SEQ ID NO: 188622 - DNA, 2915 bp, Homo sapiens
  Payload ID: 17104
  Gene Symbol: SYS1
  Gene Name: Sys1 golgi trafficking protein
  Uniprot ID: Q8N2H4
  ENST ID: ENST00000426004
  CDS Start-End: 181-411
tttccccggaaacgtttctttcctacgcagccgctcctgccgccgtggtcgctggagctttgcctctctaggccggcagcgcctctcctccatggtcctgtctgtcagcgctgttttgggagcccgccggtgaggccgggccacgctcagacacttcgatcgtcgagtctgtcactgggcatggcgggtcagttccgcagctacgtgtgggacccgctgctgatcctgtcgcagatcgtcctcatgcagaccgtgtattacggctcgctgggcctgtggctggcgctggtggacgggctagtgcgaagcagcccctcgctggaccagatgttcgacgccgagatcctgggcttttccacccctccaggccggctctccatgatgtccttcatcctcaacgccctcacctgacagggtcttgctctcttgcccaggctggagtgcagtggcgaagtcacagctcactgcagcctcgactcctgggcttaagcgatcctccgacctcagcctcctgagtagctgatactacaagcgcaaggcaccacatctggctaatttttaaattttttgtagagacagtgtctcattatgttgcccaggatggtcttgaactcctggcctcaagcagtcttcctgcctcgacctcccaaggtgctgggattacaggcgtgagccaccatgcctagcctgttcagagtaaatcttatttgaggcatgaatcaatcaaacataaatagagagttgaattgatcttagagggaatgggatgcagcaaagccctacttgaccatctcccccctcccacatttggaaatccttaaacccacttatgtaggcctctgactgtgagattcagagccacagcagtttccacctctgctaaggccttcaggcagtgagatggctcacttcagtgcccctccttccacacatctcctagctgtatcctgagacgcctcaacctagtcactacccttctgtatgatgttggtctaaggcttccccctctctggacatgaaggcggagcctcccagcactaccagccacacaccactcaagactccagatcctgaaccctgactctggggcccagctctgggcctggcttggggcttgcatctcacctagcctggcagtgttgttgtcacacccaccttgtatggatgccacataggcatttcaagtgatgcggagcagaagcgggtgcagcggcgcttgacccaacgcagggtggaggatctgcacatcaccctgggcgccgggaggtggattcgtgtgggcagcccctcaaaccagatccactggtcggctacatccagctgcttcatgtgccccatgggagttctattgcggtagggcttaatgaagatgactcgggggccctcggtgagtggttgcctcccctggactccagggttcaagctatcatccctcgatgtccttggaacctcaggctctatatgcttttctttccgtggcattgccgccaatgacgttttctccttgttcctcatccctgactgcacctgggacttccactccttgtactcttttttcttagggtcccctgtggactctaatttcttggacttgagttccttctcggagcacccgatctcctggaactcttcattattttgttttgttttattgcaggcactgttttccctggcagggagaggaaaggcagtcagcacagcaggaccgaggccctggttcccgagacagttgctatgtagccagctcaggggagcctgttaagaaaggctagaggggcctgcaaagaaacttctctactgcccagaggccttgtgctggtgtgaggaggtgtgatgagcactagcagagggatgtgagagattgggaaggtgaaagccatgactagtagttaaggcccctaagaatgaatattgtctacatcatctgccactagattagggttctgtctctctggacttcagctgggagggtgaacagtccagtagtttttctaaattgtgctccaagaaccttagggttctgaggaggtgtctcaatgtcacctcccctgacccactggggcaggatacctctccccagctcataacaacacaattggggcttggaaatagatatttgaacagaggtttcactgctttaataaagttggaaaactgttcaagaccagcctgggcaacatggtgagactctgtctccatacaaaaaaaaaatttttaagttggaaaatgatggggctagatgatcctgatccttctagctctatgtttcctgattgcctgcgactagaggccaaatcagaaagaggagcccagaaaggtggccttgacagaaatattaaatgctgagactttcccaaagggtgtctgtaacagactgggccccctgcaaacccccagtggcaacaccatcctagccaagggcgtggagagagatgaggccttgggctgcagataatggcaatactgtgatgataataatggctcccgctgattgagtcctcgctctatgccagactcgggacccttacaacttgggatccttactatttctgtgaagtagaaggcagtgaaacagagtggcttacagagcacaggtgttggattcagacaaacgggctcagattctgcttctgcctcttaccacctgtgtgatttgggcaagatatttaacctctcagagccttagcttccttatctgtaaaactaggataattctgtctacctaacaggattgttgtgaagaataaactaaatgggaaaattcttaagtgcttaacactgtaggatggtacttagcaggcaccaatcaatgttagctttcttaatactgtcatgtgacttatgaggaaacggtttgaacttgtctcggaggcatggtaaaaaaaaataaaaataaaaataaattaataaagaaa

SEQ ID NO: 188623 - DNA, 1313 bp, Homo sapiens
  Payload ID: 17105
  Gene Symbol: SYS1-DBNDD2
  Gene Name: SYS1-DBNDD2 readthrough (NMD candidate)
  ENST ID: ENST00000419593
  CDS Start-End: 120-356
gcctctctaggccggcagcgcctctcctccatggtcctgtctgtcagcgctgttttgggagcccgccggtgaggccgggccacgctcagacacttcgatcgtcgagtctgtcactgggcatggcgggtcagttccgcagctacgtgtgggacccgctgctgatcctgtcgcagatcgtcctcatgcagaccgtgtattacggctcgctgggcctgtggctggcgctggtggacgggctagtgcgaagcagcccctcgctggaccagatgttcgacgccgagatcctgggcttttccacccctccaggccggctctccatgatgtccttcatcctcaacgccctcacctggagctgacatggacccaaatcctcgggccgccctggagcgccagcagctccgccttcgggagcggcaaaaattcttcgaggacattttacagccagagacagagtttgtctttcctctgtcccatctgcatctcgagtcgcagagaccccccataggtagtatctcatccatggaagtgaatgtggacacactggagcaagtagaacttattgaccttggggacccggatgcagcagatgtgttcttgccttgcgaagatcctccaccaaccccccagtcgtctgggatggacaaccatttggaggagctgagcctgccggtgcctacatcagacaggaccacatctaggacctcctcctcctcctcctccgactcctccaccaacctgcatagcccaaatccaagtgatgatggagcagatacgcccttggcacagtcggatgaagaggaggaaaggggtgatggaggggcagagcctggagcctgcagctagcagtgggcccctgcctacagactgaccacgctggctattctccacatgagaccacaggcccagccagagcctgtcgggagaagaccagactctttacttgcagtaggcaccagaggtgggaaggatggtgggattgtgtacctttctaagaattaaccctctcctgctttactgctaattttttcctgctgcaaccctcccaccagtttttggcttactcctgagatatgatttgcaaatgaggagagagaagatgaggttggacaagatgccactgcttttcttagcactcttccctcccctaaaccatcccgtagtcttctaatacagtctctcagacaagtgtctctagatggatgtgaactccttaactcatcaagtaaggtggtactcaagccatgctgcctccttacatcctttttggaacagagcacggtataaataataaactaataataatatgccaacca

SEQ ID NO: 188624 - DNA, 674 bp, Homo sapiens
  Payload ID: 17105
  Gene Symbol: SYS1-DBNDD2
  Gene Name: SYS1-DBNDD2 readthrough (NMD candidate)
  ENST ID: ENST00000452133
  CDS Start-End: 23-259
ccggctcgtgtccctgcagggcatggcgggtcagttccgcagctacgtgtgggacccgctgctgatcctgtcgcagatcgtcctcatgcagaccgtgtattacggctcgctgggcctgtggctggcgctggtggacgggctagtgcgaagcagcccctcgctggaccagatgttcgacgccgagatcctgggcttttccacccctccaggccggctctccatgatgtccttcatcctcaacgccctcacctggagctgacatggacccaaatcctcgggccgccctggagcgccagcagctccgccttcgggagcggcaaaaattcttcgaggacattttacagccagagacagagtttgtctttcctctgtcccatctgcatctcgagtcgcagagaccccccataggtagtatctcatccatggaagtgaatgtggacacactggagcaagtagaacttattgaccttggggacccggatgcagcagatgtgttcttgccttgcgaagatcctccaccaaccccccagtcgtctgggatggacaaccatttggaggagctgagcctgccggtgcctacatcagacaggaccacatctaggacctcctcctcctcctcctccgactcctccaccaacctgcatagcccaaatccaagtgatgatggagcagat

SEQ ID NO: 188625 - DNA, 673 bp, Homo sapiens
  Payload ID: 17105
  Gene Symbol: SYS1-DBNDD2
  Gene Name: SYS1-DBNDD2 readthrough (NMD candidate)
  ENST ID: ENST00000458187
  CDS Start-End: 31-324
gctgaggcccggctcgtgtccctgcagggcatggcgggtcagttccgcagctacgtgtgggacccgctgctgatcctgtcgcagatcgtcctcatgcagaccgtgtattacggctcgctgggcctgtggctggcgctggtggacgggctagtgcgaagcagcccctcgctggaccagatgttcgacgccgagatcctgggcttttccacccctccaggccggctctccatgatgtccttcatcctcaacgccctcacctggcacttctccttgctgctgccacatgaagaaggacgtgtttgcttccccttccaccatgattgagctgacatggacccaaatcctcgggccgccctggagcgccagcagctccgccttcgggagcggcaaaaattcttcgaggacattttacagccagagacagagtttgtctttcctctgtcccatctgcatctcgagtcgcagagaccccccataggtagtatctcatccatggaagtgaatgtggacacactggagcaagtagaacttattgaccttggggacccggatgcagcagatgtgttcttgccttgcgaagatcctccaccaaccccccagtcgtctgggatggacaaccatttggaggagctgagcctgccggtgcctacatcagacaggaccacatctagga

SEQ ID NO: 188626 - DNA, 2436 bp, Homo sapiens
  Payload ID: 17106
  Gene Symbol: T
  Gene Name: T brachyury transcription factor
  Uniprot ID: O15178
  ENST ID: ENST00000296946
  CDS Start-End: 470-1777
tttccctctctgcgcgcggaccttccttttccagatggtgagagccgcggggacacccgacgccggggcaggctgatccacgatcctgggtgtgcgtaacgccgcctggggctccgtgggcgagggacgtgtggggacaggtgcaccggaaactgccagactggagagttgaggcatcggaggcgcgagaacagcactactactgcggcgagacgagcgcggcgcatcccaaagcccggccaaatgcgctcgtccctgggaggggagggaggcgcgcctggagcggggacagtcttggtccgcgccctcctcccgggtctgtgccgggacccgggacccgggagccgtcgcaggtctcggtccaaggggccccttttctcggaagggcggcggccaagagcagggaaggtggatctcaggtagcgagtctgggcttcggggacggcggggaggggagccggacgggaggatgagctcccctggcaccgagagcgcgggaaagagcctgcagtaccgagtggaccacctgctgagcgccgtggagaatgagctgcaggcgggcagcgagaagggcgaccccacagagcgcgaactgcgcgtgggcctggaggagagcgagctgtggctgcgcttcaaggagctcaccaatgagatgatcgtgaccaagaacggcaggaggatgtttccggtgctgaaggtgaacgtgtctggcctggaccccaacgccatgtactccttcctgctggacttcgtggcggcggacaaccaccgctggaagtacgtgaacggggaatgggtgccggggggcaagccggagccgcaggcgcccagctgcgtctacatccaccccgactcgcccaacttcggggcccactggatgaaggctcccgtctccttcagcaaagtcaagctcaccaacaagctcaacggagggggccagatcatgctgaactccttgcataagtatgagcctcgaatccacatagtgagagttgggggtccacagcgcatgatcaccagccactgcttccctgagacccagttcatagcggtgactgcttatcagaacgaggagatcacagctcttaaaattaagtacaatccatttgcaaaagctttccttgatgcaaaggaaagaagtgatcacaaagagatgatggaggaacccggagacagccagcaacctgggtactcccaatgggggtggcttcttcctggaaccagcaccctgtgtccacctgcaaatcctcatcctcagtttggaggtgccctctccctcccctccacgcacagctgtgacaggtacccaaccctgaggagccaccggtcctcaccctaccccagcccctatgctcatcggaacaattctccaacctattctgacaactcacctgcatgtttatccatgctgcaatcccatgacaattggtccagccttggaatgcctgcccatcccagcatgctccccgtgagccacaatgccagcccacctaccagctccagtcagtaccccagcctgtggtctgtgagcaacggcgccgtcaccccgggctcccaggcagcagccgtgtccaacgggctgggggcccagttcttccggggctcccccgcgcactacacacccctcacccatccggtctcggcgccctcttcctcgggatccccactgtacgaaggggcggccgcggccacagacatcgtggacagccagtacgacgccgcagcccaaggccgcctcatagcctcatggacacctgtgtcgccaccttccatgtgaagcagcaaggcccaggtcccgaaagatgcagtgactttttgtcgtggcagccagtggtgactggattgacctactaggtacccagtggcagtctcaggttaagaaggaaatgcagcctcagtaacttccttttcaaagcagtggaggagcacacggcacctttccccagagccccagcatcccttgctcacacctgcagtagcggtgctgtcccaggtggcttacagatgaacccaactgtggagatgatgcagttggcccaacctcactgacggtgaaaaaatgtttgccagggtccagaaactttttttggtttatttctcatacagtgtattggcaactttggcacaccagaatttgtaaactccaccagtcctactttagtgagataaaaagcacactcttaatcttcttccttgttgctttcaagtagttagagttgagctgttaaggacagaataaaatcatagttgaggacagcaggttttagttgaattgaaaatttgactgctctgccccctagaatgtgtgtattttaagcatatgtagctaatctcttgtgttgttaaactataactgtttcatatttttcttttgacaaagtagccaaagacaatcagcagaaagcattttctgcaaaataaacgcaatatgcaaaa

SEQ ID NO: 188627 - DNA, 2250 bp, Homo sapiens
  Payload ID: 17106
  Gene Symbol: T
  Gene Name: T brachyury transcription factor
  Uniprot ID: O15178
  ENST ID: ENST00000366871
  CDS Start-End: 458-1591
ggcaacaagtcctgtttttataagagagcgaggaggacacttctcagaaggggttgttttgcttttgcttatttccgtccatttccctctctgcgcgcggaccttccttttccagatggtgagagccgcggggacacccgacgccggggcaggctgatccacgatcctgggtgtgcgtaacgccgcctggggctccgtgggcgagggacgtgtggggacaggtgcaccggaaactgccagactggagagttgaggcatcggaggcgcgagaacagcactactactgcggcgagacgagcgcggcgcatcccaaagcccggccaaatgcgctcgtccctgggaggggagggaggcgcgcctggagcggggacagggcggcggccaagagcagggaaggtggatctcaggtagcgagtctgggcttcggggacggcggggaggggagccggacgggaggatgagctcccctggcaccgagagcgcgggaaagagcctgcagtaccgagtggaccacctgctgagcgccgtggagaatgagctgcaggcgggcagcgagaagggcgaccccacagagcgcgaactgcgcgtgggcctggaggagagcgagctgtggctgcgcttcaaggagctcaccaatgagatgatcgtgaccaagaacggcaggaggatgtttccggtgctgaaggtgaacgtgtctggcctggaccccaacgccatgtactccttcctgctggacttcgtggcggcggacaaccaccgctggaagtacgtgaacggggaatgggtgccggggggcaagccggagccgcaggcgcccagctgcgtctacatccaccccgactcgcccaacttcggggcccactggatgaaggctcccgtctccttcagcaaagtcaagctcaccaacaagctcaacggagggggccagatcatgctgaactccttgcataagtatgagcctcgaatccacatagtgagagttgggggtccacagcgcatgatcaccagccactgcttccctgagacccagttcatagcggtgactgcttatcagaacgaggagatcacagctcttaaaattaagtacaatccatttgcaaaagctttccttgatgcaaaggaaagaagtgatcacaaagagatgatggaggaacccggagacagccagcaacctgggtactcccaatcctattctgacaactcacctgcatgtttatccatgctgcaatcccatgacaattggtccagccttggaatgcctgcccatcccagcatgctccccgtgagccacaatgccagcccacctaccagctccagtcagtaccccagcctgtggtctgtgagcaacggcgccgtcaccccgggctcccaggcagcagccgtgtccaacgggctgggggcccagttcttccggggctcccccgcgcactacacacccctcacccatccggtctcggcgccctcttcctcgggatccccactgtacgaaggggcggccgcggccacagacatcgtggacagccagtacgacgccgcagcccaaggccgcctcatagcctcatggacacctgtgtcgccaccttccatgtgaagcagcaaggcccaggtcccgaaagatgcagtgactttttgtcgtggcagccagtggtgactggattgacctactaggtacccagtggcagtctcaggttaagaaggaaatgcagcctcagtaacttccttttcaaagcagtggaggagcacacggcacctttccccagagccccagcatcccttgctcacacctgcagtagcggtgctgtcccaggtggcttacagatgaacccaactgtggagatgatgcagttggcccaacctcactgacggtgaaaaaatgtttgccagggtccagaaactttttttggtttatttctcatacagtgtattggcaactttggcacaccagaatttgtaaactccaccagtcctactttagtgagataaaaagcacactcttaatcttcttccttgttgctttcaagtagttagagttgagctgttaaggacagaataaaatcatagttgaggacagcaggttttagttgaattgaaaatttgactgctctgccccctagaatgtgtgtattttaagcatatgtagctaatctcttgtgttgttaaactataactgtttcatatttttcttttgacaaagtagccaaagacaatcagcagaaagcattttctgcaaaataaacgcaatatgcaaaa

SEQ ID NO: 188628 - DNA, 1497 bp, Homo sapiens
  Payload ID: 17106
  Gene Symbol: T
  Gene Name: T brachyury transcription factor
  ENST ID: ENST00000366876
  CDS Start-End: 287-1497
ggggagggcactgaatttcggtccccagagacctacactagtagagccttggggagttcaagtggaataacttctccccacccctctgcccccgtcccctccccccaagtcttggtccgcgccctcctcccgggtctgtgccgggacccgggacccgggagccgtcgcaggtctcggtccaaggggccccttttctcggaagggcggcggccaagagcagggaaggtggatctcaggtagcgagtctgggcttcggggacggcggggaggggagccggacgggaggatgagctcccctggcaccgagagcgcgggaaagagcctgcagtaccgagtggaccacctgctgagcgccgtggagaatgagctgcaggcgggcagcgagaagggcgaccccacagagcgcgaactgcgcgtgggcctggaggagagcgagctgtggctgcgcttcaaggagctcaccaatgagatgatcgtgaccaagaacggcaggaggatgtttccggtgctgaaggtgaacgtgtctggcctggaccccaacgccatgtactccttcctgctggacttcgtggcggcggacaaccaccgctggaagtacgtgaacggggaatgggtgccggggggcaagccggagccgcaggcgcccagctgcgtctacatccaccccgactcgcccaacttcggggcccactggatgaaggctcccgtctccttcagcaaagtcaagctcaccaacaagctcaacggagggggccagatcatgctgaactccttgcataagtatgagcctcgaatccacatagtgagagttgggggtccacagcgcatgatcaccagccactgcttccctgagacccagttcatagcggtgactgcttatcagaacgaggagatcacagctcttaaaattaagtacaatccatttgcaaaagctttccttgatgcaaaggaaagaagtgatcacaaagagatgatggaggaacccggagacagccagcaacctgggtactcccaatcaggggggtggcttcttcctggaaccagcaccctgtgtccacctgcaaatcctcatcctcagtttggaggtgccctctccctcccctccacgcacagctgtgacaggtacccaaccctgaggagccaccggtcctcaccctaccccagcccctatgctcatcggaacaattctccaacctattctgacaactcacctgcatgtttatccatgctgcaatcccatgacaattggtccagccttggaatgcctgcccatcccagcatgctccccgtgagccacaatgccagcccacctaccagctccagtcagtaccccagcctgtggtctgtgagcaacggcgccgtcaccccgggctcccaggcagcagccgtgtccaacgggctgggggcccagttcttccggggctcccccgcgcactacacacccctcacccatccggtctcggcgccctcttcctcgggatccccactgtacgaagg

SEQ ID NO: 188629 - DNA, 902 bp, Homo sapiens
  Payload ID: 17106
  Gene Symbol: T
  Gene Name: T brachyury transcription factor
  ENST ID: ENST00000461348
  CDS Start-End: 174-902
gaggaggacacttctcagaaggggttgttttgcttttgcttatttccgtccatttccctctctgcgcgcggaccttccttttccagatgggcggcggccaagagcagggaaggtggatctcaggtagcgagtctgggcttcggggacggcggggaggggagccggacgggaggatgagctcccctggcaccgagagcgcgggaaagagcctgcagtaccgagtggaccacctgctgagcgccgtggagaatgagctgcaggcgggcagcgagaagggcgaccccacagagcgcgaactgcgcgtgggcctggaggagagcgagctgtggctgcgcttcaaggagctcaccaatgagatgatcgtgaccaagaacggcaggaggatgtttccggtgctgaaggtgaacgtgtctggcctggaccccaacgccatgtactccttcctgctggacttcgtggcggcggacaaccaccgctggaagtacgtgaacggggaatgggtgccggggggcaagccggagccgcaggcgcccagctgcgtctacatccaccccgactcgcccaacttcggggcccactggatgaaggctcccgtctccttcagcaaagtcaagctcaccaacaagctcaacggagggggccagatcatgctgaactccttgcataagtatgagcctcgaatccacatagtgagagttgggggtccacagcgcatgatcaccagccactgcttccctgagacccagttcatagcggtgactgcttatcagaacgaggagatcacagctcttaaaattaagtacaatccatttgcaaaagctttccttgatgcaaaggaaagaagtgatcacaaagagatgatggaggaacccggagacagccagcaacctgggtactcccaa

SEQ ID NO: 188630 - DNA, 3687 bp, Homo sapiens
  Payload ID: 17107
  Gene Symbol: TCAIM
  Gene Name: T cell activation inhibitor, mitochondrial
  Uniprot ID: Q8N3R3
  ENST ID: ENST00000342649
  CDS Start-End: 428-1918
ggggaaggcctggcacgctccagccaaccagggcgtcacctgcagctcgtccccctgcccgggcttgcctcgagcgccctgccgccgccggagcggggagggtgttgggggcaggtggagccgggagggcccagctgagaattcagggttgggggctcagagggcactgcggctaggagcccgtcaaagcctgtcgcccaccggggcgagggcaggtgggagcgcctggccgtgcgtcgcgcgctggttggccagctgacgccccagtgcgcatgcgcgtccgaacagccctgcgggcggagcgactgtcctcccttctggtgtactgggtgggaggtggaactagtcggacaaagccctcgcgtcggacccttgccagaactcaattaatggatgcctcgaagttgacgtacatatatattcagaaatgttttgccacctgagacctatgaggaggttatgtctagagaagatatttccacactggtttcccttttcaagagctttatcgggagctgaagcagtcaatgccttgaggcctttctattttgcagtacatccagatttctttggacagcaccccgtagaaagggaaatcaatgaaaattctcttaaaaggttaagtgtctacctagaaaacctccagaaaccaggcttcaagtctttgaaaccaactcagcttacattttatgtaagagaaacagaccagagttcctccgatggccaggaaccttttagtacttccggatttcgagcagtcaaatttactttgcacaccagagatctgctaagcacagtgttatatattctcaactcctgcagtttatctgttgaacatatccaaagcttgaatactaatatgcatacccagcctctcaaagaagctaaaaggatgcctgacaggcccatcaaatgggacaagtcttattactcctttactggattcaaggaccctgatgaagaccttgaacaagtctcgagagtggaaacaactctcacatcctggttagataacaatgggaaaagtgctgttaaaaagctaaagaacagtttgccacttagaaaagaactagatcgtttaaaagatgaactgtctcatcaattgcaactctcagatatcaggtggcagaggagctggggcatcgcccaccgctgtagccagctgcatagtttaagccgcttagcacagcagaatttggaaacacttaaaaaagcaaaagggtgtacaatcatatttacagaccgttctggcatgagtgcagtgggccatgtgatgctaggaacaatggatgtccatcaccactggacaaaactttttgaaagattgccaagttattttgaccttcagaggaggctgatgattttagaagaccaaataagctatcttttaggtggcatacaagttgtttatattgaagaattacagccagtattgacacttgaagaatattactctcttcttgatgtgttttataatagactgttgaaaagtagaatactatttcaccctcgaagtttgcgtggtttacaaatgatccttaacagtgacagatatgctccaagcttgcatgaactcgggcattttaatattccaacactctgtgatccagcaaatctccagtggtttattctcaccaaagctcagcaggcaagagagaacatgaaaagaaaggaagagttaaaggttattgaaaatgaattgatacaggcatcaacaaagaaattttctttggagaagttatataaagagcccagcatttctagtatacaaatggtggattgttgtaagagacttctagaacaatcactgccttacctacatgggatgcacctctgcatttcacatttttactctgttatgcaagatggagacctttgtattccttggaattggaagaatggagaagccattaagtaacacagaaatctgttttatttttttaagagataagaaaggaacttaaattaaaaatatttaaatccacaatttgatataacagtattatttacataagaacaaagtttctaactgctgctttaaaagtagacttttttaaaaaaattaatttctgctaggagaggttttatatgccaggcgtggtggctcatgcctgcggtcccagctacttagggaggctaagataggaggatcacttgagcccaggaggccaaggttgcagtgggcccagattgcaccattgccctccagcctgagcaacagaacaagaccttgtctcaaaaaataataatgataatttaaaataaataagtaactaataaaaagattttatatcccagtcttatgatgttggttggcaaggctagataaaaagatgttagaatgaaagaacatatttttagtgatatgtaaatgaaggattctacaatagtcatatatttttatatgaatgaatgttgggttgggctggagaggtatgtgtgtgtaaatataaaggtctcacattcagagtatagctctgaaataatggaactcatgtctacaattcaacatgcatctgtatagttacatctcatgtaaatatacacagacatattttgcagccagtaattgacagttaatgtccaaaacaggtgattgataggtaacagaaattagataaccaccaattttgcccaagagaaagactagaaggactaaaagcagttgaatgtatggtactgacattgtcataagcagtctgataaccagtttattgaaacgtgtgcattaacagagaatttaattttaaacccataatttctcctatccattaaaatattataattgttagtagtatgaaaccaacaggaaatgttttttaatcatttagtgaggtgattcatttgtttcatgggcaaacactatccaggaaaagccttgcttgcctgtttcccaaagagctctaagaaatagaatcaagtgtaaaatggttcagaccattcaggatttcttgtcactcttctcaaccacgatcttcctgttattactgatgtttgaaaccctgtcattagccccggcctggttaaagcccctcagagtcacctctcattcatagcaatagaattcaaccccaagtggttgatggtgtccccagcacagccgagagacctgatctctggattcagtgcttttagctcttcgagtttaccctaagataccttcgggcaatatttttaaccaacccaaaagctcttcaggtcatttctgaagaggacaaggtgaatcttggcttggaacaccatttttgggctcttgctactgaatgaatcagaaaggaattttttctgaagagcattagaaagtaaaagagatgttaaaataagttcttgaagtatgttttatatttatctaaaacactgattttaaaagtttacattcaaatgtgtattcaaaagaagtactgatttgtaattattatagtttgtgtgtatcatcccttttaaccgtgcctaacaactgtacttaaattttgttttctagtgtaacaaatgtttcccataagattttctagagccaaataatgggagtgaaaaattccttaagtgttatataagaaaatatattagaaaatcagctttggattatacgatttctaaaatatactaatacagaatcctcagtaatatgttttgaattggattttttctcagaactgttacataataaataatacatcaaccagataa

SEQ ID NO: 188631 - DNA, 1998 bp, Homo sapiens
  Payload ID: 17107
  Gene Symbol: TCAIM
  Gene Name: T cell activation inhibitor, mitochondrial
  Uniprot ID: Q8N3R3
  ENST ID: ENST00000383746
  CDS Start-End: 246-458
ctcctccagcagtccctttccccttcttccccaagatccagcgcgtgctcggttgcccttctccgttccttgcaggcccttgggtcaggacccaccacctgccggaccatcattttccgagtccctccggcctagtcggagtgctcgctcgcgcctcctaaagctctcagccgagcgcgccgagacccctcagggcggccgcaattaatggatgcctcgaagttgacgtacatatatattcagaaatgttttgccacctgagacctatgaggaggttatgtctagagaagatatttccacactggtttcccttttcaagagctttatcgggagctgaagcagtcaatgccttgaggcctttctattttgcagtacatccagatttctttggacagcaccccgtagaaagggatgatacatggaagagttttcaatgccctagtgatttttccttatgatgcatgctgctggaccactcccctacaacatcagttaatgtgtgctccaggaatacaaactgatatgaaaaatgacttatggtagatgtagttaagacagtcaatatattttaacattagaaaatacagtcagtccttcatatccatgggttttacatccatggattcaaccaacctcagactgaaaatattaggggaaaaaaatacatctgtactacacatgaacaaacttctctttcttgtcattattccctgaacaacacaggataacaactacttacatagcacttacattatattagatattataagtaatctagaaatgacttaaagtatatgggaggatacacataggttatttgcaaatactacactattttatatgagagacttgagcattcgcagatttcggtatccacgggaggtcctggaaccaatcccctatggataccaagggactgctatgtattacaaagccacatgctttggaattacttcagtgttccttctattttcattaacactgatatctagtttaatatgaaaaggaacttgaaatcttgaaaattagaacatcgttatttttttctacttgcaatggaaaatctattttgcttttttgcttctaggaaaatattctgattatgatatgtgatatgttggctactcaaagtcagaacttttcaaagtaatcagtaaattgaatcaacagaaaaatattcattaactcggggatgcattaataaagtttttaaattcaaaatgtatagaaaaatcaagcttagtaatactttaatattattctaccaatgtattttttttaattaagacttctgtatgcagcagggcatggtggcacacctgtagtcccagctactagggaggctgaggcaggaggattacttgagcccaggaattcaagcctgggcaacatagtgagtcctcatctcctaaatttaaaaaacaaacaacaaaaacttctacgtgtggtaaagggttaactcagcaagcttgggttgcttaaaccttgcacattccaaagaaaggtctgaccccagtgctgacctttgactggctactgggaaatgagctctgagcccctggataggaatgtttctgtttgcctgaggcctttgaccatgccagatagtttatgctaacaatgtgatttatagtgaatacctgttttcctgtgtctaagaccctgggctgcactgtattaatttgaccttgggtatttggggagctgagactgagtagctgaagtgagtcacataagcactaaatgcttacctgactgacccccagtaaaactctggacatccagacttggatgagcttccttgggtggcaacacttttacgtattgtcacacaccattgctggggggattaagcactgtctgtaaaactccactgtgaaatgacaactggaaacttgcacgtggtctctcctgattctgctctattcaccttttccctttgctgattttaatctccattcttttgttgtaataaaccataatggtgaataaaacagc

SEQ ID NO: 188632 - DNA, 2178 bp, Homo sapiens
  Payload ID: 17107
  Gene Symbol: TCAIM
  Gene Name: T cell activation inhibitor, mitochondrial
  Uniprot ID: Q8N3R3
  ENST ID: ENST00000396078
  CDS Start-End: 428-640
ggggaaggcctggcacgctccagccaaccagggcgtcacctgcagctcgtccccctgcccgggcttgcctcgagcgccctgccgccgccggagcggggagggtgttgggggcaggtggagccgggagggcccagctgagaattcagggttgggggctcagagggcactgcggctaggagcccgtcaaagcctgtcgcccaccggggcgagggcaggtgggagcgcctggccgtgcgtcgcgcgctggttggccagctgacgccccagtgcgcatgcgcgtccgaacagccctgcgggcggagcgactgtcctcccttctggtgtactgggtgggaggtggaactagtcggacaaagccctcgcgtcggacccttgccagaactcaattaatggatgcctcgaagttgacgtacatatatattcagaaatgttttgccacctgagacctatgaggaggttatgtctagagaagatatttccacactggtttcccttttcaagagctttatcgggagctgaagcagtcaatgccttgaggcctttctattttgcagtacatccagatttctttggacagcaccccgtagaaagggatgatacatggaagagttttcaatgccctagtgatttttccttatgatgcatgctgctggaccactcccctacaacatcagttaatgtgtgctccaggaatacaaactgatatgaaaaatgacttatggtagatgtagttaagacagtcaatatattttaacattagaaaatacagtcagtccttcatatccatgggttttacatccatggattcaaccaacctcagactgaaaatattaggggaaaaaaatacatctgtactacacatgaacaaacttctctttcttgtcattattccctgaacaacacaggataacaactacttacatagcacttacattatattagatattataagtaatctagaaatgacttaaagtatatgggaggatacacataggttatttgcaaatactacactattttatatgagagacttgagcattcgcagatttcggtatccacgggaggtcctggaaccaatcccctatggataccaagggactgctatgtattacaaagccacatgctttggaattacttcagtgttccttctattttcattaacactgatatctagtttaatatgaaaaggaacttgaaatcttgaaaattagaacatcgttatttttttctacttgcaatggaaaatctattttgcttttttgcttctaggaaaatattctgattatgatatgtgatatgttggctactcaaagtcagaacttttcaaagtaatcagtaaattgaatcaacagaaaaatattcattaactcggggatgcattaataaagtttttaaattcaaaatgtatagaaaaatcaagcttagtaatactttaatattattctaccaatgtattttttttaattaagacttctgtatgcagcagggcatggtggcacacctgtagtcccagctactagggaggctgaggcaggaggattacttgagcccaggaattcaagcctgggcaacatagtgagtcctcatctcctaaatttaaaaaacaaacaacaaaaacttctacgtgtggtaaagggttaactcagcaagcttgggttgcttaaaccttgcacattccaaagaaaggtctgaccccagtgctgacctttgactggctactgggaaatgagctctgagcccctggataggaatgtttctgtttgcctgaggcctttgaccatgccagatagtttatgctaacaatgtgatttatagtgaatacctgttttcctgtgtctaagaccctgggctgcactgtattaatttgaccttgggtatttggggagctgagactgagtagctgaagtgagtcacataagcactaaatgcttacctgactgacccccagtaaaactctggacatccagacttggatgagcttccttgggtggcaacacttttacgtattgtcacacaccattgctggggggattaagcactgtctgtaaaactccactgtgaaatgacaactggaaacttgcacgtggtctctcctgattctgctctattcaccttttccctttgctgattttaatctccattcttttgttgtaataaaccataatggtgaataaaaca

SEQ ID NO: 188633 - DNA, 3449 bp, Homo sapiens
  Payload ID: 17107
  Gene Symbol: TCAIM
  Gene Name: T cell activation inhibitor, mitochondrial
  Uniprot ID: Q8N3R3
  ENST ID: ENST00000431657
  CDS Start-End: 104-451
actgggtgggaggtggaactagtcggacaaagccctcgcgtcggacccttgccagaactcaattaatggatgcctcgaagttgacgtacatatatattcagaaatgttttgccacctgagacctatgaggaggttatgtctagagaagatatttccacactggtttcccttttcaagagctttatcgggagctgaagcagtcaatgccttgaggcctttctattttgcagtacatccagatttctttggacagcaccccgtagaaagggaaatcaatgaaaattctcttaaaaggttaagtgtctacctagaaaacctccagaaaccaggcttcaagtctttgaaaccaactcagcttacattttatgtaagagaaacagaccagagttcctccgatggccaggaaccttttagtacttccgtttatctgttgaacatatccaaagcttgaatactaatatgcatacccagcctctcaaagaagctaaaaggatgcctgacaggcccatcaaatgggacaagtcttattactcctttactggattcaaggaccctgatgaagaccttgaacaagtctcgagagtggaaacaactctcacatggagtctcgctctgtcacccaagctctggagtgcagtggcgtgatctcagctcactgcaacctccgcctcccgggttcaagcgattcttctgcctcagtctcctaagcagctgggattacagatcctggttagataacaatgggaaaagtgctgttaaaaagctaaagaacagtttgccacttagaaaagaactagatcgtttaaaagatgaactgtctcatcaattgcaactctcagatatcaggtggcagaggagctggggcatcgcccaccgctgtagccagctgcatagtttaagccgcttagcacagcagaatttggaaacacttaaaaaagcaaaagggtgtacaatcatatttacagaccgttctggcatgagtgcagtgggccatgtgatgctaggaacaatggatgtccatcaccactggacaaaactttttgaaagattgccaagttattttgaccttcagaggaggctgatgattttagaagaccaaataagctatcttttaggtggcatacaagttgtttatattgaagaattacagccagtattgacacttgaagaatattactctcttcttgatgtgttttataatagactgttgaaaagtagaatactatttcaccctcgaagtttgcgtggtttacaaatgatccttaacaggtaaatatctaagatagaaggattacttttattccttcgtctaggtgggttgtgtgtgtaaatgcattaaattgttttgtatttcaatgggtagttcttaggaattaaagaaaaaaatgccactacttgtgttagcaaccctcttctacacactagaaaagccagcatgggaggattgaaggatttaatgtctagaacattctttgaatatattgctgagcagatttactgggcaaagtcaatccaatggaaaacattataagattaaactaatagtaaatcagtagccaacatttgtggtgtatacactgtttgccgagcactgtgctgggtacttatatgcattctgtctttagctctcacaacctcactgtgcagcaggtcacccctggcatgtgacagataaggaaggtcagagggcttgcaagtaggtcgtgatcttctgaagaagtgtgtctttgggggcagcaaagctttaagtcaatgttgctgtacttttgaggtggcttttcttgatgatttttttttattttcctgaagactaataaaatattttctctggtgggggagaggagagggtcagtggtttttcctttaatgtatattttattgcagtgacagatatgctccaagcttgcatgaactcgggcattttaatattccaacactctgtgatccagcaaatctccagtggtttattctcaccaaagctcagcaggcaagagagaacatgaaaagaaaggaagagttaaaggttattgaaaatgaattgatacaggcatcaacaaagaaattttctttggagaagttatataaagagcccagcatttctagtatacaaatggtggattgttgtaagagacttctagaacaatcactgccttacctacatgggatgcacctctgcatttcacatttttactctgttatgcaagatggagacctttgtattccttggaattggaagaatggagaagccattaagtaacacagaaatctgttttatttttttaagagataagaaaggaacttaaattaaaaatatttaaatccacaatttgatataacagtattatttacataagaacaaagtttctaactgctgctttaaaagtagacttttttaaaaaaattaatttctgctaggagaggttttatatgccaggcgtggtggctcatgcctgcggtcccagctacttagggaggctaagataggaggatcacttgagcccaggaggccaaggttgcagtgggcccagattgcaccattgccctccagcctgagcaacagaacaagaccttgtctcaaaaaataataatgataatttaaaataaataagtaactaataaaaagattttatatcccagtcttatgatgttggttggcaaggctagataaaaagatgttagaatgaaagaacatatttttagtgatatgtaaatgaaggattctacaatagtcatatatttttatatgaatgaatgttgggttgggctggagaggtatgtgtgtgtaaatataaaggtctcacattcagagtatagctctgaaataatggaactcatgtctacaattcaacatgcatctgtatagttacatctcatgtaaatatacacagacatattttgcagccagtaattgacagttaatgtccaaaacaggtgattgataggtaacagaaattagataaccaccaattttgcccaagagaaagactagaaggactaaaagcagttgaatgtatggtactgacattgtcataagcagtctgataaccagtttattgaaacgtgtgcattaacagagaatttaattttaaacccataatttctcctatccattaaaatattataattgttagtagtatgaaaccaacaggaaatgttttttaatcatttagtgaggtgattcatttgtttcatgggcaaacactatccaggaaaagccttgcttgcctgtttcccaaagagctctaagaaatagaatcaagtgtaaaatggttcagaccattcaggatttcttgtcactcttctcaaccacgatcttcctgttattactgatgtttgaaaccctgtcattagccccggcctggttaaagcccctcagagtcacctctcattcatagcaatagaattcaaccccaagtggttgatggtgtccccagcacagccgagagacc

SEQ ID NO: 188634 - DNA, 3306 bp, Homo sapiens
  Payload ID: 17107
  Gene Symbol: TCAIM
  Gene Name: T cell activation inhibitor, mitochondrial
  Uniprot ID: Q8N3R3
  ENST ID: ENST00000412611
  CDS Start-End: 123-470
ctgtcctcccttctggtgtactgggtgggaggtggaactagtcggacaaagccctcgcgtcggacccttgccagaactcaattaatggatgcctcgaagttgacgtacatatatattcagaaatgttttgccacctgagacctatgaggaggttatgtctagagaagatatttccacactggtttcccttttcaagagctttatcgggagctgaagcagtcaatgccttgaggcctttctattttgcagtacatccagatttctttggacagcaccccgtagaaagggaaatcaatgaaaattctcttaaaaggttaagtgtctacctagaaaacctccagaaaccaggcttcaagtctttgaaaccaactcagcttacattttatgtaagagaaacagaccagagttcctccgatggccaggaaccttttagtacttccgtttatctgttgaacatatccaaagcttgaatactaatatgcatacccagcctctcaaagaagctaaaaggatgcctgacaggcccatcaaatgggacaagtcttattactcctttactggattcaaggaccctgatgaagaccttgaacaagtctcgagagtggaaacaactctcacatcctggttagataacaatgggaaaagtgctgttaaaaagctaaagaacagtttgccacttagaaaagaactagatcgtttaaaagatgaactgtctcatcaattgcaactctcagatatcaggtggcagaggagctggggcatcgcccaccgctgtagccagctgcatagtttaagccgcttagcacagcagaatttggaaacacttaaaaaagcaaaagggtgtacaatcatatttacagaccgttctggcatgagtgcagtgggccatgtgatgctaggaacaatggatgtccatcaccactggacaaaactttttgaaagattgccaagttattttgaccttcagaggaggctgatgattttagaagaccaaataagctatcttttaggtggcatacaagttgtttatattgaagaattacagccagtattgacacttgaagaatattactctcttcttgatgtgttttataatagactgttgaaaagtagaatactatttcaccctcgaagtttgcgtggtttacaaatgatccttaacagtgacagatatgctccaagcttgcatgaactcgggcattttaatattccaacactctgtgatccagcaaatctccagtggtttattctcaccaaagctcagcaggcaagagagaacatgaaaagaaaggaagagttaaaggttattgaaaatgaattgatacaggcatcaacaaagaaattttctttggagaagttatataaagagcccagcatttctagtatacaaatggtggattgttgtaagagacttctagaacaatcactgccttacctacatgggatgcacctctgcatttcacatttttactctgttatgcaagatggagacctttgtattccttggaattggaagaatggagaagccattaagtaacacagaaatctgttttatttttttaagagataagaaaggaacttaaattaaaaatatttaaatccacaatttgatataacagtattatttacataagaacaaagtttctaactgctgctttaaaagtagacttttttaaaaaaattaatttctgctaggagaggttttatatgccaggcgtggtggctcatgcctgcggtcccagctacttagggaggctaagataggaggatcacttgagcccaggaggccaaggttgcagtgggcccagattgcaccattgccctccagcctgagcaacagaacaagaccttgtctcaaaaaataataatgataatttaaaataaataagtaactaataaaaagattttatatcccagtcttatgatgttggttggcaaggctagataaaaagatgttagaatgaaagaacatatttttagtgatatgtaaatgaaggattctacaatagtcatatatttttatatgaatgaatgttgggttgggctggagaggtatgtgtgtgtaaatataaaggtctcacattcagagtatagctctgaaataatggaactcatgtctacaattcaacatgcatctgtatagttacatctcatgtaaatatacacagacatattttgcagccagtaattgacagttaatgtccaaaacaggtgattgataggtaacagaaattagataaccaccaattttgcccaagagaaagactagaaggactaaaagcagttgaatgtatggtactgacattgtcataagcagtctgataaccagtttattgaaacgtgtgcattaacagagaatttaattttaaacccataatttctcctatccattaaaatattataattgttagtagtatgaaaccaacaggaaatgttttttaatcatttagtgaggtgattcatttgtttcatgggcaaacactatccaggaaaagccttgcttgcctgtttcccaaagagctctaagaaatagaatcaagtgtaaaatggttcagaccattcaggatttcttgtcactcttctcaaccacgatcttcctgttattactgatgtttgaaaccctgtcattagccccggcctggttaaagcccctcagagtcacctctcattcatagcaatagaattcaaccccaagtggttgatggtgtccccagcacagccgagagacctgatctctggattcagtgcttttagctcttcgagtttaccctaagataccttcgggcaatatttttaaccaacccaaaagctcttcaggtcatttctgaagaggacaaggtgaatcttggcttggaacaccatttttgggctcttgctactgaatgaatcagaaaggaattttttctgaagagcattagaaagtaaaagagatgttaaaataagttcttgaagtatgttttatatttatctaaaacactgattttaaaagtttacattcaaatgtgtattcaaaagaagtactgatttgtaattattatagtttgtgtgtatcatcccttttaaccgtgcctaacaactgtacttaaattttgttttctagtgtaacaaatgtttcccataagattttctagagccaaataatgggagtgaaaaattccttaagtgttatataagaaaatatattagaaaatcagctttggattatacgatttctaaaatatactaatacagaatcctcagtaatatgttttgaattggattttttctcagaactgttacataataaataatacatcaaccagataa

SEQ ID NO: 188635 - DNA, 1844 bp, Homo sapiens
  Payload ID: 17107
  Gene Symbol: TCAIM
  Gene Name: T cell activation inhibitor, mitochondrial
  Uniprot ID: Q8N3R3
  ENST ID: ENST00000417237
  CDS Start-End: 246-1736
ctcctccagcagtccctttccccttcttccccaagatccagcgcgtgctcggttgcccttctccgttccttgcaggcccttgggtcaggacccaccacctgccggaccatcattttccgagtccctccggcctagtcggagtgctcgctcgcgcctcctaaagctctcagccgagcgcgccgagacccctcagggcggccgcaattaatggatgcctcgaagttgacgtacatatatattcagaaatgttttgccacctgagacctatgaggaggttatgtctagagaagatatttccacactggtttcccttttcaagagctttatcgggagctgaagcagtcaatgccttgaggcctttctattttgcagtacatccagatttctttggacagcaccccgtagaaagggaaatcaatgaaaattctcttaaaaggttaagtgtctacctagaaaacctccagaaaccaggcttcaagtctttgaaaccaactcagcttacattttatgtaagagaaacagaccagagttcctccgatggccaggaaccttttagtacttccggatttcgagcagtcaaatttactttgcacaccagagatctgctaagcacagtgttatatattctcaactcctgcagtttatctgttgaacatatccaaagcttgaatactaatatgcatacccagcctctcaaagaagctaaaaggatgcctgacaggcccatcaaatgggacaagtcttattactcctttactggattcaaggaccctgatgaagaccttgaacaagtctcgagagtggaaacaactctcacatcctggttagataacaatgggaaaagtgctgttaaaaagctaaagaacagtttgccacttagaaaagaactagatcgtttaaaagatgaactgtctcatcaattgcaactctcagatatcaggtggcagaggagctggggcatcgcccaccgctgtagccagctgcatagtttaagccgcttagcacagcagaatttggaaacacttaaaaaagcaaaagggtgtacaatcatatttacagaccgttctggcatgagtgcagtgggccatgtgatgctaggaacaatggatgtccatcaccactggacaaaactttttgaaagattgccaagttattttgaccttcagaggaggctgatgattttagaagaccaaataagctatcttttaggtggcatacaagttgtttatattgaagaattacagccagtattgacacttgaagaatattactctcttcttgatgtgttttataatagactgttgaaaagtagaatactatttcaccctcgaagtttgcgtggtttacaaatgatccttaacagtgacagatatgctccaagcttgcatgaactcgggcattttaatattccaacactctgtgatccagcaaatctccagtggtttattctcaccaaagctcagcaggcaagagagaacatgaaaagaaaggaagagttaaaggttattgaaaatgaattgatacaggcatcaacaaagaaattttctttggagaagttatataaagagcccagcatttctagtatacaaatggtggattgttgtaagagacttctagaacaatcactgccttacctacatgggatgcacctctgcatttcacatttttactctgttatgcaagatggagacctttgtattccttggaattggaagaatggagaagccattaagtaacacagaaatctgttttatttttttaagagataagaaaggaacttaaattaaaaatatttaaatccacaatttgatataacagtattatttacataagaacaaagtttc

SEQ ID NO: 188636 - DNA, 1078 bp, Homo sapiens
  Payload ID: 17107
  Gene Symbol: TCAIM
  Gene Name: T cell activation inhibitor, mitochondrial
  Uniprot ID: Q8N3R3
  ENST ID: ENST00000417768
  CDS Start-End: 74-421
agccctcgcgtcggacccttgccagaactcaattaatggatgcctcgaagttgacgtacatatatattcagaaatgttttgccacctgagacctatgaggaggttatgtctagagaagatatttccacactggtttcccttttcaagagctttatcgggagctgaagcagtcaatgccttgaggcctttctattttgcagtacatccagatttctttggacagcaccccgtagaaagggaaatcaatgaaaattctcttaaaaggttaagtgtctacctagaaaacctccagaaaccaggcttcaagtctttgaaaccaactcagcttacattttatgtaagagaaacagaccagagttcctccgatggccaggaaccttttagtacttccgtttatctgttgaacatatccaaagcttgaatactaatatgcatacccagcctctcaaagaagctaaaaggatgcctgacaggcccatcaaatgggacaagtcttattactcctttactggattcaaggaccctgatgaagaccttgaacaagtctcgagagtggaaacaactctcacatcctggttagataacaatgggaaaagtgctgttaaaaagctaaagaacagtttgccacttagaaaagaactagatcgtttaaaagatgaactgtctcatcaattgcaactctcagatatcaggtggcagaggagctggggcatcgcccaccgctgtagccagctgcatagtttaagccgcttagcacagcagaatttggaaacacttaaaaaagcaaaagggtgtacaatcatatttacagaccgttctggcatgagtgcagtgggccatgtgatgctaggaacaatggatgtccatcaccactggacaaaactttttgaaagattgccaagttattttgaccttcagaggaggctgatgattttagaagaccaaataagctatcttttaggtggcatacaagttgtttatattgaagaattacagccagtattgacacttgaagaatattactctcttcttgatgtgttttataatagactgttgaaaagtagaatactatttcacc

SEQ ID NO: 188637 - DNA, 1056 bp, Homo sapiens
  Payload ID: 17107
  Gene Symbol: TCAIM
  Gene Name: T cell activation inhibitor, mitochondrial
  ENST ID: ENST00000444602
  CDS Start-End: 120-467
tcctcccttctggtgtactgggtgggaggtggaactagtcggacaaagccctcgcgtcggacccttgccagaactcaattaatggatgcctcgaagttgacgtacatatatattcagaaatgttttgccacctgagacctatgaggaggttatgtctagagaagatatttccacactggtttcccttttcaagagctttatcgggagctgaagcagtcaatgccttgaggcctttctattttgcagtacatccagatttctttggacagcaccccgtagaaagggaaatcaatgaaaattctcttaaaaggttaagtgtctacctagaaaacctccagaaaccaggcttcaagtctttgaaaccaactcagcttacattttatgtaagagaaacagaccagagttcctccgatggccaggaaccttttagtacttccggacttcaaatggaaggaggaagagcttgatctgaagaatgctgaagtatgttgaagacaactcctcacccagtctctccagggactagtatttgatagtatatgatctcttaccttttattttctcataattgaatatgggagatcaggagtcacaaattccttttcttggcagtttctccatctacctctgacttagagttttattaaaaatagccctattcttcaatatttaaagatagaaagtcaattcatagcccttttgtgaaggaacaggtatactgaagaatgctgtaaataatgaataataagcatgttgatcactctaagtgacacaattctgtttgaaagtttaaatacatgaatgtgctgttcctaggcatgagagtctcataagcaactgagatagattgttactagtgtaaaaccaaatattcataaatatttttaatagatgtatgctcctgttagtcagggtcaagattaggctaggaattaaataacatcttacatatatgtagtggtctacttaggtttcattatttctccaggaagacagatggaatttttagaggcagattatatcctttatagttgttaaaataaaaatattatcatc

SEQ ID NO: 188638 - DNA, 2967 bp, Homo sapiens
  Payload ID: 17108
  Gene Symbol: TIGIT
  Gene Name: T cell immunoreceptor with Ig and ITIM domains
  Uniprot ID: Q495A1
  ENST ID: ENST00000383671
  CDS Start-End: 77-811
cgtcctatctgcagtcggctactttcagtggcagaagaggccacatctgcttcctgtaggccctctgggcagaagcatgcgctggtgtctcctcctgatctgggcccaggggctgaggcaggctcccctcgcctcaggaatgatgacaggcacaatagaaacaacggggaacatttctgcagagaaaggtggctctatcatcttacaatgtcacctctcctccaccacggcacaagtgacccaggtcaactgggagcagcaggaccagcttctggccatttgtaatgctgacttggggtggcacatctccccatccttcaaggatcgagtggccccaggtcccggcctgggcctcaccctccagtcgctgaccgtgaacgatacaggggagtacttctgcatctatcacacctaccctgatgggacgtacactgggagaatcttcctggaggtcctagaaagctcagtggctgagcacggtgccaggttccagattccattgcttggagccatggccgcgacgctggtggtcatctgcacagcagtcatcgtggtggtcgcgttgactagaaagaagaaagccctcagaatccattctgtggaaggtgacctcaggagaaaatcagctggacaggaggaatggagccccagtgctccctcacccccaggaagctgtgtccaggcagaagctgcacctgctgggctctgtggagagcagcggggagaggactgtgccgagctgcatgactacttcaatgtcctgagttacagaagcctgggtaactgcagcttcttcacagagactggttagcaaccagaggcatcttctggaagatacacttttgtctttgctattatagatgaatatataagcagctgtactctccatcagtgctgcgtgtgtgtgtgtgtgtgtatgtgtgtgtgtgttcagttgagtgaataaatgtcatcctcttctccatcttcatttccttggccttttcgttctattccattttgcattatggcaggcctagggtgagtaacgtggatcttgatcataaatgcaaaattaaaaaatatcttgacctggttttaaatctggcagtttgagcagatcctatgtctctgagagacacattcctcataatggccagcattttgggctacaaggttttgtggttgatgatgaggatggcatgactgcagagccatcctcatctcattttttcacgtcattttcagtaactttcactcattcaaaggcaggttataagtaagtcctggtagcagcctctatggggagatttgagagtgactaaatcttggtatctgccctcaagaacttacagttaaatggggagacaatgttgtcatgaaaaggtattatagtaaggagagaaggagacatacacaggccttcaggaagagacgacagtttggggtgaggtagttggcataggcttatctgtgatgaagtggcctgggagcaccaaggggatgttgaggctagtctgggaggagcaggagttttgtctagggaacttgtaggaaattcttggagctgaaagtcccacaaagaaggccctggcaccaagggagtcagcaaacttcagattttattctctgggcaggcatttcaagtttccttttgctgtgacatactcatccattagacagcctgatacaggcctgtagcctcttccggccgtgtgtgctggggaagccccaggaaacgcacatgcccacacagggagccaagtcgtagcatttgggccttgatctaccttttctgcatcaatacactcttgagcctttgaaaaaagaacgtttcccactaaaaagaaaatgtggatttttaaaatagggactcttcctaggggaaaaaggggggctgggagtgatagagggtttaaaaaataaacaccttcaaactaacttcttcgaacccttttattcactccctgacgactttgtgctggggttggggtaactgaaccgcttatttctgtttaattgcattcaggctggatcttagaagacttttatccttccaccatctctctcagaggaatgagcggggaggttggatttactggtgactgattttctttcatgggccaaggaactgaaagagaatgtgaagcaaggttgtgtcttgcgcatggttaaaaataaagcattgtcctgcttcctaagacttagactggggttgacaattgttttagcaacaagacaattcaactatttctcctaggatttttattattattattttttcacttttctaccaaatgggttacataggaagaatgaactgaaatctgtccagagctccaagtcctttggaagaaagattagatgaacgtaaaaatgttgttgtttgctgtggcagtttacagcatttttcttgcaaaattagtgcaaatctgttggaaatagaacacaattcacaaattggaagtgaactaaaatgtaatgacgaaaagggagtagtgttttgatttggaggaggtgtatattcggcagaggttggactgagagttgggtgttatttaacataattatggtaattgggaaacatttataaacactattgggatggtgataaaatacaaaagggcctatagatgttagaaatgggtcaggttactgaaatgggattcaatttgaaaaaaatttttttaaatagaactcactgaactagattctcctctgagaaccagagaagaccatttcatagttggattcctggagacatgcgctatccaccacgtagccactttccacatgtggccatcaaccacttaagatggggttagtttaaatcaagatgtgctgttataattggtataagcataaaatcacactagattctggagatttaatatgaataataagaatactatttcagtagttttggtatattgtgtgtcaaaaatgataatattttggatgtattgggtgaaataaaatattaacatt

SEQ ID NO: 188639 - DNA, 587 bp, Homo sapiens
  Payload ID: 17108
  Gene Symbol: TIGIT
  Gene Name: T cell immunoreceptor with Ig and ITIM domains
  ENST ID: ENST00000461158
  CDS Start-End: 80-587
gaataggaacagctccggtctacagctcccagcctgagcgacgcagaagacgggtgatttctgcatttccatctgaggaatgatgacaggcacaatagaaacaacggggaacatttctgcagagaaaggtggctctatcatcttacaatgtcacctctcctccaccacggcacaagtgacccaggtcaactgggagcagcaggaccagcttctggccatttgtaatgctgacttggggtggcacatctccccatccttcaaggatcgagtggccccaggtcccggcctgggcctcaccctccagtcgctgaccgtgaacgatacaggggagtacttctgcatctatcacacctaccctgatgggacgtacactgggagaatcttcctggaggtcctagaaagctcagtggctgagcacggtgccaggttccagattccattgcttggagccatggccgcgacgctggtggtcatctgcacagcagtcatcgtggtggtcgcgttgactagaaagaagaaagccctcagaatccattctgtggaaggtgacctcaggagaaaatcagctggacaggaggaatggagcc

SEQ ID NO: 188640 - DNA, 3149 bp, Homo sapiens
  Payload ID: 17108
  Gene Symbol: TIGIT
  Gene Name: T cell immunoreceptor with Ig and ITIM domains
  Uniprot ID: Q495A1
  ENST ID: ENST00000486257
  CDS Start-End: 258-992
atgttgcccttgattctaggcagagacaggaggcatcagacagctgtgacagccatggagctcccctaccacttctgagccagagggaagactttggagaagcagaagcccaaagacactgctgggagattggtctgtgctctgggagaaccctaggttgtgtttcccgtgtacaagccaccgatcttgtggaagtcggctactttcagtggcagaagaggccacatctgcttcctgtaggccctctgggcagaagcatgcgctggtgtctcctcctgatctgggcccaggggctgaggcaggctcccctcgcctcaggaatgatgacaggcacaatagaaacaacggggaacatttctgcagagaaaggtggctctatcatcttacaatgtcacctctcctccaccacggcacaagtgacccaggtcaactgggagcagcaggaccagcttctggccatttgtaatgctgacttggggtggcacatctccccatccttcaaggatcgagtggccccaggtcccggcctgggcctcaccctccagtcgctgaccgtgaacgatacaggggagtacttctgcatctatcacacctaccctgatgggacgtacactgggagaatcttcctggaggtcctagaaagctcagtggctgagcacggtgccaggttccagattccattgcttggagccatggccgcgacgctggtggtcatctgcacagcagtcatcgtggtggtcgcgttgactagaaagaagaaagccctcagaatccattctgtggaaggtgacctcaggagaaaatcagctggacaggaggaatggagccccagtgctccctcacccccaggaagctgtgtccaggcagaagctgcacctgctgggctctgtggagagcagcggggagaggactgtgccgagctgcatgactacttcaatgtcctgagttacagaagcctgggtaactgcagcttcttcacagagactggttagcaaccagaggcatcttctggaagatacacttttgtctttgctattatagatgaatatataagcagctgtactctccatcagtgctgcgtgtgtgtgtgtgtgtgtatgtgtgtgtgtgttcagttgagtgaataaatgtcatcctcttctccatcttcatttccttggccttttcgttctattccattttgcattatggcaggcctagggtgagtaacgtggatcttgatcataaatgcaaaattaaaaaatatcttgacctggttttaaatctggcagtttgagcagatcctatgtctctgagagacacattcctcataatggccagcattttgggctacaaggttttgtggttgatgatgaggatggcatgactgcagagccatcctcatctcattttttcacgtcattttcagtaactttcactcattcaaaggcaggttataagtaagtcctggtagcagcctctatggggagatttgagagtgactaaatcttggtatctgccctcaagaacttacagttaaatggggagacaatgttgtcatgaaaaggtattatagtaaggagagaaggagacatacacaggccttcaggaagagacgacagtttggggtgaggtagttggcataggcttatctgtgatgaagtggcctgggagcaccaaggggatgttgaggctagtctgggaggagcaggagttttgtctagggaacttgtaggaaattcttggagctgaaagtcccacaaagaaggccctggcaccaagggagtcagcaaacttcagattttattctctgggcaggcatttcaagtttccttttgctgtgacatactcatccattagacagcctgatacaggcctgtagcctcttccggccgtgtgtgctggggaagccccaggaaacgcacatgcccacacagggagccaagtcgtagcatttgggccttgatctaccttttctgcatcaatacactcttgagcctttgaaaaaagaacgtttcccactaaaaagaaaatgtggatttttaaaatagggactcttcctaggggaaaaaggggggctgggagtgatagagggtttaaaaaataaacaccttcaaactaacttcttcgaacccttttattcactccctgacgactttgtgctggggttggggtaactgaaccgcttatttctgtttaattgcattcaggctggatcttagaagacttttatccttccaccatctctctcagaggaatgagcggggaggttggatttactggtgactgattttctttcatgggccaaggaactgaaagagaatgtgaagcaaggttgtgtcttgcgcatggttaaaaataaagcattgtcctgcttcctaagacttagactggggttgacaattgttttagcaacaagacaattcaactatttctcctaggatttttattattattattttttcacttttctaccaaatgggttacataggaagaatgaactgaaatctgtccagagctccaagtcctttggaagaaagattagatgaacgtaaaaatgttgttgtttgctgtggcagtttacagcatttttcttgcaaaattagtgcaaatctgttggaaatagaacacaattcacaaattggaagtgaactaaaatgtaatgacgaaaagggagtagtgttttgatttggaggaggtgtatattcggcagaggttggactgagagttgggtgttatttaacataattatggtaattgggaaacatttataaacactattgggatggtgataaaatacaaaagggcctatagatgttagaaatgggtcaggttactgaaatgggattcaatttgaaaaaaatttttttaaatagaactcactgaactagattctcctctgagaaccagagaagaccatttcatagttggattcctggagacatgcgctatccaccacgtagccactttccacatgtggccatcaaccacttaagatggggttagtttaaatcaagatgtgctgttataattggtataagcataaaatcacactagattctggagatttaatatgaataataagaatactatttcagtagttttggtatattgtgtgtcaaaaatgataatattttggatgtattgggtgaaataaaatattaacatta

SEQ ID NO: 188641 - DNA, 559 bp, Homo sapiens
  Payload ID: 17108
  Gene Symbol: TIGIT
  Gene Name: T cell immunoreceptor with Ig and ITIM domains
  ENST ID: ENST00000484319
  CDS Start-End: 70-559
ctacgaaaataacaagctggccatgaagctacatagcagaatatgcgagggggcaacgtgctaagttgaatgatgacaggcacaatagaaacaacggggaacatttctgcagagaaaggtggctctatcatcttacaatgtcacctctcctccaccacggcacaagtgacccaggtcaactgggagcagcaggaccagcttctggccatttgtaatgctgacttggggtggcacatctccccatccttcaaggatcgagtggccccaggtcccggcctgggcctcaccctccagtcgctgaccgtgaacgatacaggggagtacttctgcatctatcacacctaccctgatgggacgtacactgggagaatcttcctggaggtcctagaaagctcagtggctgagcacggtgccaggttccagattccattgcttggagccatggccgcgacgctggtggtcatctgcacagcagtcatcgtggtggtcgcgttgactagaaagaagaaagccctcagaatccattctgtggaaggtgacctcaggagaaaatcagctg

SEQ ID NO: 188642 - DNA, 3710 bp, Homo sapiens
  Payload ID: 17108
  Gene Symbol: TIGIT
  Gene Name: T cell immunoreceptor with Ig and ITIM domains
  ENST ID: ENST00000481065
  CDS Start-End: 2616-3551
ggagcttggaggagagagcacgaccccctgctgctgccgcaggatgttgcccttgattctaggcagagacaggaggcatcagacagctgtgacagccatggagctcccctaccacttctgagccagagggaagactttggagaagcagaagcccaaagacactgctgggagattggtctgtgctctgggagaaccctaggttgtgtttcccgtgtacaagccaccgatcttgtggaaggtaccaccactcccagccccgcttggctgagggctgcgggccacaggttttcaggaccgtgcttgtggttggaggctgtggactcaagtgcggctggcccgggactttcacagggcgcagggcgggctaggggaaggcccagctgtgaactgataagggggttttacagtctaggccagcacttcttcccctttcacgggcaaacgtgacattctttttcagcacctgtactcacccagctgcatcaaggcggaccagacttgtccaactcacagccccaaaagtcagggcagaataaagcacagtggctgattttagcatttttaaaatagaaatgtgagtcagcacctgatggacctcacagatccctgctatgccacgagggctgctgactggccttaaaagctcagggtggcccggggagctctcagagcaggcctgcttctcacagctgagccgctcagtgctgggggctggtgttgagtgggtgggaaccagccaggttccccgtggagtctgtgcaggaggctctggagggtctggggtagattccctggggagagacttctgtcatttgctttcctccaaggcagcctcagggtctagctggcaagtggtcactttcctgcagaaacatgctatcctcctgttctatcagataaggagggcagaatgaagaggttgggtggaaccctggccttggagtctggagactaggattttactcttgacaaagcacattatatagatagggatattgtcctccaattttcctttcacttccttaattaatattgttatcaatactactgttgatgtattgaactcctgccatcttccaggcactgtgctgaacacttcaccaaacactagagaattaaatcctcacaaccctatgaaagaggtactcttattcctatatgcacatggggaaactgagccttcaggaggttgagaaagttttccaaggtcaccaaacaggatgactttggacccagtctgttaatcatccccctctagagcaccattgatcaaaatggacttgaccatattcctctttggactggttacttagcaaaaaacagaaaaattatttaacaattgtttaaaaccacctctaagtttctctggatatctcattatataagagaggtctcacctctttggctcccacccagctcaactatggaaacacaggctgtaaatttttatagcccaaatcctagtgtccaccactttctgtgctctagtcccactagctgctcttggccctgccactcctggctccccggccttagtgagtttgggaaacatccctccagttcaaccttggcaccttcccttggacacacattaggtattatttctccttcagctgaaggctttgtagctattgaaaggcaaggcatctcttgatgtgagccttgaaggacaggttgctttgggtaggcagagagaagctggtaaggcgtatattgtctaagggtctggaggtggggtataaggggtatacaagtcatagagttggggataggcagaacccagagaggggagaaaactggcctgagatagaagaccttgcaagggagaaggagggtaggagcctggatggtgtgaaatgctagaggtgcatggctggaatggagggggtggggcaccaggcttcagatgcttctgggtgcagatgcagattttcaggatgtacaacatggagcatccccaaggcaactgtgttgagagcctgcgaggcaggtgaatgtggatcttctaccccctctcctgactgagttcaccaaggaacaagctttgtaaactatttgaggctcccaggggctcacccttctttgcatttccagctctcatgaggtcattgtgcacaggaaagctctctcctctaatctcctctgatcctactgcaccagagaaatcaagccagaattcaataaagtctcagtccagataaacaagacaaaagaaataagattcgagtagaagatctccttcaagggaaagttgctgtgtttgtccaagacctttgtcccatccatgtatcatcccccaagtaaacacttcttgttcacctgttcattagatttcaagtgcagtccctggcctgtaagtccctacaatgataagcttctcttatcattgcacattcttcatcaggaggatgccagaggagctcagccaacagttcctcatcagtagcagattcttcagaatcttgggcactacacagatgcccttgagctctttgaataaaggctgatttttagaaaaaacattaagacagaacttaaaaacaatagattgactataatccaaagacgagtgtacctctaaccacaattttcatttatttttaaatgtttccttcatggcctttcttgtggctcaccctatgcagtttgtgtatttgttgacaactttatgtgtttttaatatggtttttgccaaacttggtttttccgagaccgtcttttctcagaggctcagttttaccgtcctatctgcagtcggctactttcagtggcagaagaggccacatctgcttcctgtaggccctctgggcagaagcatgcgctggtgtctcctcctgatctgggcccaggggctgaggcaggctcccctcgcctcaggaatgatgacaggcacaatagaaacaacggggaacatttctgcagagaaaggtggctctatcatcttacaatgtcacctctcctccaccacggcacaagtgacccaggtcaactgggagcagcaggaccagcttctggccatttgtaatgctgacttggggtggcacatctccccatccttcaaggatcgagtggccccaggtcccggcctgggcctcaccctccagtcgctgaccgtgaacgatacaggggagtacttctgcatctatcacacctaccctgatgggacgtacactgggagaatcttcctggaggtcctagaaagctcagtggctgagcacggtgccaggttccagattccattgcttggagccatggccgcgacgctggtggtcatctgcacagcagtcatcgtggtggtcgcgttgactagaaagaagaaagccctcagaatccattctgtggaaggtgacctcaggagaaaatcagctggacaggaggaatggagccccagtgctccctcacccccaggaagctgtgtccaggcagaagctgcacctgctgggctctgtggagagcagcggggagaggactgtgccgagctgcatgactacttcaatgtcctgagttacagaagcctgggtaactgcagcttcttcacagagactggttagcaaccagaggcatcttctggaagatacacttttgtctttgctattatagatgaatatataagcagctgtactctccatcagtgctgcgtgtgtgtgtgtgtgtgtatgtgtgtgtgtgttcagttgagtgaataaatgtcatcctcttctccatcttca

SEQ ID NO: 188643 - DNA, 976 bp, Homo sapiens
  Payload ID: 17109
  Gene Symbol: TRAC
  Gene Name: T cell receptor alpha constant
  ENST ID: ENST00000611116
  CDS Start-End: 1-425
atatccagaaccctgaccctgccgtgtaccagctgagagactctaaatccagtgacaagtctgtctgcctattcaccgattttgattctcaaacaaatgtgtcacaaagtaaggattctgatgtgtatatcacagacaaaactgtgctagacatgaggtctatggacttcaagagcaacagtgctgtggcctggagcaacaaatctgactttgcatgtgcaaacgccttcaacaacagcattattccagaagacaccttcttccccagcccagaaagttcctgtgatgtcaagctggtcgagaaaagctttgaaacagatacgaacctaaactttcaaaacctgtcagtgattgggttccgaatcctcctcctgaaagtggccgggtttaatctgctcatgacgctgcggctgtggtccagctgagatctgcaagattgtaagacagcctgtgctccctcgctccttcctctgcattgcccctcttctccctctccaaacagagggaactctcctacccccaaggaggtgaaagctgctaccacctctgtgcccccccggcaatgccaccaactggatcctacccgaatttatgattaagattgctgaagagctgccaaacactgctgccaccccctctgttcccttattgctgcttgtcactgcctgacattcacggcagaggcaaggctgctgcagcctcccctggctgtgcacattccctcctgctccccagagactgcctccgccatcccacagatgatggatcttcagtgggttctcttgggctctaggtcctgcagaatgttgtgaggggtttatttttttttaatagtgttcataaagaaatacatagtattcttcttctcaagacgtggggggaaattatctcattatcgaggccctgctatgctgtgtatctgggcgtgttgtatgtcctgctgccgatgccttcattaaaatgatttggaagagca

SEQ ID NO: 188644 - DNA, 1147 bp, Homo sapiens
  Payload ID: 17109
  Gene Symbol: TRAC
  Gene Name: T cell receptor alpha constant
  ENST ID: ENST00000616778
  CDS Start-End: 109-597
ctgggactgaggtgttctaagcctggaaagacacaaagctgtcctcatcccaacctgccgtgcccctccttgagggttagtgtaaggctctgaaggactgtgtgaattatggtggtgctacaaacaagctcatctttggaactggcactctgcttgctgtccagccaagtacatatccagaaccctgaccctgccgtgtaccagctgagagactctaaatccagtgacaagtctgtctgcctattcaccgattttgattctcaaacaaatgtgtcacaaagtaaggattctgatgtgtatatcacagacaaaactgtgctagacatgaggtctatggacttcaagagcaacagtgctgtggcctggagcaacaaatctgactttgcatgtgcaaacgccttcaacaacagcattattccagaagacaccttcttccccagcccagaaagttcctgtgatgtcaagctggtcgagaaaagctttgaaacagatacgaacctaaactttcaaaacctgtcagtgattgggttccgaatcctcctcctgaaagtggccgggtttaatctgctcatgacgctgcggctgtggtccagctgagatctgcaagattgtaagacagcctgtgctccctcgctccttcctctgcattgcccctcttctccctctccaaacagagggaactctcctacccccaaggaggtgaaagctgctaccacctctgtgcccccccggcaatgccaccaactggatcctacccgaatttatgattaagattgctgaagagctgccaaacactgctgccaccccctctgttcccttattgctgcttgtcactgcctgacattcacggcagaggcaaggctgctgcagcctcccctggctgtgcacattccctcctgctccccagagactgcctccgccatcccacagatgatggatcttcagtgggttctcttgggctctaggtcctgcagaatgttgtgaggggtttatttttttttaatagtgttcataaagaaatacatagtattcttcttctcaagacgtggggggaaattatctcattatcgaggccctgctatgctgtgtatctgggcgtgttgtatgtcctgctgccgatgccttcattaaaatgatttggaagagc

SEQ ID NO: 188645 - DNA, 62 bp, Homo sapiens
  Payload ID: 17110
  Gene Symbol: TRAJ1
  Gene Name: T cell receptor alpha joining 1 (non-functional)
  ENST ID: ENST00000390536
  CDS Start-End: 1-62
gtatgaaagtattacctcccagttgcaatttggcaaaggaaccagagtttccacttctcccc

SEQ ID NO: 188646 - DNA, 64 bp, Homo sapiens
  Payload ID: 17111
  Gene Symbol: TRAJ10
  Gene Name: T cell receptor alpha joining 10
  ENST ID: ENST00000390527
  CDS Start-End: 1-64
atactcacgggaggaggaaacaaactcacctttgggacaggcactcagctaaaagtggaactca

SEQ ID NO: 188647 - DNA, 60 bp, Homo sapiens
  Payload ID: 17112
  Gene Symbol: TRAJ11
  Gene Name: T cell receptor alpha joining 11
  ENST ID: ENST00000390526
  CDS Start-End: 1-60
tgaattcaggatacagcaccctcacctttgggaaggggactatgcttctagtctctccag

SEQ ID NO: 188648 - DNA, 60 bp, Homo sapiens
  Payload ID: 17113
  Gene Symbol: TRAJ12
  Gene Name: T cell receptor alpha joining 12
  ENST ID: ENST00000390525
  CDS Start-End: 1-60
ggatggatagcagctataaattgatcttcgggagtgggaccagactgctggtcaggcctg

SEQ ID NO: 188649 - DNA, 63 bp, Homo sapiens
  Payload ID: 17114
  Gene Symbol: TRAJ13
  Gene Name: T cell receptor alpha joining 13
  ENST ID: ENST00000390524
  CDS Start-End: 1-63
tgaattctgggggttaccagaaagttacctttggaactggaacaaagctccaagtcatcccaa

SEQ ID NO: 188650 - DNA, 52 bp, Homo sapiens
  Payload ID: 17115
  Gene Symbol: TRAJ14
  Gene Name: T cell receptor alpha joining 14
  ENST ID: ENST00000390523
  CDS Start-End: 1-52
atttatagcacattcatctttgggagtgggacaagattatcagtaaaacctg

SEQ ID NO: 188651 - DNA, 60 bp, Homo sapiens
  Payload ID: 17116
  Gene Symbol: TRAJ16
  Gene Name: T cell receptor alpha joining 16
  ENST ID: ENST00000390521
  CDS Start-End: 1-60
ggttttcagatggccagaagctgctctttgcaagggggaccatgttaaaggtggatctta

SEQ ID NO: 188652 - DNA, 63 bp, Homo sapiens
  Payload ID: 17117
  Gene Symbol: TRAJ17
  Gene Name: T cell receptor alpha joining 17
  ENST ID: ENST00000390520
  CDS Start-End: 1-63
tgatcaaagctgcaggcaacaagctaacttttggaggaggaaccagggtgctagttaaaccaa

SEQ ID NO: 188653 - DNA, 66 bp, Homo sapiens
  Payload ID: 17118
  Gene Symbol: TRAJ18
  Gene Name: T cell receptor alpha joining 18
  ENST ID: ENST00000390519
  CDS Start-End: 1-66
ccgacagaggctcaaccctggggaggctatactttggaagaggaactcagttgactgtctggcctg

SEQ ID NO: 188654 - DNA, 60 bp, Homo sapiens
  Payload ID: 17119
  Gene Symbol: TRAJ19
  Gene Name: T cell receptor alpha joining 19 (non-functional)
  ENST ID: ENST00000390518
  CDS Start-End: 1-60
gctatcaaagattttacaatttcacctttggaaagggatccaaacataatgtcactccaa

SEQ ID NO: 188655 - DNA, 66 bp, Homo sapiens
  Payload ID: 17120
  Gene Symbol: TRAJ2
  Gene Name: T cell receptor alpha joining 2 (non-functional)
  ENST ID: ENST00000390535
  CDS Start-End: 1-66
tgaatactggaggaacaattgataaactcacatttgggaaagggacccatgtattcattatatctg

SEQ ID NO: 188656 - DNA, 57 bp, Homo sapiens
  Payload ID: 17121
  Gene Symbol: TRAJ20
  Gene Name: T cell receptor alpha joining 20
  ENST ID: ENST00000390517
  CDS Start-End: 1-57
gttctaacgactacaagctcagctttggagccggaaccacagtaactgtaagagcaa

SEQ ID NO: 188657 - DNA, 55 bp, Homo sapiens
  Payload ID: 17122
  Gene Symbol: TRAJ21
  Gene Name: T cell receptor alpha joining 21
  ENST ID: ENST00000390516
  CDS Start-End: 1-55
tacaacttcaacaaattttactttggatctgggaccaaactcaatgtaaaaccaa

SEQ ID NO: 188658 - DNA, 63 bp, Homo sapiens
  Payload ID: 17123
  Gene Symbol: TRAJ22
  Gene Name: T cell receptor alpha joining 22
  ENST ID: ENST00000390515
  CDS Start-End: 1-63
tttcttctggttctgcaaggcaactgacctttggatctgggacacaattgactgttttacctg

SEQ ID NO: 188659 - DNA, 63 bp, Homo sapiens
  Payload ID: 17124
  Gene Symbol: TRAJ23
  Gene Name: T cell receptor alpha joining 23
  ENST ID: ENST00000390514
  CDS Start-End: 1-63
tgatttataaccagggaggaaagcttatcttcggacagggaacggagttatctgtgaaaccca

SEQ ID NO: 188660 - DNA, 63 bp, Homo sapiens
  Payload ID: 17125
  Gene Symbol: TRAJ24
  Gene Name: T cell receptor alpha joining 24
  ENST ID: ENST00000390513
  CDS Start-End: 1-63
tgacaactgacagctgggggaaattccagtttggagcagggacccaggttgtggtcaccccag

SEQ ID NO: 188661 - DNA, 60 bp, Homo sapiens
  Payload ID: 17126
  Gene Symbol: TRAJ25
  Gene Name: T cell receptor alpha joining 25 (non-functional)
  ENST ID: ENST00000390512
  CDS Start-End: 1-60
cagaaggacaaggcttctcctttatctttgggaaggggacaaggctgcttgtcaagccaa

SEQ ID NO: 188662 - DNA, 60 bp, Homo sapiens
  Payload ID: 17127
  Gene Symbol: TRAJ26
  Gene Name: T cell receptor alpha joining 26
  ENST ID: ENST00000390511
  CDS Start-End: 1-60
gggataactatggtcagaattttgtctttggtcccggaaccagattgtccgtgctgccct

SEQ ID NO: 188663 - DNA, 59 bp, Homo sapiens
  Payload ID: 17128
  Gene Symbol: TRAJ27
  Gene Name: T cell receptor alpha joining 27
  ENST ID: ENST00000390510
  CDS Start-End: 1-59
taacaccaatgcaggcaaatcaacctttggggatgggactacgctcactgtgaagccaa

SEQ ID NO: 188664 - DNA, 66 bp, Homo sapiens
  Payload ID: 17129
  Gene Symbol: TRAJ28
  Gene Name: T cell receptor alpha joining 28
  ENST ID: ENST00000390509
  CDS Start-End: 1-66
catactctggggctgggagttaccaactcactttcgggaaggggaccaaactctcggtcataccaa

SEQ ID NO: 188665 - DNA, 60 bp, Homo sapiens
  Payload ID: 17130
  Gene Symbol: TRAJ29
  Gene Name: T cell receptor alpha joining 29
  ENST ID: ENST00000390508
  CDS Start-End: 1-60
ggaattcaggaaacacacctcttgtctttggaaagggcacaagactttctgtgattgcaa

SEQ ID NO: 188666 - DNA, 62 bp, Homo sapiens
  Payload ID: 17131
  Gene Symbol: TRAJ3
  Gene Name: T cell receptor alpha joining 3
  ENST ID: ENST00000390534
  CDS Start-End: 1-62
ggggtacagcagtgcttccaagataatctttggatcagggaccagactcagcatccggccaa

SEQ ID NO: 188667 - DNA, 57 bp, Homo sapiens
  Payload ID: 17132
  Gene Symbol: TRAJ30
  Gene Name: T cell receptor alpha joining 30
  ENST ID: ENST00000390507
  CDS Start-End: 1-57
tgaacagagatgacaagatcatctttggaaaagggacacgacttcatattctcccca

SEQ ID NO: 188668 - DNA, 57 bp, Homo sapiens
  Payload ID: 17133
  Gene Symbol: TRAJ31
  Gene Name: T cell receptor alpha joining 31
  ENST ID: ENST00000390506
  CDS Start-End: 1-57
ggaataacaatgccagactcatgtttggagatggaactcagctggtggtgaagccca

SEQ ID NO: 188669 - DNA, 66 bp, Homo sapiens
  Payload ID: 17134
  Gene Symbol: TRAJ32
  Gene Name: T cell receptor alpha joining 32
  ENST ID: ENST00000390505
  CDS Start-End: 1-66
tgaattatggtggtgctacaaacaagctcatctttggaactggcactctgcttgctgtccagccaa

SEQ ID NO: 188670 - DNA, 57 bp, Homo sapiens
  Payload ID: 17135
  Gene Symbol: TRAJ33
  Gene Name: T cell receptor alpha joining 33
  ENST ID: ENST00000390504
  CDS Start-End: 1-57
tggatagcaactatcagttaatctggggcgctgggaccaagctaattataaagccag

SEQ ID NO: 188671 - DNA, 58 bp, Homo sapiens
  Payload ID: 17136
  Gene Symbol: TRAJ34
  Gene Name: T cell receptor alpha joining 34
  ENST ID: ENST00000390503
  CDS Start-End: 1-58
tcttataacaccgacaagctcatctttgggactgggaccagattacaagtctttccaa

SEQ ID NO: 188672 - DNA, 59 bp, Homo sapiens
  Payload ID: 17137
  Gene Symbol: TRAJ35
  Gene Name: T cell receptor alpha joining 35 (non-functional)
  ENST ID: ENST00000390502
  CDS Start-End: 1-59
gataggctttgggaatgtgctgcattgcgggtccggcactcaagtgattgttttaccac

SEQ ID NO: 188673 - DNA, 58 bp, Homo sapiens
  Payload ID: 17138
  Gene Symbol: TRAJ36
  Gene Name: T cell receptor alpha joining 36
  ENST ID: ENST00000614481
  CDS Start-End: 1-58
tcaaactggggcaaacaacctcttctttgggactggaacgagactcaccgttattccc

SEQ ID NO: 188674 - DNA, 65 bp, Homo sapiens
  Payload ID: 17139
  Gene Symbol: TRAJ37
  Gene Name: T cell receptor alpha joining 37
  ENST ID: ENST00000612375
  CDS Start-End: 1-65
tggctctagcaacacaggcaaactaatctttgggcaagggacaactttacaagtaaaaccaggta

SEQ ID NO: 188675 - DNA, 62 bp, Homo sapiens
  Payload ID: 17140
  Gene Symbol: TRAJ38
  Gene Name: T cell receptor alpha joining 38
  ENST ID: ENST00000390499
  CDS Start-End: 1-62
taatgctggcaacaaccgtaagctgatttggggattgggaacaagcctggcagtaaatccga

SEQ ID NO: 188676 - DNA, 63 bp, Homo sapiens
  Payload ID: 17141
  Gene Symbol: TRAJ39
  Gene Name: T cell receptor alpha joining 39
  ENST ID: ENST00000390498
  CDS Start-End: 1-63
tgaataataatgcaggcaacatgctcacctttggagggggaacaaggttaatggtcaaacccc

SEQ ID NO: 188677 - DNA, 63 bp, Homo sapiens
  Payload ID: 17142
  Gene Symbol: TRAJ4
  Gene Name: T cell receptor alpha joining 4
  ENST ID: ENST00000390533
  CDS Start-End: 1-63
tgttttctggtggctacaataagctgatttttggagcagggaccaggctggctgtacacccat

SEQ ID NO: 188678 - DNA, 61 bp, Homo sapiens
  Payload ID: 17143
  Gene Symbol: TRAJ40
  Gene Name: T cell receptor alpha joining 40
  ENST ID: ENST00000390497
  CDS Start-End: 1-61
actacctcaggaacctacaaatacatctttggaacaggcaccaggctgaaggttttagcaa

SEQ ID NO: 188679 - DNA, 62 bp, Homo sapiens
  Payload ID: 17144
  Gene Symbol: TRAJ41
  Gene Name: T cell receptor alpha joining 41
  ENST ID: ENST00000390496
  CDS Start-End: 1-62
gaactcaaattccgggtatgcactcaacttcggcaaaggcacctcgctgttggtcacacccc

SEQ ID NO: 188680 - DNA, 66 bp, Homo sapiens
  Payload ID: 17145
  Gene Symbol: TRAJ42
  Gene Name: T cell receptor alpha joining 42
  ENST ID: ENST00000390495
  CDS Start-End: 1-66
tgaattatggaggaagccaaggaaatctcatctttggaaaaggcactaaactctctgttaaaccaa

SEQ ID NO: 188681 - DNA, 54 bp, Homo sapiens
  Payload ID: 17146
  Gene Symbol: TRAJ43
  Gene Name: T cell receptor alpha joining 43
  ENST ID: ENST00000390494
  CDS Start-End: 1-54
acaataacaatgacatgcgctttggagcagggaccagactgacagtaaaaccaa

SEQ ID NO: 188682 - DNA, 63 bp, Homo sapiens
  Payload ID: 17147
  Gene Symbol: TRAJ44
  Gene Name: T cell receptor alpha joining 44
  ENST ID: ENST00000390493
  CDS Start-End: 1-63
taaataccggcactgccagtaaactcacctttgggactggaacaagacttcaggtcacgctcg

SEQ ID NO: 188683 - DNA, 66 bp, Homo sapiens
  Payload ID: 17148
  Gene Symbol: TRAJ45
  Gene Name: T cell receptor alpha joining 45
  ENST ID: ENST00000390492
  CDS Start-End: 1-66
tgtattcaggaggaggtgctgacggactcacctttggcaaagggactcatctaatcatccagccct

SEQ ID NO: 188684 - DNA, 63 bp, Homo sapiens
  Payload ID: 17149
  Gene Symbol: TRAJ46
  Gene Name: T cell receptor alpha joining 46
  ENST ID: ENST00000390491
  CDS Start-End: 1-63
agaagaaaagcagcggagacaagctgacttttgggaccgggactcgtttagcagttaggccca

SEQ ID NO: 188685 - DNA, 57 bp, Homo sapiens
  Payload ID: 17150
  Gene Symbol: TRAJ47
  Gene Name: T cell receptor alpha joining 47
  ENST ID: ENST00000390490
  CDS Start-End: 1-57
tggaatatggaaacaaactggtctttggcgcaggaaccattctgagagtcaagtcct

SEQ ID NO: 188686 - DNA, 63 bp, Homo sapiens
  Payload ID: 17151
  Gene Symbol: TRAJ48
  Gene Name: T cell receptor alpha joining 48
  ENST ID: ENST00000390489
  CDS Start-End: 1-63
tatctaactttggaaatgagaaattaacctttgggactggaacaagactcaccatcataccca

SEQ ID NO: 188687 - DNA, 56 bp, Homo sapiens
  Payload ID: 17152
  Gene Symbol: TRAJ49
  Gene Name: T cell receptor alpha joining 49
  ENST ID: ENST00000390488
  CDS Start-End: 1-56
gaacaccggtaaccagttctattttgggacagggacaagtttgacggtcattccaa

SEQ ID NO: 188688 - DNA, 60 bp, Homo sapiens
  Payload ID: 17153
  Gene Symbol: TRAJ5
  Gene Name: T cell receptor alpha joining 5
  ENST ID: ENST00000390532
  CDS Start-End: 1-60
tggacacgggcaggagagcacttacttttgggagtggaacaagactccaagtgcaaccaa

SEQ ID NO: 188689 - DNA, 60 bp, Homo sapiens
  Payload ID: 17154
  Gene Symbol: TRAJ50
  Gene Name: T cell receptor alpha joining 50
  ENST ID: ENST00000390487
  CDS Start-End: 1-60
tgaaaacctcctacgacaaggtgatatttgggccagggacaagcttatcagtcattccaa

SEQ ID NO: 188690 - DNA, 69 bp, Homo sapiens
  Payload ID: 17155
  Gene Symbol: TRAJ52
  Gene Name: T cell receptor alpha joining 52
  ENST ID: ENST00000390486
  CDS Start-End: 1-69
ctaatgctggtggtactagctatggaaagctgacatttggacaagggaccatcttgactgtccatccaa

SEQ ID NO: 188691 - DNA, 66 bp, Homo sapiens
  Payload ID: 17156
  Gene Symbol: TRAJ53
  Gene Name: T cell receptor alpha joining 53
  ENST ID: ENST00000390485
  CDS Start-End: 1-66
agaatagtggaggtagcaactataaactgacatttggaaaaggaactctcttaaccgtgaatccaa

SEQ ID NO: 188692 - DNA, 60 bp, Homo sapiens
  Payload ID: 17157
  Gene Symbol: TRAJ54
  Gene Name: T cell receptor alpha joining 54
  ENST ID: ENST00000390484
  CDS Start-End: 1-60
taattcagggagcccagaagctggtatttggccaaggaaccaggctgactatcaacccaa

SEQ ID NO: 188693 - DNA, 62 bp, Homo sapiens
  Payload ID: 17158
  Gene Symbol: TRAJ56
  Gene Name: T cell receptor alpha joining 56
  ENST ID: ENST00000390483
  CDS Start-End: 1-62
ttatactggagccaatagtaagctgacatttggaaaaggaataactctgagtgttagaccag

SEQ ID NO: 188694 - DNA, 63 bp, Homo sapiens
  Payload ID: 17159
  Gene Symbol: TRAJ57
  Gene Name: T cell receptor alpha joining 57
  ENST ID: ENST00000390482
  CDS Start-End: 1-63
taactcagggcggatctgaaaagctggtctttggaaagggaacgaaactgacagtaaacccat

SEQ ID NO: 188695 - DNA, 63 bp, Homo sapiens
  Payload ID: 17160
  Gene Symbol: TRAJ58
  Gene Name: T cell receptor alpha joining 58 (non-functional)
  ENST ID: ENST00000390481
  CDS Start-End: 1-63
tttaagaaaccagtggctctaggttgacctttggggaaggaacacagctcacagtgaatcctg

SEQ ID NO: 188696 - DNA, 54 bp, Homo sapiens
  Payload ID: 17161
  Gene Symbol: TRAJ59
  Gene Name: T cell receptor alpha joining 59 (non-functional)
  ENST ID: ENST00000390480
  CDS Start-End: 1-54
ggaaggaaggaaacaggaaatttacatttggaatggggacgcaagtgagagtga

SEQ ID NO: 188697 - DNA, 62 bp, Homo sapiens
  Payload ID: 17162
  Gene Symbol: TRAJ6
  Gene Name: T cell receptor alpha joining 6
  ENST ID: ENST00000390531
  CDS Start-End: 1-62
tgcatcaggaggaagctacatacctacatttggaagaggaaccagccttattgttcatccgt

SEQ ID NO: 188698 - DNA, 60 bp, Homo sapiens
  Payload ID: 17163
  Gene Symbol: TRAJ61
  Gene Name: T cell receptor alpha joining 61 (non-functional)
  ENST ID: ENST00000390479
  CDS Start-End: 1-60
ggtaccgggttaataggaaactgacatttggagccaacactagaggaatcatgaaactca

SEQ ID NO: 188699 - DNA, 59 bp, Homo sapiens
  Payload ID: 17164
  Gene Symbol: TRAJ7
  Gene Name: T cell receptor alpha joining 7
  ENST ID: ENST00000390530
  CDS Start-End: 1-59
tgactatgggaacaacagactcgcttttgggaaggggaaccaagtggtggtcataccaa

SEQ ID NO: 188700 - DNA, 61 bp, Homo sapiens
  Payload ID: 17165
  Gene Symbol: TRAJ9
  Gene Name: T cell receptor alpha joining 9
  ENST ID: ENST00000390528
  CDS Start-End: 1-61
ggaaatactggaggcttcaaaactatctttggagcaggaacaagactatttgttaaagcaa

SEQ ID NO: 188701 - DNA, 379 bp, Homo sapiens
  Payload ID: 17166
  Gene Symbol: TRAV10
  Gene Name: T cell receptor alpha variable 10
  ENST ID: ENST00000390432
  CDS Start-End: 37-379
agtcaacttctgggagcagatctctgcagaataaaaatgaaaaagcatctgacgaccttcttggtgattttgtggctttatttttatagggggaatggcaaaaaccaagtggagcagagtcctcagtccctgatcatcctggagggaaagaactgcactcttcaatgcaattatacagtgagccccttcagcaacttaaggtggtataagcaagatacggggagaggtcctgtttccctgacaatcatgactttcagtgagaacacaaagtcgaacggaagatatacagcaactctggatgcagacacaaagcaaagctctctgcacatcacagcctcccagctcagcgattcagcctcctacatctgtgtggtgagcg

SEQ ID NO: 188702 - DNA, 392 bp, Homo sapiens
  Payload ID: 17167
  Gene Symbol: TRAV1-1
  Gene Name: T cell receptor alpha variable 1-1
  ENST ID: ENST00000542354
  CDS Start-End: 67-392
cttctgcagactacagtggctcaggaaccggggatgcagtgccaggctcatggtatcctgcagcagatgtggggagctttccttctctatgtttccatgaagatgggaggcactgcaggacaaagccttgagcagccctctgaagtgacagctgtggaaggagccattgtccagataaactgcacgtaccagacatctgggttttatgggctgtcctggtaccagcaacatgatggcggagcacccacatttctttcttacaatgctctggatggtttggaggagacaggtcgtttttcttcattccttagtcgctctgatagttatggttacctccttctacaggagctccagatgaaagactctgcctcttacttctgcgctgtgagaga

SEQ ID NO: 188703 - DNA, 402 bp, Homo sapiens
  Payload ID: 17168
  Gene Symbol: TRAV1-2
  Gene Name: T cell receptor alpha variable 1-2
  ENST ID: ENST00000390423
  CDS Start-End: 85-402
cccacatgaagtgtctaccttctgcagactccaatggctcaggaactgggaatgcagtgccaggctcgtggtatcctgcagcagatgtggggagttttccttctttatgtttccatgaagatgggaggcactacaggacaaaacattgaccagcccactgagatgacagctacggaaggtgccattgtccagatcaactgcacgtaccagacatctgggttcaacgggctgttctggtaccagcaacatgctggcgaagcacctacatttctgtcttacaatgttctggatggtttggaggagaaaggtcgtttttcttcattccttagtcggtctaaagggtacagttacctccttttgaaggagctccagatgaaagactctgcctcttacctctgtgct

SEQ ID NO: 188704 - DNA, 340 bp, Homo sapiens
  Payload ID: 17169
  Gene Symbol: TRAV12-1
  Gene Name: T cell receptor alpha variable 12-1
  ENST ID: ENST00000390433
  CDS Start-End: 4-340
atgatgatatccttgagagttttactggtgatcctgtggcttcagttaagctgggtttggagccaacggaaggaggtggagcaggatcctggacccttcaatgttccagagggagccactgtcgctttcaactgtacttacagcaacagtgcttctcagtctttcttctggtacagacaggattgcaggaaagaacctaagttgctgatgtccgtatactccagtggtaatgaagatggaaggtttacagcacagctcaatagagccagccagtatatttccctgctcatcagagactccaagctcagtgattcagccacctacctctgtgtggtgaaca

SEQ ID NO: 188705 - DNA, 445 bp, Homo sapiens
  Payload ID: 17170
  Gene Symbol: TRAV12-2
  Gene Name: T cell receptor alpha variable 12-2
  ENST ID: ENST00000390437
  CDS Start-End: 106-445
aaagcagattctttttatgatttttaaagtagaaatatccattctaggtgcattttttaagggtttaaaatttgaatcctcagtgaaccagggcagagaagaatgatgaaatccttgagagttttactagtgatcctgtggcttcagttgagctgggtttggagccaacagaaggaggtggagcagaattctggacccctcagtgttccagagggagccattgcctctctcaactgcacttacagtgaccgaggttcccagtccttcttctggtacagacaatattctgggaaaagccctgagttgataatgttcatatactccaatggtgacaaagaagatggaaggtttacagcacagctcaataaagccagccagtatgtttctctgctcatcagagactcccagcccagtgattcagccacctacctctgtgccgtgaaca

SEQ ID NO: 188706 - DNA, 399 bp, Homo sapiens
  Payload ID: 17171
  Gene Symbol: TRAV12-3
  Gene Name: T cell receptor alpha variable 12-3
  ENST ID: ENST00000390442
  CDS Start-End: 57-399
attatttttttttcgtgtttaaggtttgaatcctcagtgaaccagggcagaaaagaatgatgaaatccttgagagttttactggtgatcctgtggcttcagttaagctgggtttggagccaacagaaggaggtggagcaggatcctggaccactcagtgttccagagggagccattgtttctctcaactgcacttacagcaacagtgcttttcaatacttcatgtggtacagacagtattccagaaaaggccctgagttgctgatgtacacatactccagtggtaacaaagaagatggaaggtttacagcacaggtcgataaatccagcaagtatatctccttgttcatcagagactcacagcccagtgattcagccacctacctctgtgcaatgagcg

SEQ ID NO: 188707 - DNA, 360 bp, Homo sapiens
  Payload ID: 17172
  Gene Symbol: TRAV13-1
  Gene Name: T cell receptor alpha variable 13-1
  ENST ID: ENST00000390436
  CDS Start-End: 24-360
gatcttaattgggaagaacaaggatgacatccattcgagctgtatttatattcctgtggctgcagctggacttggtgaatggagagaatgtggagcagcatccttcaaccctgagtgtccaggagggagacagcgctgttatcaagtgtacttattcagacagtgcctcaaactacttcccttggtataagcaagaacttggaaaaggacctcagcttattatagacattcgttcaaatgtgggcgaaaagaaagaccaacgaattgctgttacattgaacaagacagccaaacatttctccctgcacatcacagagacccaacctgaagactcggctgtctacttctgtgcagcaagta

SEQ ID NO: 188708 - DNA, 410 bp, Homo sapiens
  Payload ID: 17173
  Gene Symbol: TRAV13-2
  Gene Name: T cell receptor alpha variable 13-2
  ENST ID: ENST00000390439
  CDS Start-End: 71-410
cgatgatggaagtagctcttatggctggagattgcaggtttatgactgatcctatttgggaagaacaatgatggcaggcattcgagctttatttatgtacttgtggctgcagctggactgggtgagcagaggagagagtgtggggctgcatcttcctaccctgagtgtccaggagggtgacaactctattatcaactgtgcttattcaaacagcgcctcagactacttcatttggtacaagcaagaatctggaaaaggtcctcaattcattatagacattcgttcaaatatggacaaaaggcaaggccaaagagtcaccgttttattgaataagacagtgaaacatctctctctgcaaattgcagctactcaacctggagactcagctgtctacttttgtgcagagaata

SEQ ID NO: 188709 - DNA, 425 bp, Homo sapiens
  Payload ID: 17174
  Gene Symbol: TRAV14DV4
  Gene Name: T cell receptor alpha variable 14/delta variable 4
  ENST ID: ENST00000390440
  CDS Start-End: 76-425
gccaggttcacttcacagtacagagtcctgaaaataaagaagaaaatttttttttatctagaaaaagaaccaaacatgtcactttctagcctgctgaaggtggtcacagcttcactgtggctaggacctggcattgcccagaagataactcaaacccaaccaggaatgttcgtgcaggaaaaggaggctgtgactctggactgcacatatgacaccagtgatccaagttatggtctattctggtacaagcagcccagcagtggggaaatgatttttcttatttatcaggggtcttatgaccagcaaaatgcaacagaaggtcgctactcattgaatttccagaaggcaagaaaatccgccaaccttgtcatctccgcttcacaactgggggactcagcaatgtacttctgtgcaatgagagaggg

SEQ ID NO: 188710 - DNA, 329 bp, Homo sapiens
  Payload ID: 17175
  Gene Symbol: TRAV16
  Gene Name: T cell receptor alpha variable 16
  ENST ID: ENST00000390444
  CDS Start-End: 1-329
atgaagcccaccctcatctcagtgcttgtgataatatttatactcagaggaacaagagcccagagagtgactcagcccgagaagctcctctctgtctttaaaggggccccagtggagctgaagtgcaactattcctattctgggagtcctgaactcttctggtatgtccagtactccagacaacgcctccagttactcttgagacacatctctagagagagcatcaaaggcttcactgctgaccttaacaaaggcgagacatctttccacctgaagaaaccatttgctcaagaggaagactcagccatgtattactgtgctctaagtgg

SEQ ID NO: 188711 - DNA, 484 bp, Homo sapiens
  Payload ID: 17176
  Gene Symbol: TRAV17
  Gene Name: T cell receptor alpha variable 17
  ENST ID: ENST00000390445
  CDS Start-End: 148-484
aggactgagcttgcctgtgactggctagggaggaacctgagactaggggacagaaagactagggattcacccagtaaagagagctcatctgtgactgaggagccttgctccatttcaggtcttctgtgatttcaataaggaagaagaatggaaactctcctgggagtgtctttggtgattctatggcttcaactggctagggtgaacagtcaacagggagaagaggatcctcaggccttgagcatccaggagggtgaaaatgccaccatgaactgcagttacaaaactagtataaacaatttacagtggtatagacaaaattcaggtagaggccttgtccacctaattttaatacgttcaaatgaaagagagaaacacagtggaagattaagagtcacgcttgacacttccaagaaaagcagttccttgttgatcacggcttcccgggcagcagacactgcttcttacttctgtgctacggacg

SEQ ID NO: 188712 - DNA, 440 bp, Homo sapiens
  Payload ID: 17177
  Gene Symbol: TRAV18
  Gene Name: T cell receptor alpha variable 18
  ENST ID: ENST00000390446
  CDS Start-End: 106-440
gattttgtagaagattccgccaaagactcaacaacataaagaaatatatatacctttcggtttggatatctctcaacaaaaccttctactgcttctcagccagccatgctgtctgcttcctgctcaggacttgtgatcttgttgatattcagaaggaccagtggagactcggttacccagacagaaggcccagttaccctccctgagagggcagctctgacattaaactgcacttatcagtccagctattcaacttttctattctggtatgtccagtatctaaacaaagagcctgagctcctcctgaaaagttcagaaaaccaggagacggacagcagaggttttcaggccagtcctatcaagagtgacagttccttccacctggagaagccctcggtgcagctgtcggactctgccgtgtactactgcgctctgagaga

SEQ ID NO: 188713 - DNA, 467 bp, Homo sapiens
  Payload ID: 17178
  Gene Symbol: TRAV19
  Gene Name: T cell receptor alpha variable 19
  ENST ID: ENST00000390447
  CDS Start-End: 118-467
cagaagcctcacacagcccagtaactttgctagtacctcttgagtgcaaggtggagaattaagatctggatttgagacggagcacggaacatttcactcaggggaagagctatgaacatgctgactgccagcctgttgagggcagtcatagcctccatctgtgttgtatccagcatggctcagaaggtaactcaagcgcagactgaaatttctgtggtggagaaggaggatgtgaccttggactgtgtgtatgaaacccgtgatactacttattacttattctggtacaagcaaccaccaagtggagaattggttttccttattcgtcggaactcttttgatgagcaaaatgaaataagtggtcggtattcttggaacttccagaaatccaccagttccttcaacttcaccatcacagcctcacaagtcgtggactcagcagtatacttctgtgctctgagtgaggc

SEQ ID NO: 188714 - DNA, 348 bp, Homo sapiens
  Payload ID: 17179
  Gene Symbol: TRAV2
  Gene Name: T cell receptor alpha variable 2
  ENST ID: ENST00000390424
  CDS Start-End: 11-348
cattttggccatggctttgcagagcactctgggggcggtgtggctagggcttctcctcaactctctctggaaggttgcagaaagcaaggaccaagtgtttcagccttccacagtggcatcttcagagggagctgtggtggaaatcttctgtaatcactctgtgtccaatgcttacaacttcttctggtaccttcacttcccgggatgtgcaccaagactccttgttaaaggctcaaagccttctcagcagggacgatacaacatgacctatgaacggttctcttcatcgctgctcatcctccaggtgcgggaggcagatgctgctgtttactactgtgctgtggagga

SEQ ID NO: 188715 - DNA, 406 bp, Homo sapiens
  Payload ID: 17180
  Gene Symbol: TRAV20
  Gene Name: T cell receptor alpha variable 20
  ENST ID: ENST00000390448
  CDS Start-End: 70-406
acagaagtggcgcctctgagaaaagaaggttggaattatcgtaatttgtttctaggctgagataccagcatggagaaaatgttggagtgtgcattcatagtcttgtggcttcagcttggctggttgagtggagaagaccaggtgacgcagagtcccgaggccctgagactccaggagggagagagtagcagtctcaactgcagttacacagtcagcggtttaagagggctgttctggtataggcaagatcctgggaaaggccctgaattcctcttcaccctgtattcagctggggaagaaaaggagaaagaaaggctaaaagccacattaacaaagaaggaaagctttctgcacatcacagcccctaaacctgaagactcagccacttatctctgtgctgtgcagg

SEQ ID NO: 188716 - DNA, 343 bp, Homo sapiens
  Payload ID: 17181
  Gene Symbol: TRAV21
  Gene Name: T cell receptor alpha variable 21
  ENST ID: ENST00000390449
  CDS Start-End: 8-343
agaaggaatggagaccctcttgggcctgcttatcctttggctgcagctgcaatgggtgagcagcaaacaggaggtgacgcagattcctgcagctctgagtgtcccagaaggagaaaacttggttctcaactgcagtttcactgatagcgctatttacaacctccagtggtttaggcaggaccctgggaaaggtctcacatctctgttgcttattcagtcaagtcagagagagcaaacaagtggaagacttaatgcctcgctggataaatcatcaggacgtagtactttatacattgcagcttctcagcctggtgactcagccacctacctctgtgctgtgagg

SEQ ID NO: 188717 - DNA, 464 bp, Homo sapiens
  Payload ID: 17182
  Gene Symbol: TRAV22
  Gene Name: T cell receptor alpha variable 22
  ENST ID: ENST00000390450
  CDS Start-End: 134-464
ggctttgtcgggtggagctgattggttgcaggagcagcaacagttccagagccaagtcatgacaccgacctccccaaggtttagttaaatatatcttatggtgaaaatgcccggagcaagaaggcaaagcatcatgaagaggatattgggagctctgctggggctcttgagtgcccaggtttgctgtgtgagaggaatacaagtggagcagagtcctccagacctgattctccaggagggagccaattccacgctgcggtgcaatttttctgactctgtgaacaatttgcagtggtttcatcaaaacccttggggacagctcatcaacctgttttacattccctcagggacaaaacagaatggaagattaagcgccacgactgtcgctacggaacgctacagcttattgtacatttcctcttcccagaccacagactcaggcgtttatttctgtgctgtggagc

SEQ ID NO: 188718 - DNA, 409 bp, Homo sapiens
  Payload ID: 17183
  Gene Symbol: TRAV23DV6
  Gene Name: T cell receptor alpha variable 23/delta variable 6
  ENST ID: ENST00000390451
  CDS Start-End: 46-409
ctggaagaccacctgggctgtcattgagctctggtgccaggaggaatggacaagatcttaggagcatcatttttagttctgtggcttcaactatgctgggtgagtggccaacagaaggagaaaagtgaccagcagcaggtgaaacaaagtcctcaatctttgatagtccagaaaggagggatttcaattataaactgtgcttatgagaacactgcgtttgactactttccatggtaccaacaattccctgggaaaggccctgcattattgatagccatacgtccagatgtgagtgaaaagaaagaaggaagattcacaatctccttcaataaaagtgccaagcagttctcatcgcatatcatggattcccagcctggagactcagccacctacttctgtgcagcaagca

SEQ ID NO: 188719 - DNA, 343 bp, Homo sapiens
  Payload ID: 17184
  Gene Symbol: TRAV24
  Gene Name: T cell receptor alpha variable 24
  ENST ID: ENST00000390453
  CDS Start-End: 1-343
atggagaagaatcctttggcagccccattactaatcctctggtttcatcttgactgcgtgagcagcatactgaacgtggaacaaagtcctcagtcactgcatgttcaggagggagacagcaccaatttcacctgcagcttcccttccagcaatttttatgccttacactggtacagatgggaaactgcaaaaagccccgaggccttgtttgtaatgactttaaatggggatgaaaagaagaaaggacgaataagtgccactcttaataccaaggagggttacagctatttgtacatcaaaggatcccagcctgaagactcagccacatacctctgtgccttta

SEQ ID NO: 188720 - DNA, 403 bp, Homo sapiens
  Payload ID: 17185
  Gene Symbol: TRAV25
  Gene Name: T cell receptor alpha variable 25
  ENST ID: ENST00000390454
  CDS Start-End: 77-403
actatttctattgatctggaagaagcttgtaccaggcaacccatttaggagaagttggatgaagagggagagggagatgctactcatcacatcaatgttggtcttatggatgcaattgtcacaggtgaatggacaacaggtaatgcaaattcctcagtaccagcatgtacaagaaggagaggacttcaccacgtactgcaattcctcaactactttaagcaatatacagtggtataagcaaaggcctggtggacatcccgtttttttgatacagttagtgaagagtggagaagtgaagaagcagaaaagactgacatttcagtttggagaagcaaaaaagaacagctccctgcacatcacagccacccagactacagatgtaggaacctacttctgtgcaggg

SEQ ID NO: 188721 - DNA, 537 bp, Homo sapiens
  Payload ID: 17186
  Gene Symbol: TRAV26-1
  Gene Name: T cell receptor alpha variable 26-1
  ENST ID: ENST00000390455
  CDS Start-End: 210-537
aggaacatgactaaacctggggaggaagacatagaaaagcaactgctctatcattggctgacaagatcctgacaacaacacaatgagagctgcactccttgcaagtctttactagtagctgttgcttctgttctctggaaattctttaaacctagaatcagacacaaaaactgaactctgggtccacaatcctcatttgtccttgaagtatgaggctggtggcaagagtaactgtgtttctgacctttggaactataattgatgctaagaccacccagcccacctccatggattgcgctgaaggaagagctgcaaacctgccttgtaatcactctaccatcagtggaaatgagtatgtgtattggtatcgacagattcactcccaggggccacagtatatcattcatggtctaaaaaacaatgaaaccaatgaaatggcctctctgatcatcacagaagacagaaagtccagcaccttgatcctgccccacgctacgctgagagacactgctgtgtactattgcatcgtcagagtcg

SEQ ID NO: 188722 - DNA, 327 bp, Homo sapiens
  Payload ID: 17187
  Gene Symbol: TRAV26-2
  Gene Name: T cell receptor alpha variable 26-2
  ENST ID: ENST00000390460
  CDS Start-End: 1-327
atgaagttggtgacaagcattactgtactcctatctttgggtattatgggtgatgctaagaccacacagccaaattcaatggagagtaacgaagaagagcctgttcacttgccttgtaaccactccacaatcagtggaactgattacatacattggtatcgacagcttccctcccagggtccagagtacgtgattcatggtcttacaagcaatgtgaacaacagaatggcctctctggcaatcgctgaagacagaaagtccagtaccttgatcctgcaccgtgctaccttgagagatgctgctgtgtactactgcatcctgagagac

SEQ ID NO: 188723 - DNA, 425 bp, Homo sapiens
  Payload ID: 17188
  Gene Symbol: TRAV27
  Gene Name: T cell receptor alpha variable 27
  ENST ID: ENST00000390457
  CDS Start-End: 98-425
aagcactcttctagcccagagaagtctgttccaggacgggctctttcaggagcagctaaagtcaggggccatgtccaccatgtgatagaaagacaagatggtcctgaaattctccgtgtccattctttggattcagttggcatgggtgagcacccagctgctggagcagagccctcagtttctaagcatccaagagggagaaaatctcactgtgtactgcaactcctcaagtgttttttccagcttacaatggtacagacaggagcctggggaaggtcctgtcctcctggtgacagtagttacgggtggagaagtgaagaagctgaagagactaacctttcagtttggtgatgcaagaaaggacagttctctccacatcactgcagcccagactggtgatacaggcctctacctctgtgcaggag

SEQ ID NO: 188724 - DNA, 469 bp, Homo sapiens
  Payload ID: 17189
  Gene Symbol: TRAV29DV5
  Gene Name: T cell receptor alpha variable 29/delta variable 5 (gene/pseudogene)
  ENST ID: ENST00000390458
  CDS Start-End: 112-469
atatgtaaaatgaagggtctgtggaaggacatgaataaagcacaggaggttgaagtcagatttgcagctttctaggcaggagataagacaatctgcatcttcacaggagggatggccatgctcctgggggcatcagtgctgattctgtggcttcagccagactgggtaaacagtcaacagaagaatgatgaccagcaagttaagcaaaattcaccatccctgagcgtccaggaaggaagaatttctattctgaactgtgactatactaacagcatgtttgattatttcctatggtacaaaaaataccctgctgaaggtcctacattcctgatatctataagttccattaaggataaaaatgaagatggaagattcactgttttcttaaacaaaagtgccaagcacctctctctgcacattgtgccctcccagcctggagactctgcagtgtacttctgtgcagcaagcg

SEQ ID NO: 188725 - DNA, 519 bp, Homo sapiens
  Payload ID: 17190
  Gene Symbol: TRAV3
  Gene Name: T cell receptor alpha variable 3 (gene/pseudogene)
  ENST ID: ENST00000390425
  CDS Start-End: 177-519
ccggtgtcgggaagcaccagtgccctgaggaagggccatttccaaaagccctgtgctgacacagggttgctggttcctcttcaagagcccactctctggggtggggccatatctccagcagaggtgggctggaaaggacccccccaatcccgcccgccgtgagcttagctggagccatggcctctgcacccatctcgatgcttgcgatgctcttcacattgagtgggctgagagctcagtcagtggctcagccggaagatcaggtcaacgttgctgaagggaatcctctgactgtgaaatgcacctattcagtctctggaaacccttatcttttttggtatgttcaataccccaaccgaggcctccagttccttctgaaatacatcacaggggataacctggttaaaggcagctatggctttgaagctgaatttaacaagagccaaacctccttccacctgaagaaaccatctgcccttgtgagcgactccgctttgtacttctgtgctgtgagagaca

SEQ ID NO: 188726 - DNA, 337 bp, Homo sapiens
  Payload ID: 17191
  Gene Symbol: TRAV30
  Gene Name: T cell receptor alpha variable 30
  ENST ID: ENST00000557168
  CDS Start-End: 1-337
atggagactctcctgaaagtgctttcaggcaccttgttgtggcagttgacctgggtgagaagccaacaaccagtgcagagtcctcaagccgtgatcctccgagaaggggaagatgctgtcatcaactgcagttcctccaaggctttatattctgtacactggtacaggcagaagcatggtgaagcacccgtcttcctgatgatattactgaagggtggagaacagaagggtcatgacaaaatatctgcttcatttaatgaaaaaaagcagcaaagctccctgtaccttacggcctcccagctcagttactcaggaacctacttctgcggcacagaga

SEQ ID NO: 188727 - DNA, 349 bp, Homo sapiens
  Payload ID: 17192
  Gene Symbol: TRAV34
  Gene Name: T cell receptor alpha variable 34
  ENST ID: ENST00000390461
  CDS Start-End: 13-349
aatagctaagggatggagactgttctgcaagtactcctagggatattggggttccaagcagcctgggtcagtagccaagaactggagcagagtcctcagtccttgatcgtccaagagggaaagaatctcaccataaactgcacgtcatcaaagacgttatatggcttatactggtataagcaaaagtatggtgaaggtcttatcttcttgatgatgctacagaaaggtggggaagagaaaagtcatgaaaagataactgccaagttggatgagaaaaagcagcaaagttccctgcatatcacagcctcccagcccagccatgcaggcatctacctctgtggagcagaca

SEQ ID NO: 188728 - DNA, 356 bp, Homo sapiens
  Payload ID: 17193
  Gene Symbol: TRAV36DV7
  Gene Name: T cell receptor alpha variable 36/delta variable 7
  ENST ID: ENST00000390463
  CDS Start-End: 17-356
acttgataactgaaggatgatgaagtgtccacaggctttactagctatcttttggcttctactgagctgggtgagcagtgaagacaaggtggtacaaagccctctatctctggttgtccacgagggagacaccgtaactctcaattgcagttatgaagtgactaactttcgaagcctactatggtacaagcaggaaaagaaagctcccacatttctatttatgctaacttcaagtggaattgaaaagaagtcaggaagactaagtagcatattagataagaaagaacttttcagcatcctgaacatcacagccacccagaccggagactcggccatctacctctgtgctgtggagg

SEQ ID NO: 188729 - DNA, 353 bp, Homo sapiens
  Payload ID: 17194
  Gene Symbol: TRAV38-1
  Gene Name: T cell receptor alpha variable 38-1
  ENST ID: ENST00000390464
  CDS Start-End: 4-353
agcatgacacgagttagcttgctgtgggcagtcgtggtctccacctgtcttgaatccggcatggcccagacagtcactcagtctcaaccagagatgtctgtgcaggaggcagagactgtgaccctgagttgcacatatgacaccagtgagaataattattatttgttctggtacaagcagcctcccagcaggcagatgattctcgttattcgccaagaagcttataagcaacagaatgcaacggagaatcgtttctctgtgaacttccagaaagcagccaaatccttcagtctcaagatctcagactcacagctgggggacactgcgatgtatttctgtgctttcatgaagca

SEQ ID NO: 188730 - DNA, 395 bp, Homo sapiens
  Payload ID: 17195
  Gene Symbol: TRAV38-2DV8
  Gene Name: T cell receptor alpha variable 38-2/delta variable 8
  ENST ID: ENST00000390465
  CDS Start-End: 47-395
agatcagaagaggaggcttctcaccctgcagcagggacctgtgagcatggcatgccctggcttcctgtgggcacttgtgatctccacctgtcttgaatttagcatggctcagacagtcactcagtctcaaccagagatgtctgtgcaggaggcagagaccgtgaccctgagctgcacatatgacaccagtgagagtgattattatttattctggtacaagcagcctcccagcaggcagatgattctcgttattcgccaagaagcttataagcaacagaatgcaacagagaatcgtttctctgtgaacttccagaaagcagccaaatccttcagtctcaagatctcagactcacagctgggggatgccgcgatgtatttctgtgcttataggagcg

SEQ ID NO: 188731 - DNA, 331 bp, Homo sapiens
  Payload ID: 17196
  Gene Symbol: TRAV39
  Gene Name: T cell receptor alpha variable 39
  ENST ID: ENST00000390466
  CDS Start-End: 1-331
atgaagaagctactagcaatgattctgtggcttcaactagaccggttaagtggagagctgaaagtggaacaaaaccctctgttcctgagcatgcaggagggaaaaaactataccatctactgcaattattcaaccacttcagacagactgtattggtacaggcaggatcctgggaaaagtctggaatctctgtttgtgttgctatcaaatggagcagtgaagcaggagggacgattaatggcctcacttgataccaaagcccgtctcagcaccctccacatcacagctgccgtgcatgacctctctgccacctacttctgtgccgtggaca

SEQ ID NO: 188732 - DNA, 395 bp, Homo sapiens
  Payload ID: 17197
  Gene Symbol: TRAV4
  Gene Name: T cell receptor alpha variable 4
  ENST ID: ENST00000390426
  CDS Start-End: 68-395
ctgggctcattgcagctcagacacagcaaaagagcctagaacctgggtcctagtttgcacctagaatatgaggcaagtggcgagagtgatcgtgttcctgaccctgagtactttgagccttgctaagaccacccagcccatctccatggactcatatgaaggacaagaagtgaacataacctgtagccacaacaacattgctacaaatgattatatcacgtggtaccaacagtttcccagccaaggaccacgatttattattcaaggatacaagacaaaagttacaaacgaagtggcctccctgtttatccctgccgacagaaagtccagcactctgagcctgccccgggtttccctgagcgacactgctgtgtactactgcctcgtgggtgaca

SEQ ID NO: 188733 - DNA, 317 bp, Homo sapiens
  Payload ID: 17198
  Gene Symbol: TRAV40
  Gene Name: T cell receptor alpha variable 40
  ENST ID: ENST00000390467
  CDS Start-End: 1-317
atgaactcctctctggactttctaattctgatcttaatgtttggaggaaccagcagcaattcagtcaagcagacgggccaaataaccgtctcggagggagcatctgtgactatgaactgcacatacacatccacggggtaccctacccttttctggtatgtggaataccccagcaaacctctgcagcttcttcagagagagacaatggaaaacagcaaaaacttcggaggcggaaatattaaagacaaaaactcccccattgtgaaatattcagtccaggtatcagactcagccgtgtactactgtcttctgggaga

SEQ ID NO: 188734 - DNA, 336 bp, Homo sapiens
  Payload ID: 17199
  Gene Symbol: TRAV41
  Gene Name: T cell receptor alpha variable 41
  ENST ID: ENST00000390468
  CDS Start-End: 1-336
atggtgaagatccggcaatttttgttggctattttgtggcttcagctaagctgtgtaagtgccgccaaaaatgaagtggagcagagtcctcagaacctgactgcccaggaaggagaatttatcacaatcaactgcagttactcggtaggaataagtgccttacactggctgcaacagcatccaggaggaggcattgtttccttgtttatgctgagctcagggaagaagaagcatggaagattaattgccacaataaacatacaggaaaagcacagctccctgcacatcacagcctcccatcccagagactctgccgtctacatctgtgctgtcaga

SEQ ID NO: 188735 - DNA, 352 bp, Homo sapiens
  Payload ID: 17200
  Gene Symbol: TRAV5
  Gene Name: T cell receptor alpha variable 5
  ENST ID: ENST00000390427
  CDS Start-End: 13-352
gtggggagaacaatgaagacatttgctggattttcgttcctgtttttgtggctgcagctggactgtatgagtagaggagaggatgtggagcagagtcttttcctgagtgtccgagagggagacagctccgttataaactgcacttacacagacagctcctccacctacttatactggtataagcaagaacctggagcaggtctccagttgctgacgtatattttttcaaatatggacatgaaacaagaccaaagactcactgttctattgaataaaaaggataaacatctgtctctgcgcattgcagacacccagactggggactcagctatctacttctgtgcagagagta

SEQ ID NO: 188736 - DNA, 404 bp, Homo sapiens
  Payload ID: 17201
  Gene Symbol: TRAV6
  Gene Name: T cell receptor alpha variable 6
  ENST ID: ENST00000390428
  CDS Start-End: 8-404
aaacagaatggctttttggctgagaagcctgggtctacatttcaggccacatttggggagacgaatggagtcattcctgggaggtgttttgctgattttgtggcttcaagtggactgggtgaagagccaaaagatagaacagaattccgaggctctgaacattcaggagggtaaaacggccaccctgacctgcaactatacaaactattctccagcatacttacagtggtaccgacaagatccaggaagaggccctgttttcttgctactcatacgtgaaaatgagaaagaaaaaaggaaagaaagactgaaggtcacctttgataccacccttaaacagagtttgtttcatatcacagcctcccagcctgcagactcagctacctacctctgtgctctagaca

SEQ ID NO: 188737 - DNA, 337 bp, Homo sapiens
  Payload ID: 17202
  Gene Symbol: TRAV7
  Gene Name: T cell receptor alpha variable 7
  ENST ID: ENST00000390429
  CDS Start-End: 1-337
atggagaagatgcggagacctgtcctaattatattttgtctatgtcttggctgggcaaatggagaaaaccaggtggagcacagccctcattttctgggaccccagcagggagacgttgcctccatgagctgcacgtactctgtcagtcgttttaacaatttgcagtggtacaggcaaaatacagggatgggtcccaaacacctattatccatgtattcagctggatatgagaagcagaaaggaagactaaatgctacattactgaagaatggaagcagcttgtacattacagccgtgcagcctgaagattcagccacctatttctgtgctgtagatg

SEQ ID NO: 188738 - DNA, 473 bp, Homo sapiens
  Payload ID: 17203
  Gene Symbol: TRAV8-1
  Gene Name: T cell receptor alpha variable 8-1
  ENST ID: ENST00000390430
  CDS Start-End: 133-473
ccaaaacaagagacttgcctagcccaaccttcctcacgctcgctattctcaagacctgggttccagccactttcctactggccccgaggagaatttccaaagagacgcctgcagtgtttccacagctcagccatgctcctgttgctcataccagtgctggggatgatttttgccctgagagatgccagagcccagtctgtgagccagcataaccaccacgtaattctctctgaagcagcctcactggagttgggatgcaactattcctatggtggaactgttaatctcttctggtatgtccagtaccctggtcaacaccttcagcttctcctcaagtacttttcaggggatccactggttaaaggcatcaagggctttgaggctgaatttataaagagtaaattctcctttaatctgaggaaaccctctgtgcagtggagtgacacagctgagtacttctgtgccgtgaatgc

SEQ ID NO: 188739 - DNA, 566 bp, Homo sapiens
  Payload ID: 17204
  Gene Symbol: TRAV8-2
  Gene Name: T cell receptor alpha variable 8-2
  ENST ID: ENST00000390434
  CDS Start-End: 226-566
ggctgatgtagctcactgatgtctgtgtagatagggagctgtgacgagagcaagaggtcagaacacatccagactccttaagagaaagcctttctgttttggaaacttttcaaagccagggacttgtccagcccaacctccccattgctcctagctcccgaggctcaggacccctggcttctgtcctccctgctcagggtcctgcagcgttgcctctgctcagccatgctcctgctgctcgtcccagtgctcgaggtgatttttaccctgggaggaaccagagcccagtcggtgacccagcttgacagccacgtctctgtctctgaaggaaccccggtgctgctgaggtgcaactactcatcttcttattcaccgtctctcttctggtatgtgcaacaccccaacaaaggactccagcttctcctgaagtacacatcagcggccaccctggttaaaggcatcaacggttttgaggctgaatttaagaagagtgaaacctccttccacctgacgaaaccctcagcccatatgagcgacgcggctgagtacttctgtgttgtgagtga

SEQ ID NO: 188740 - DNA, 341 bp, Homo sapiens
  Payload ID: 17205
  Gene Symbol: TRAV8-3
  Gene Name: T cell receptor alpha variable 8-3
  ENST ID: ENST00000390435
  CDS Start-End: 1-341
atgctcctggagcttatcccactgctggggatacattttgtcctgagaactgccagagcccagtcagtgacccagcctgacatccacatcactgtctctgaaggagcctcactggagttgagatgtaactattcctatggggcaacaccttatctcttctggtatgtccagtcccccggccaaggcctccagctgctcctgaagtacttttcaggagacactctggttcaaggcattaaaggctttgaggctgaatttaagaggagtcaatcttccttcaatctgaggaaaccctctgtgcattggagtgatgctgctgagtacttctgtgctgtgggtgc

SEQ ID NO: 188741 - DNA, 469 bp, Homo sapiens
  Payload ID: 17206
  Gene Symbol: TRAV8-4
  Gene Name: T cell receptor alpha variable 8-4
  ENST ID: ENST00000390438
  CDS Start-End: 129-469
ttttgaaacccttcaaaggcagagacttgtccagcctaacctgcctgctgctcctagctcctgaggctcagggcccttggcttctgtccgctctgctcagggccctccagcgtggccactgctcagccatgctcctgctgctcgtcccagtgctcgaggtgatttttaccctgggaggaaccagagcccagtcggtgacccagcttggcagccacgtctctgtctctgaaggagccctggttctgctgaggtgcaactactcatcgtctgttccaccatatctcttctggtatgtgcaataccccaaccaaggactccagcttctcctgaagtacacatcagcggccaccctggttaaaggcatcaacggttttgaggctgaatttaagaagagtgaaacctccttccacctgacgaaaccctcagcccatatgagcgacgcggctgagtacttctgtgctgtgagtga

SEQ ID NO: 188742 - DNA, 561 bp, Homo sapiens
  Payload ID: 17207
  Gene Symbol: TRAV8-6
  Gene Name: T cell receptor alpha variable 8-6
  ENST ID: ENST00000390443
  CDS Start-End: 221-561
gtagctcgttgatgtctgtgtggatagggagctgtgacgagagcaagaggtcagaacacatccaggctccttaagggaaagcctctttctgtttctgaaacttttcaaagccagggacttgtccaatccaacctcctcacagttcctagctcctgaggctcagcgcccttggcttctgtccgcccagcttaaggtcctgcagcattgccactgctcagccatgctcctgctgctcgtcccagcgttccaggtgatttttaccctgggaggaaccagagcccagtctgtgacccagcttgacagccaagtccctgtctttgaagaagcccctgtggagctgaggtgcaactactcatcgtctgtttcagtgtatctcttctggtatgtgcaataccccaaccaaggactccagcttctcctgaagtatttatcaggatccaccctggttgaaagcatcaacggttttgaggctgaatttaacaagagtcaaacttccttccacttgaggaaaccctcagtccatataagcgacacggctgagtacttctgtgctgtgagtga

SEQ ID NO: 188743 - DNA, 341 bp, Homo sapiens
  Payload ID: 17208
  Gene Symbol: TRAV8-7
  Gene Name: T cell receptor alpha variable 8-7 (non-functional)
  ENST ID: ENST00000390456
  CDS Start-End: 1-341
atgctcttagtggtcattctgctgcttggaatgttcttcacactgagtaaaacccagtcggtgacccagcttgatggccacatcactgtctctgaagaagcccctctggaactgaagtgcaactattcctatagtggagttccttctctcttctggtatgtccaatactctagccaaagcctccagcttctcctcaaagacctaacaaaggccacccaggttaaaggcatcagaggttttgaggctgaatttaagaagagcgaaacctccttctacctgaggaaaccatcaacccatgtgagtgatgctgctgagtacttctgtgctgtgggtgacaggag

SEQ ID NO: 188744 - DNA, 338 bp, Homo sapiens
  Payload ID: 17209
  Gene Symbol: TRAV9-1
  Gene Name: T cell receptor alpha variable 9-1
  ENST ID: ENST00000390431
  CDS Start-End: 1-338
atgaattcttctccaggaccagcgattgcactattcttaatgtttgggggaatcaatggagattcagtggtccagacagaaggccaagtgctcccctctgaaggggattccctgattgtgaactgctcctatgaaaccacacagtacccttcccttttttggtatgtccaatatcctggagaaggtccacagctccacctgaaagccatgaaggccaatgacaagggaaggaacaaaggttttgaagccatgtaccgtaaagaaaccacttctttccacttggagaaagactcagttcaagagtcagactccgctgtgtacttctgtgctctgagtga

SEQ ID NO: 188745 - DNA, 394 bp, Homo sapiens
  Payload ID: 17210
  Gene Symbol: TRAV9-2
  Gene Name: T cell receptor alpha variable 9-2
  ENST ID: ENST00000390441
  CDS Start-End: 57-394
cactgtgatttcttcatgttaaggatcaagaccattatttgggtaacacactaaagatgaactattctccaggcttagtatctctgatactcttactgcttggaagaacccgtggagattcagtgacccagatggaagggccagtgactctctcagaagaggccttcctgactataaactgcacgtacacagccacaggatacccttcccttttctggtatgtccaatatcctggagaaggtctacagctcctcctgaaagccacgaaggctgatgacaagggaagcaacaaaggttttgaagccacataccgtaaagaaaccacttctttccacttggagaaaggctcagttcaagtgtcagactcagcggtgtacttctgtgctctgagtga

SEQ ID NO: 188746 - DNA, 1919 bp, Homo sapiens
  Payload ID: 17211
  Gene Symbol: TRAT1
  Gene Name: T cell receptor associated transmembrane adaptor 1
  Uniprot ID: Q6PIZ9
  ENST ID: ENST00000295756
  CDS Start-End: 231-791
aagacaactccttcaccacatttcctgtttgtaactgaaacaaagtacacacaaaagattttaagaaacagaagagaaaagaatccgaggcacagataaagataagttttactgtcatgctgcttttaacataacagagcaacatcacctaggaaaaaagtttgtaggaggatttttaatccatatatttgtcttatggctagataaagatttctctgaaaaaaagaagcatgtcaggaatctctgggtgcccctttttcctctggggacttctagcattgttgggcttggctttggttatatcactgatcttcaatatttcccactatgtggaaaagcaacgacaagataaaatgtacagctactccagtgaccacaccagggttgatgagtattatattgaagacacaccaatttatggtaacttagatgatatgatttcagaaccaatggatgaaaattgctatgaacaaatgaaagcccgaccagagaaatctgtaaataagatgcaggaagccaccccatctgcacaggcaaccaatgaaacacagatgtgctacgcctcacttgatcacagcgttaaggggaagcgtagaaagcccaggaaacagaatactcatttctcagacaaggatggagatgagcaactacatgcaatagatgccagcgtttctaagaccaccttagtagacagtttctccccagaaagccaggcagtagaggaaaacattcatgatgatcccatcagactgtttggattgatccgtgctaagagagaacctataaactagctggaccatgatctagttcaatgatttggctcctattgaagatggcttctaagaaaacaagatgcacagaggacacagaaggacttggcagcagggtgatgacctgatcatttgttgatgggatggtggcttacctcttattcacagcttacacttatgcatgccaaatgtaaggccatgaaaatcagtatttcaaataacttaaaaaatgctttactactaaaatgtaaaaaattaatgtgctcacctcggcagcacatatactaaaaattaataagacccagcttgaaaattgagcctgataacaagattacaaattcacaatacctaatacttagggaaatataaaaatttaagcatgaatgtgttctggaacacgttagaagaaaaataaaagccaatgagtttttttttaattctcctttctcaccaatgggcaatagcccataattgaaataaatttctgattgaaaggtataggaaacattaaaatgcattactaagagaagtaatataattttcttacaaagtatttttcccaaagatagctttactatttcaaaaattgtcaaattaatgcatgctccttacaacaaacaaatatcaaaaagagtttaggaattctactagccagagatagtcacttggagaaactttctatatatccttctaaatatttttctgggcatgcttatgtatgtacatcagttgtttctttttattttgaaccaaaaatgtggtttcttttgtacacattacttaaactttctttccagtcaacaatatattgtggatttattttcactgttatatttaactatatataaatacgcatatattgtaattttaatgtctgcttagcaccccactgataaccaaatcacagtttatttaaataattttaatgacttttcaaaaacaatttattgatgcaaaaagcaaggttgagatgacaatgtttctttcaataattaaaaaatactgcttcactgtcttctctctgtttcatcagaaacacatactataatacttgtctctgtccttaagtgtgatacacgctatttttctgattgttaagactttccttattactggttctaatttgattataatatgccaaggtatggt

SEQ ID NO: 188747 - DNA, 1596 bp, Homo sapiens
  Payload ID: 17211
  Gene Symbol: TRAT1
  Gene Name: T cell receptor associated transmembrane adaptor 1
  ENST ID: ENST00000426646
  CDS Start-End: 157-606
agaaaagaatccgaggcacagataaagataagttttactgtcatgctgcttttaacataacagagcaacatcacctaggaaaaaagtttgtaggaggatttttaatccatatatttgtcttatggctagataaagatttctctgaaaaaaagaagcatgtcagataaaatgtacagctactccagtgaccacaccagggttgatgagtattatattgaagacacaccaatttatggtaacttagatgatatgatttcagaaccaatggatgaaaattgctatgaacaaatgaaagcccgaccagagaaatctgtaaataagatgcaggaagccaccccatctgcacaggcaaccaatgaaacacagatgtgctacgcctcacttgatcacagcgttaaggggaagcgtagaaagcccaggaaacagaatactcatttctcagacaaggatggagatgagcaactacatgcaatagatgccagcgtttctaagaccaccttagtagacagtttctccccagaaagccaggcagtagaggaaaacattcatgatgatcccatcagactgtttggattgatccgtgctaagagagaacctataaactagctggaccatgatctagttcaatgatttggctcctattgaagatggcttctaagaaaacaagatgcacagaggacacagaaggacttggcagcagggtgatgacctgatcatttgttgatgggatggtggcttacctcttattcacagcttacacttatgcatgccaaatgtaaggccatgaaaatcagtatttcaaataacttaaaaaatgctttactactaaaatgtaaaaaattaatgtgctcacctcggcagcacatatactaaaaattaataagacccagcttgaaaattgagcctgataacaagattacaaattcacaatacctaatacttagggaaatataaaaatttaagcatgaatgtgttctggaacacgttagaagaaaaataaaagccaatgagtttttttttaattctcctttctcaccaatgggcaatagcccataattgaaataaatttctgattgaaaggtataggaaacattaaaatgcattactaagagaagtaatataattttcttacaaagtatttttcccaaagatagctttactatttcaaaaattgtcaaattaatgcatgctccttacaacaaacaaatatcaaaaagagtttaggaattctactagccagagatagtcacttggagaaactttctatatatccttctaaatatttttctgggcatgcttatgtatgtacatcagttgtttctttttattttgaaccaaaaatgtggtttcttttgtacacattacttaaactttctttccagtcaacaatatattgtggatttattttcactgttatatttaactatatataaatacgcatatattgtaattttaatgtctgcttagcaccccactgataaccaaatcacagtttatttaaataattttaatgacttttcaaaaacaatttattgatgcaaaaagcaaggttgagatgacaatgtttctttcaataattaaaaaatactgcttcac

SEQ ID NO: 188748 - DNA, 1054 bp, Homo sapiens
  Payload ID: 17212
  Gene Symbol: TRBC1
  Gene Name: T cell receptor beta constant 1
  ENST ID: ENST00000613903
  CDS Start-End: 11-940
caaagcagccatgggaatcaggctcctctgtcgtgtggccttttgtttcctggctgtaggcctcgtagatgtgaaagtaacccagagctcgagatatctagtcaaaaggacgggagagaaagtttttctggaatgtgtccaggatatggaccatgaaaatatgttctggtatcgacaagacccaggtctggggctacggctgatctatttctcatatgatgttaaaatgaaagaaaaaggagatattcctgaggggtacagtgtctctagagagaagaaggagcgcttctccctgattctggagtccgccagcaccaaccagacatctatgtacctctgtgccagcagtttatgcacagcgcagcacagctgcatcctctgttcggggaccaggttaaccgttgtagaggacctgaacaaggtgttcccacccgaggtcgctgtgtttgagccatcagaagcagagatctcccacacccaaaaggccacactggtgtgcctggccacaggcttcttccccgaccacgtggagctgagctggtgggtgaatgggaaggaggtgcacagtggggtcagcacggacccgcagcccctcaaggagcagcccgccctcaatgactccagatactgcctgagcagccgcctgagggtctcggccaccttctggcagaacccccgcaaccacttccgctgtcaagtccagttctacgggctctcggagaatgacgagtggacccaggatagggccaaacccgtcacccagatcgtcagcgccgaggcctggggtagagcagactgtggctttacctcggtgtcctaccagcaaggggtcctgtctgccaccatcctctatgagatcctgctagggaaggccaccctgtatgctgtgctggtcagcgcccttgtgttgatggccatggtcaagagaaaggatttctgaaggcagccctggaagtggagttaggagcttctaacccgtcatggtttcaatacacattcttcttttgccagcgcttctgaagagctgctctcacctctctgcatcccaatagat

SEQ ID NO: 188749 - DNA, 1054 bp, Homo sapiens
  Payload ID: 17212
  Gene Symbol: TRBC1
  Gene Name: T cell receptor beta constant 1
  ENST ID: ENST00000610416
  CDS Start-End: 11-940
caaagcagccatgggaatcaggctcctctgtcgtgtggccttttgtttcctggctgtaggcctcgtagatgtgaaagtaacccagagctcgagatatctagtcaaaaggacgggagagaaagtttttctggaatgtgtccaggatatggaccatgaaaatatgttctggtatcgacaagacccaggtctggggctacggctgatctatttctcatatgatgttaaaatgaaagaaaaaggagatattcctgaggggtacagtgtctctagagagaagaaggagcgcttctccctgattctggagtccgccagcaccaaccagacatctatgtacctctgtgccagcagtttatgcacagcgcagcacagccgcatcctctgttcggggaccaggttaaccgttgtagaggacctgaacaaggtgttcccacccgaggtcgctgtgtttgagccatcagaagcagagatctcccacacccaaaaggccacactggtgtgcctggccacaggcttcttccctgaccacgtggagctgagctggtgggtgaatgggaaggaggtgcacagtggggtcagcacggacccgcagcccctcaaggagcagcccgccctcaatgactccagatactgcctgagcagccgcctgagggtctcggccaccttctggcagaacccccgcaaccacttccgctgtcaagtccagttctacgggctctcggagaatgacgagtggacccaggatagggccaaacccgtcacccagatcgtcagcgccgaggcctggggtagagcagactgtggctttacctcggtgtcctaccagcaaggggtcctgtctgccaccatcctctatgagatcctgctagggaaggccaccctgtatgctgtgctggtcagcgcccttgtgttgatggccatggtcaagagaaaggatttctgaaggcagccctggaagtggagttaggagcttctaacccgtcatggtttcaatacacattcttcttttgccagcgcttctgaagagctgctctcacctctctgcatcccaatagat

SEQ ID NO: 188750 - DNA, 933 bp, Homo sapiens
  Payload ID: 17212
  Gene Symbol: TRBC1
  Gene Name: T cell receptor beta constant 1
  ENST ID: ENST00000613594
  CDS Start-End: 1-933
atgactatcaggctcctctgctacatgggcttttattttctgggggcaggcctcatggaagctgacatctaccagaccccaagataccttgttatagggacaggaaagaagatcactctggaatgttctcaaaccatgggccatgacaaaatgtactggtatcaacaagatccaggaatggaactacacctgatctatttctcatatgatgttaaaatgaaagaaaaaggagatattcctgaggggtacagtgtctctagagagaagaaggagcgcttctccctgattctggagtccgccagcaccaaccagacatctatgtacctctgtgccagcagtatgcacagcgcagctgcatcctctctgcactttgggaacgggaccaggctcactgtgacagaggacctgaacaaggtgttcccacccgaggtcgctgtgtttgagccatcagaagcagagatctcccacacccaaaaggccacactggtgtgcctggccacaggcttcttccccgaccacgtggagctgagctggtgggtgaatgggaaggaggtgcacagtggggtcagcacggacccgcagcccctcaaggagcagcccgccctcaatgactccagatactgcctgagcagccgcctgagggtctcggccaccttctggcagaacccccgcaaccacttccgctgtcaagtccagttctacgggctctcggagaatgacgagtggacccaggatagggccaaacccgtcacccagatcgtcagcgccgaggcctggggtagagcagactgtggctttacctcggtgtcctaccagcaaggggtcctgtctgccaccatcctctatgagatcctgctagggaaggccaccctgtatgctgtgctggtcagcgcccttgtgttgatggccatggtcaagagaaaggatttctga

SEQ ID NO: 188751 - DNA, 760 bp, Homo sapiens
  Payload ID: 17212
  Gene Symbol: TRBC1
  Gene Name: T cell receptor beta constant 1
  ENST ID: ENST00000633705
  CDS Start-End: 1-533
aggacctgaacaaggtgttcccacccgaggtcgctgtgtttgagccatcagaagcagagatctcccacacccaaaaggccacactggtgtgcctggccacaggcttcttccctgaccacgtggagctgagctggtgggtgaatgggaaggaggtgcacagtggggtcagcacggacccgcagcccctcaaggagcagcccgccctcaatgactccagatactgcctgagcagccgcctgagggtctcggccaccttctggcagaacccccgcaaccacttccgctgtcaagtccagttctacgggctctcggagaatgacgagtggacccaggatagggccaaacccgtcacccagatcgtcagcgccgaggcctggggtagagcagactgtggctttacctcggtgtcctaccagcaaggggtcctgtctgccaccatcctctatgagatcctgctagggaaggccaccctgtatgctgtgctggtcagcgcccttgtgttgatggccatggtcaagagaaaggatttctgaaggcagccctggaagtggagttaggagcttctaacccgtcatggtttcaatacacattcttcttttgccagcgcttctgaagagctgctctcacctctctgcatcccaatagatatccccctatgtgcatgcacacctgcacactcacggctgaaatctccctaacccagggggaccttagcatgcctaagtgactaaaccaataaaaatgttctggtctggcctga

SEQ ID NO: 188752 - DNA, 760 bp, Homo sapiens
  Payload ID: 17212
  Gene Symbol: TRBC1
  Gene Name: T cell receptor beta constant 1
  ENST ID: ENST00000632136
  CDS Start-End: 1-533
aggacctgaacaaggtgttcccacccgaggtcgctgtgtttgagccatcagaagcagagatctcccacacccaaaaggccacactggtgtgcctggccacaggcttcttccccgaccacgtggagctgagctggtgggtgaatgggaaggaggtgcacagtggggtcagcacggacccgcagcccctcaaggagcagcccgccctcaatgactccagatactgcctgagcagccgcctgagggtctcggccaccttctggcagaacccccgcaaccacttccgctgtcaagtccagttctacgggctctcggagaatgacgagtggacccaggatagggccaaacccgtcacccagatcgtcagcgccgaggcctggggtagagcagactgtggctttacctcggtgtcctaccagcaaggggtcctgtctgccaccatcctctatgagatcctgctagggaaggccaccctgtatgctgtgctggtcagcgcccttgtgttgatggccatggtcaagagaaaggatttctgaaggcagccctggaagtggagttaggagcttctaacccgtcatggtttcaatacacattcttcttttgccagcgcttctgaagagctgctctcacctctctgcatcccaatagatatccccctatgtgcatgcacacctgcacactcacggctgaaatctccctaacccagggggaccttagcatgcctaagtgactaaaccaataaaaatgttctggtctggcctga

SEQ ID NO: 188753 - DNA, 758 bp, Homo sapiens
  Payload ID: 17213
  Gene Symbol: TRBC2
  Gene Name: T cell receptor beta constant 2
  ENST ID: ENST00000466254
  CDS Start-End: 1-539
aggacctgaaaaacgtgttcccacccaaggtcgctgtgtttgagccatcagaagcagagatctcccacacccaaaaggccacactggtgtgcctggccacaggcttctaccccgaccacgtggagctgagctggtgggtgaatgggaaggaggtgcacagtggggtcagcacagacccgcagcccctcaaggagcagcccgccctcaatgactccagatactgcctgagcagccgcctgagggtctcggccaccttctggcagaacccccgcaaccacttccgctgtcaagtccagttctacgggctctcggagaatgacgagtggacccaggatagggccaaacctgtcacccagatcgtcagcgccgaggcctggggtagagcagactgtggcttcacctccgagtcttaccagcaaggggtcctgtctgccaccatcctctatgagatcttgctagggaaggccaccttgtatgccgtgctggtcagtgccctcgtgctgatggccatggtcaagagaaaggattccagaggctagctccaaaaccatcccaggtcattcttcatcctcacccaggattctcctgtacctgctcccaatctgtgttcctaaaagtgattctcactctgcttctcatctcctacttacatgaatacttctctcttttttctgtttccctgaagattgagctcccaacccccaagtacgaaataggctaaaccaataaaaaattgtgtgttgggcctggttgcattt

SEQ ID NO: 188754 - DNA, 933 bp, Homo sapiens
  Payload ID: 17213
  Gene Symbol: TRBC2
  Gene Name: T cell receptor beta constant 2
  ENST ID: ENST00000613720
  CDS Start-End: 1-933
atgggcaccaggctcctctgctgggtggtcctgggtttcctagggacagatcacacaggtgctggagtctcccagtcccctaggtacaaagtcgcaaagagaggacaggatgtagctctcaggtgtgatccaatttcgggtcatgtatcccttttttggtaccaacaggccctggggcaggggccagagtttctgacttatttccagaatgaagctcaactagacaaatcggggctgcccagtgatcgcttctttgcagaaaggcctgagggatccgtctccactctgaagatccagcgcacacagcaggaggactccgccgtgtatctctgtgccagtagtatagacacagacgagcagtacgtcgggccgggcaccaggctcacggtcacagaggacctgaaaaacgtgttcccacccgaggtcgctgtgtttgagccatcagaagcagagatctcccacacccaaaaggccacactggtgtgcctggccacaggcttctaccccgaccacgtggagctgagctggtgggtgaatgggaaggaggtgcacagtggggtcagcacagacccgcagcccctcaaggagcagcccgccctcaatgactccagatactgcctgagcagccgcctgagggtctcggccaccttctggcagaacccccgcaaccacttccgctgtcaagtccagttctacgggctctcggagaatgacgagtggacccaggatagggccaaacctgtcacccagatcgtcagcgccgaggcctggggtagagcagactgtggcttcacctccgagtcttaccagcaaggggtcctgtctgccaccatcctctatgagatcttgctagggaaggccaccttgtatgccgtgctggtcagtgccctcgtgctgatggccatggtcaagagaaaggattccagaggctag

SEQ ID NO: 188755 - DNA, 936 bp, Homo sapiens
  Payload ID: 17213
  Gene Symbol: TRBC2
  Gene Name: T cell receptor beta constant 2
  ENST ID: ENST00000621068
  CDS Start-End: 1-936
atgggcccccagctccttggctatgtggtcctttgccttctaggagcaggccccctggaagcccaagtgacccagaacccaagatacctcatcacagtgactggaaagaagttaacagtgacttgttctcagaatatgaaccatgagtatatgtcctggtatcgacaagacccagggctgggcttaaggcagatctactattcaatgaatgttgaggtgactgataagggagatgttcctgaagggtacaaagtctctcgaaaagagaagaggaatttccccctgatcctggagtcgcccagccccaaccagacctctctgtacttctgtgccagcagtttatccacagtgttgcacagccagtacttcgggccaggcacgcggctcctggtgctcgaggacctgaaaaacgtgttcccacccgaggtcgctgtgtttgagccatcagaagcagagatctcccacacccaaaaggccacactggtgtgcctggccacaggcttctaccccgaccacgtggagctgagctggtgggtgaatgggaaggaggtgcacagtggggtcagcacagacccgcagcccctcaaggagcagcccgccctcaatgactccagatactgcctgagcagccgcctgagggtctcggccaccttctggcagaacccccgcaaccacttccgctgtcaagtccagttctacgggctctcggagaatgacgagtggacccaggatagggccaaacctgtcacccagatcgtcagcgccgaggcctggggtagagcagactgtggcttcacctccgagtcttaccagcaaggggtcctgtctgccaccatcctctatgagatcttgctagggaaggccaccttgtatgccgtgctggtcagtgccctcgtgctgatggccatggtcaagagaaaggattccagaggctag

SEQ ID NO: 188756 - DNA, 755 bp, Homo sapiens
  Payload ID: 17213
  Gene Symbol: TRBC2
  Gene Name: T cell receptor beta constant 2
  ENST ID: ENST00000622053
  CDS Start-End: 1-539
aggacctgaaaaacgtgttcccacccgaggtcgctgtgtttgagccatcagaagcagagatctcccacacccaaaaggccacactggtgtgcctggccacaggcttctaccccgaccacgtggagctgagctggtgggtgaatgggaaggaggtgcacagtggggtcagcacagacccgcagcccctcaaggagcagcccgccctcaatgactccagatactgcctgagcagccgcctgagggtctcggccaccttctggcagaacccccgcaaccacttccgctgtcaagtccagttctacgggctctcggagaatgacgagtggacccaggatagggccaaacctgtcacccagatcgtcagcgccgaggcctggggtagagcagactgtggcttcacctccgagtcttaccagcaaggggtcctgtctgccaccatcctctatgagatcttgctagggaaggccaccttgtatgccgtgctggtcagtgccctcgtgctgatggccatggtcaagagaaaggattccagaggctagctccaaaaccatcccaggtcattcttcatcctcacccaggattctcctgtacctgctcccaatctgtgttcctaaaagtgattctcactctgcttctcatctcctacttacatgaatacttctctcttttttctgtttccctgaagattgagctcccaacccccaagtacgaaataggctaaaccaataaaaaattgtgtgttgggcctggttgca

SEQ ID NO: 188757 - DNA, 945 bp, Homo sapiens
  Payload ID: 17213
  Gene Symbol: TRBC2
  Gene Name: T cell receptor beta constant 2
  ENST ID: ENST00000620987
  CDS Start-End: 1-945
atgactatcaggctcctctgctacatgggcttttattttctgggggcaggcctcatggaagctgacatctaccagaccccaagataccttgttatagggacaggaaagaagatcactctggaatgttctcaaaccatgggccatgacaaaatgtactggtatcaacaagatccaggaatggaactacacctcatccactattcctatggagttaattccacagagaagggagatctttcctctgagtcaacagtctccagaataaggacggagcattttcccctgaccctggagtctgccaggccctcacatacctctcagtacctctgtgccagcagtgaatggctcgggggccgtgaccaagagacccagtacttcgggccaggcacgcggctcctggtgctcgaggacctgaaaaacgtgttcccacccgaggtcgctgtgtttgagccatcagaagcagagatctcccacacccaaaaggccacactggtgtgcctggccacaggcttctaccccgaccacgtggagctgagctggtgggtgaatgggaaggaggtgcacagtggggtcagcacagacccgcagcccctcaaggagcagcccgccctcaatgactccagatactgcctgagcagccgcctgagggtctcggccaccttctggcagaacccccgcaaccacttccgctgtcaagtccagttctacgggctctcggagaatgacgagtggacccaggatagggccaaacctgtcacccagatcgtcagcgccgaggcctggggtagagcagactgtggcttcacctccgagtcttaccagcaaggggtcctgtctgccaccatcctctatgagatcttgctagggaaggccaccttgtatgccgtgctggtcagtgccctcgtgctgatggccatggtcaagagaaaggattccagaggctag

SEQ ID NO: 188758 - DNA, 948 bp, Homo sapiens
  Payload ID: 17213
  Gene Symbol: TRBC2
  Gene Name: T cell receptor beta constant 2
  ENST ID: ENST00000614992
  CDS Start-End: 1-948
atgactatcaggctcctctgctacatgggcttttattttctgggggcaggcctcatggaagctgacatctaccagaccccaagataccttgttatagggacaggaaagaagatcactctggaatgttctcaaaccatgggccatgacaaaatgtactggtatcaacaagatccaggaatggaactacacctcatccactattcctatggagttaattccacagagaagggagatctttcctctgagtcaacagtctccagaataaggacggagcattttcccctgaccctggagtctgccaggccctcacatacctctcagtacctctgtgccagcagtgaagcacaatatcgaagtccctcctacaatgagcagttcttcgggccagggacacggctcaccgtgctagaggacctgaaaaacgtgttcccacccgaggtcgctgtgtttgagccatcagaagcagagatctcccacacccaaaaggccacactggtgtgcctggccacaggcttctaccccgaccacgtggagctgagctggtgggtgaatgggaaggaggtgcacagtggggtcagcacagacccgcagcccctcaaggagcagcccgccctcaatgactccagatactgcctgagcagccgcctgagggtctcggccaccttctggcagaacccccgcaaccacttccgctgtcaagtccagttctacgggctctcggagaatgacgagtggacccaggatagggccaaacctgtcacccagatcgtcagcgccgaggcctggggtagagcagactgtggcttcacctccgagtcttaccagcaaggggtcctgtctgccaccatcctctatgagatcttgctagggaaggccaccttgtatgccgtgctggtcagtgccctcgtgctgatggccatggtcaagagaaaggattccagaggctag

SEQ ID NO: 188759 - DNA, 942 bp, Homo sapiens
  Payload ID: 17213
  Gene Symbol: TRBC2
  Gene Name: T cell receptor beta constant 2
  ENST ID: ENST00000612153
  CDS Start-End: 1-942
atgactatcaggctcctctgctacatgggcttttattttctgggggcaggcctcatggaagctgacatctaccagaccccaagataccttgttatagggacaggaaagaagatcactctggaatgttctcaaaccatgggccatgacaaaatgtactggtatcaacaagatccaggaatggaactacacctcatccactattcctatggagttaattccacagagaagggagatctttcctctgagtcaacagtctccagaataaggacggagcattttcccctgaccctggagtctgccaggccctcacatacctctcagtacctctgtgccagcagttccccgctgtgctctggggccaacgtcctgactttcggggccggcagcaggctgaccgtgctggaggacctgaaaaacgtgttcccacccgaggtcgctgtgtttgagccatcagaagcagagatctcccacacccaaaaggccacactggtgtgcctggccacaggcttctaccccgaccacgtggagctgagctggtgggtgaatgggaaggaggtgcacagtggggtcagcacagacccgcagcccctcaaggagcagcccgccctcaatgactccagatactgcctgagcagccgcctgagggtctcggccaccttctggcagaacccccgcaaccacttccgctgtcaagtccagttctacgggctctcggagaatgacgagtggacccaggatagggccaaacctgtcacccagatcgtcagcgccgaggcctggggtagagcagactgtggcttcacctccgagtcttaccagcaaggggtcctgtctgccaccatcctctatgagatcttgctagggaaggccaccttgtatgccgtgctggtcagtgccctcgtgctgatggccatggtcaagagaaaggattccagaggctag

SEQ ID NO: 188760 - DNA, 12 bp, Homo sapiens
  Payload ID: 17214
  Gene Symbol: TRBD1
  Gene Name: T cell receptor beta diversity 1
  ENST ID: ENST00000632684
  CDS Start-End: 1-12
gggacagggggc

SEQ ID NO: 188761 - DNA, 12 bp, Homo sapiens
  Payload ID: 17214
  Gene Symbol: TRBD1
  Gene Name: T cell receptor beta diversity 1
  ENST ID: ENST00000631435
  CDS Start-End: 1-12
gggacagggggc

SEQ ID NO: 188762 - DNA, 48 bp, Homo sapiens
  Payload ID: 17215
  Gene Symbol: TRBJ1-1
  Gene Name: T cell receptor beta joining 1-1
  ENST ID: ENST00000634213
  CDS Start-End: 1-48
tgaacactgaagctttctttggacaaggcaccagactcacagttgtag

SEQ ID NO: 188763 - DNA, 48 bp, Homo sapiens; identical to SEQ ID NO: 188762
  Payload ID: 17215
  Gene Symbol: TRBJ1-1
  Gene Name: T cell receptor beta joining 1-1
  ENST ID: ENST00000632951
  CDS Start-End: 1-48

SEQ ID NO: 188764 - DNA, 48 bp, Homo sapiens
  Payload ID: 17216
  Gene Symbol: TRBJ1-2
  Gene Name: T cell receptor beta joining 1-2
  ENST ID: ENST00000631745
  CDS Start-End: 1-48
ctaactatggctacaccttcggttcggggaccaggttaaccgttgtag

SEQ ID NO: 188765 - DNA, 48 bp, Homo sapiens; identical to SEQ ID NO: 188764
  Payload ID: 17216
  Gene Symbol: TRBJ1-2
  Gene Name: T cell receptor beta joining 1-2
  ENST ID: ENST00000633553
  CDS Start-End: 1-48

SEQ ID NO: 188766 - DNA, 50 bp, Homo sapiens
  Payload ID: 17217
  Gene Symbol: TRBJ1-3
  Gene Name: T cell receptor beta joining 1-3
  ENST ID: ENST00000633780
  CDS Start-End: 1-50
ctctggaaacaccatatattttggagagggaagttggctcactgttgtag

SEQ ID NO: 188767 - DNA, 50 bp, Homo sapiens; identical to SEQ ID NO: 188766
  Payload ID: 17217
  Gene Symbol: TRBJ1-3
  Gene Name: T cell receptor beta joining 1-3
  ENST ID: ENST00000633936
  CDS Start-End: 1-50

SEQ ID NO: 188768 - DNA, 51 bp, Homo sapiens
  Payload ID: 17218
  Gene Symbol: TRBJ1-4
  Gene Name: T cell receptor beta joining 1-4
  ENST ID: ENST00000633891
  CDS Start-End: 1-51
caactaatgaaaaactgttttttggcagtggaacccagctctctgtcttgg

SEQ ID NO: 188769 - DNA, 51 bp, Homo sapiens; identical to SEQ ID NO: 188768
  Payload ID: 17218
  Gene Symbol: TRBJ1-4
  Gene Name: T cell receptor beta joining 1-4
  ENST ID: ENST00000632041
  CDS Start-End: 1-51

SEQ ID NO: 188770 - DNA, 50 bp, Homo sapiens
  Payload ID: 17219
  Gene Symbol: TRBJ1-5
  Gene Name: T cell receptor beta joining 1-5
  ENST ID: ENST00000633507
  CDS Start-End: 1-50
tagcaatcagccccagcattttggtgatgggactcgactctccatcctag

SEQ ID NO: 188771 - DNA, 50 bp, Homo sapiens; identical to SEQ ID NO: 188770
  Payload ID: 17219
  Gene Symbol: TRBJ1-5
  Gene Name: T cell receptor beta joining 1-5
  ENST ID: ENST00000634000
  CDS Start-End: 1-50

SEQ ID NO: 188772 - DNA, 53 bp, Homo sapiens
  Payload ID: 17220
  Gene Symbol: TRBJ1-6
  Gene Name: T cell receptor beta joining 1-6
  ENST ID: ENST00000632228
  CDS Start-End: 1-53
ctcctataattcacccctccactttgggaacgggaccaggctcactgtgacag

SEQ ID NO: 188773 - DNA, 53 bp, Homo sapiens
  Payload ID: 17220
  Gene Symbol: TRBJ1-6
  Gene Name: T cell receptor beta joining 1-6
  ENST ID: ENST00000633713
  CDS Start-End: 1-53
ctcctataattcacccctccactttgggaatgggaccaggctcactgtgacag

SEQ ID NO: 188774 - DNA, 50 bp, Homo sapiens
  Payload ID: 17221
  Gene Symbol: TRBJ2-1
  Gene Name: T cell receptor beta joining 2-1
  ENST ID: ENST00000390412
  CDS Start-End: 1-50
ctcctacaatgagcagttcttcgggccagggacacggctcaccgtgctag

SEQ ID NO: 188775 - DNA, 50 bp, Homo sapiens; identical to SEQ ID NO: 188774
  Payload ID: 17221
  Gene Symbol: TRBJ2-1
  Gene Name: T cell receptor beta joining 2-1
  ENST ID: ENST00000631600
  CDS Start-End: 1-50

SEQ ID NO: 188776 - DNA, 51 bp, Homo sapiens
  Payload ID: 17222
  Gene Symbol: TRBJ2-2
  Gene Name: T cell receptor beta joining 2-2
  ENST ID: ENST00000390413
  CDS Start-End: 1-51
cgaacaccggggagctgttttttggagaaggctctaggctgaccgtactgg

SEQ ID NO: 188777 - DNA, 51 bp, Homo sapiens; identical to SEQ ID NO: 188776
  Payload ID: 17222
  Gene Symbol: TRBJ2-2
  Gene Name: T cell receptor beta joining 2-2
  ENST ID: ENST00000633188
  CDS Start-End: 1-51

SEQ ID NO: 188778 - DNA, 46 bp, Homo sapiens
  Payload ID: 17223
  Gene Symbol: TRBJ2-2P
  Gene Name: T cell receptor beta joining 2-2P (non-functional)
  ENST ID: ENST00000390414
  CDS Start-End: 1-46
ctgagaggcgctgctgggcgtctgggcggaggactcctggttctgg

SEQ ID NO: 188779 - DNA, 46 bp, Homo sapiens; identical to SEQ ID NO: 188778
  Payload ID: 17223
  Gene Symbol: TRBJ2-2P
  Gene Name: T cell receptor beta joining 2-2P (non-functional)
  ENST ID: ENST00000633209
  CDS Start-End: 1-46

SEQ ID NO: 188780 - DNA, 49 bp, Homo sapiens
  Payload ID: 17224
  Gene Symbol: TRBJ2-3
  Gene Name: T cell receptor beta joining 2-3
  ENST ID: ENST00000390415
  CDS Start-End: 1-49
agcacagatacgcagtattttggcccaggcacccggctgacagtgctcg

SEQ ID NO: 188781 - DNA, 49 bp, Homo sapiens; identical to SEQ ID NO: 188780
  Payload ID: 17224
  Gene Symbol: TRBJ2-3
  Gene Name: T cell receptor beta joining 2-3
  ENST ID: ENST00000631840
  CDS Start-End: 1-49

SEQ ID NO: 188782 - DNA, 50 bp, Homo sapiens
  Payload ID: 17225
  Gene Symbol: TRBJ2-4
  Gene Name: T cell receptor beta joining 2-4
  ENST ID: ENST00000390416
  CDS Start-End: 1-50
agccaaaaacattcagtacttcggcgccgggacccggctctcagtgctgg

SEQ ID NO: 188783 - DNA, 50 bp, Homo sapiens; identical to SEQ ID NO: 188782
  Payload ID: 17225
  Gene Symbol: TRBJ2-4
  Gene Name: T cell receptor beta joining 2-4
  ENST ID: ENST00000633836
  CDS Start-End: 1-50

SEQ ID NO: 188784 - DNA, 48 bp, Homo sapiens
  Payload ID: 17226
  Gene Symbol: TRBJ2-5
  Gene Name: T cell receptor beta joining 2-5
  ENST ID: ENST00000390417
  CDS Start-End: 1-48
accaagagacccagtacttcgggccaggcacgcggctcctggtgctcg

SEQ ID NO: 188785 - DNA, 48 bp, Homo sapiens; identical to SEQ ID NO: 188784
  Payload ID: 17226
  Gene Symbol: TRBJ2-5
  Gene Name: T cell receptor beta joining 2-5
  ENST ID: ENST00000634149
  CDS Start-End: 1-48

SEQ ID NO: 188786 - DNA, 53 bp, Homo sapiens
  Payload ID: 17227
  Gene Symbol: TRBJ2-6
  Gene Name: T cell receptor beta joining 2-6
  ENST ID: ENST00000390418
  CDS Start-End: 1-53
ctctggggccaacgtcctgactttcggggccggcagcaggctgaccgtgctgg

SEQ ID NO: 188787 - DNA, 53 bp, Homo sapiens; identical to SEQ ID NO: 188786
  Payload ID: 17227
  Gene Symbol: TRBJ2-6
  Gene Name: T cell receptor beta joining 2-6
  ENST ID: ENST00000632996
  CDS Start-End: 1-53

SEQ ID NO: 188788 - DNA, 47 bp, Homo sapiens
  Payload ID: 17228
  Gene Symbol: TRBJ2-7
  Gene Name: T cell receptor beta joining 2-7
  ENST ID: ENST00000390419
  CDS Start-End: 1-47
ctcctacgagcagtacttcgggccgggcaccaggctcacggtcacag

SEQ ID NO: 188789 - DNA, 47 bp, Homo sapiens
  Payload ID: 17228
  Gene Symbol: TRBJ2-7
  Gene Name: T cell receptor beta joining 2-7
  ENST ID: ENST00000633660
  CDS Start-End: 1-47
ctcctacgagcagtacgtcgggccgggcaccaggctcacggtcacag

SEQ ID NO: 188790 - DNA, 412 bp, Homo sapiens
  Payload ID: 17229
  Gene Symbol: TRBV10-1
  Gene Name: T cell receptor beta variable 10-1(gene/pseudogene)
  ENST ID: ENST00000390364
  CDS Start-End: 69-412
actgagagcccaacttcagtctgcccacagcagggctgggagacacaagatcctgccctggagctgaaatgggcacgaggctcttcttctatgtggccctttgtctgctgtgggcaggacacagggatgctgaaatcacccagagcccaagacacaagatcacagagacaggaaggcaggtgaccttggcgtgtcaccagacttggaaccacaacaatatgttctggtatcgacaagacctgggacatgggctgaggctgatccattactcatatggtgttcacgacactaacaaaggagaagtctcagatggctacagtgtctctagatcaaacacagaggacctccccctcactctggagtctgctgcctcctcccagacatctgtatatttctgcgccagcagtgagtc

SEQ ID NO: 188791 - DNA, 412 bp, Homo sapiens; identical to SEQ ID NO: 188790
  Payload ID: 17229
  Gene Symbol: TRBV10-1
  Gene Name: T cell receptor beta variable 10-1(gene/pseudogene)
  ENST ID: ENST00000632248
  CDS Start-End: 69-412

SEQ ID NO: 188792 - DNA, 395 bp, Homo sapiens
  Payload ID: 17230
  Gene Symbol: TRBV10-2
  Gene Name: T cell receptor beta variable 10-2
  ENST ID: ENST00000426318
  CDS Start-End: 52-395
aatttgcccacagcagggctgggagacacaagatcctgccctggagctgaaatgggcaccaggctcttcttctatgtggccctttgtctgctgtgggcaggacacagggatgctggaatcacccagagcccaagatacaagatcacagagacaggaaggcaggtgaccttgatgtgtcaccagacttggagccacagctatatgttctggtatcgacaagacctgggacatgggctgaggctgatctattactcagcagctgctgatattacagataaaggagaagtccccgatggctacgttgtctccagatccaagacagagaatttccccctcactctggagtcagctacccgctcccagacatctgtgtatttctgcgccagcagtgagtc

SEQ ID NO: 188793 - DNA, 395 bp, Homo sapiens
  Payload ID: 17230
  Gene Symbol: TRBV10-2
  Gene Name: T cell receptor beta variable 10-2
  ENST ID: ENST00000633575
  CDS Start-End: 52-395
aatttgcccacagcagggctgggagacacaagatcctgccctggagctgaaatgggcaccaggctcttcttctatgtggccctttgtctgctgtgggcaggacacagggatgctggaatcacccagagcccaagatacaagatcacagagacaggaaggcaggtgaccttgatgtgtcaccagacttggagccacagctatatgttctggtatcgacaagacctgggacatgggctgaggctgatctattactcagcagctgctgatattacagataaaggagaagtccccgatggctatgttgtctccagatccaagacagagaatttccccctcactctggagtcagctacccgctcccagacatctgtgtatttctgcgccagcagtgagtc

SEQ ID NO: 188794 - DNA, 368 bp, Homo sapiens
  Payload ID: 17231
  Gene Symbol: TRBV10-3
  Gene Name: T cell receptor beta variable 10-3
  ENST ID: ENST00000611462
  CDS Start-End: 25-368
atgagatcctggcctggacctgaaatgggcacaaggttgttcttctatgtggccctttgtctcctgtggacaggacacatggatgctggaatcacccagagcccaagacacaaggtcacagagacaggaacaccagtgactctgagatgtcaccagactgagaaccaccgctatatgtactggtatcgacaagacccggggcatgggctgaggctgatccattactcatatggtgttaaagatactgacaaaggagaagtctcagatggctatagtgtctctagatcaaagacagaggatttcctcctcactctggagtccgctaccagctcccagacatctgtgtacttctgtgccatcagtgagtc

SEQ ID NO: 188795 - DNA, 344 bp, Homo sapiens
  Payload ID: 17231
  Gene Symbol: TRBV10-3
  Gene Name: T cell receptor beta variable 10-3
  ENST ID: ENST00000631471
  CDS Start-End: 1-344
atgggcacaaggttgttcttctatgtggccctttgtctcctgtggacaggacacatggatgctggaatcacccagagcccaagacacaaggtcacagagacaggaacaccagtgactctgagatgtcatcagactgagaaccaccgctatatgtactggtatcgacaagacccggggcatgggctgaggctgatccattactcatatggtgttaaagatactgacaaaggagaagtctcagatggctatagtgtctctagatcaaagacagaggatttcctcctcactctggagtccgctaccagctcccagacatctgtgtacttctgtgccatcagtgagtc

SEQ ID NO: 188796 - DNA, 364 bp, Homo sapiens
  Payload ID: 17232
  Gene Symbol: TRBV11-1
  Gene Name: T cell receptor beta variable 11-1
  ENST ID: ENST00000390367
  CDS Start-End: 18-364
cctgccctgaccctgccatgagcaccaggcttctctgctggatggccctctgtctcctgggggcagaactctcagaagctgaagttgcccagtcccccagatataagattacagagaaaagccaggctgtggctttttggtgtgatcctatttctggccatgctaccctttactggtaccggcagatcctgggacagggcccggagcttctggttcaatttcaggatgagagtgtagtagatgattcacagttgcctaaggatcgattttctgcagagaggctcaaaggagtagactccactctcaagatccagcctgcagagcttggggactcggccatgtatctctgtgccagcagcttagc

SEQ ID NO: 188797 - DNA, 364 bp, Homo sapiens; identical to SEQ ID NO: 188796
  Payload ID: 17232
  Gene Symbol: TRBV11-1
  Gene Name: T cell receptor beta variable 11-1
  ENST ID: ENST00000634176
  CDS Start-End: 18-364

SEQ ID NO: 188798 - DNA, 392 bp, Homo sapiens
  Payload ID: 17233
  Gene Symbol: TRBV11-3
  Gene Name: T cell receptor beta variable 11-3
  ENST ID: ENST00000611787
  CDS Start-End: 46-392
agtgaccctgatctggcaaagcttccatcctgccctgaccctgccatgggtaccaggctcctctgctgggtggccttctgtctcctggtggaagaactcatagaagctggagtggttcagtctcccagatataagattatagagaaaaaacagcctgtggctttttggtgcaatcctatttctggccacaataccctttactggtacctgcagaacttgggacagggcccggagcttctgattcgatatgagaatgaggaagcagtagacgattcacagttgcctaaggatcgattttctgcagagaggctcaaaggagtagactccactctcaagatccagcctgcagagcttggggactcggccgtgtatctctgtgccagcagcttaga

SEQ ID NO: 188799 - DNA, 392 bp, Homo sapiens; identical to SEQ ID NO: 188798
  Payload ID: 17233
  Gene Symbol: TRBV11-3
  Gene Name: T cell receptor beta variable 11-3
  ENST ID: ENST00000634111
  CDS Start-End: 46-392

SEQ ID NO: 188800 - DNA, 409 bp, Homo sapiens
  Payload ID: 17234
  Gene Symbol: TRBV12-3
  Gene Name: T cell receptor beta variable 12-3
  ENST ID: ENST00000620569
  CDS Start-End: 63-409
ttctttgctcatgctcacagagggcctggtctagaatattccacatctgctctcactctgccatggactcctggaccttctgctgtgtgtccctttgcatcctggtagcgaagcatacagatgctggagttatccagtcaccccgccatgaggtgacagagatgggacaagaagtgactctgagatgtaaaccaatttcaggccacaactcccttttctggtacagacagaccatgatgcggggactggagttgctcatttactttaacaacaacgttccgatagatgattcagggatgcccgaggatcgattctcagctaagatgcctaatgcatcattctccactctgaagatccagccctcagaacccagggactcagctgtgtacttctgtgccagcagtttagc

SEQ ID NO: 188801 - DNA, 409 bp, Homo sapiens; identical to SEQ ID NO: 188800
  Payload ID: 17234
  Gene Symbol: TRBV12-3
  Gene Name: T cell receptor beta variable 12-3
  ENST ID: ENST00000633292
  CDS Start-End: 63-409

SEQ ID NO: 188802 - DNA, 406 bp, Homo sapiens
  Payload ID: 17235
  Gene Symbol: TRBV12-4
  Gene Name: T cell receptor beta variable 12-4
  ENST ID: ENST00000617347
  CDS Start-End: 60-406
tttgctcatgttcacagagggcctggtctggaatattccacatctgctctcactctgccatgggctcctggaccctctgctgtgtgtccctttgcatcctggtagcaaagcacacagatgctggagttatccagtcaccccggcacgaggtgacagagatgggacaagaagtgactctgagatgtaaaccaatttcaggacacgactaccttttctggtacagacagaccatgatgcggggactggagttgctcatttactttaacaacaacgttccgatagatgattcagggatgcccgaggatcgattctcagctaagatgcctaatgcatcattctccactctgaagatccagccctcagaacccagggactcagctgtgtacttctgtgccagcagtttagc

SEQ ID NO: 188803 - DNA, 406 bp, Homo sapiens
  Payload ID: 17235
  Gene Symbol: TRBV12-4
  Gene Name: T cell receptor beta variable 12-4
  ENST ID: ENST00000631824
  CDS Start-End: 60-406
tttgctcatgttcacagagggcctggtctggaatattccacatctgctctcactctgccatggactcctggaccctctgctgtgtgtccctttgcatcctggtagcaaagcacacagatgctggagttatccagtcaccccggcacgaggtgacagagatgggacaagaagtgactctgagatgtaaaccaatttcaggacacgactaccttttctggtacagacagaccatgatgcggggactggagttgctcatttactttaacaacaacgttccgatagatgattcagggatgcccgaggatcgattctcagctaagatgcctaatgcatcattctccactctgaagatccagccctcagaacccagggactcagctgtgtacttctgtgccagcagtttagc

SEQ ID NO: 188804 - DNA, 411 bp, Homo sapiens
  Payload ID: 17236
  Gene Symbol: TRBV12-5
  Gene Name: T cell receptor beta variable 12-5
  ENST ID: ENST00000621184
  CDS Start-End: 65-411
agctcctgtattcgtgcccacaagggcctcatctaggtgaaggctccacctgccccaccctgccatggccaccaggctcctctgctgtgtggttctttgtctcctgggagaagagcttatagatgctagagtcacccagacaccaaggcacaaggtgacagagatgggacaagaagtaacaatgagatgtcagccaattttaggccacaatactgttttctggtacagacagaccatgatgcaaggactggagttgctggcttacttccgcaaccgggctcctctagatgattcggggatgccgaaggatcgattctcagcagagatgcctgatgcaactttagccactctgaagatccagccctcagaacccagggactcagctgtgtatttttgtgctagtggtttggt

SEQ ID NO: 188805 - DNA, 411 bp, Homo sapiens
  Payload ID: 17236
  Gene Symbol: TRBV12-5
  Gene Name: T cell receptor beta variable 12-5
  ENST ID: ENST00000632829
  CDS Start-End: 65-411
agctcctgtattcgtgcccacaagggcctcatctaggtgaaggctccacctgccccaccctgccatggccaccaggctcctctgctgtgtggttctttgtctcctgggagaagagcttatagatgctagagtcacccagacaccaagggacaaggtgacagagatgggacaagaagtaacaatgagatgtcagccaattttaggccacaatactgttttctggtacagacagaccatgatgcaaggactggagttgctggcttacttccgcaaccgggctcctctagatgattcggggatgccgaaggatcgattctcagcagagatgcctgatgcaactttagccactctgaagatccagccctcagaacccagggactcagctgtgtatttttgtgctagtggtttggt

SEQ ID NO: 188806 - DNA, 374 bp, Homo sapiens
  Payload ID: 17237
  Gene Symbol: TRBV13
  Gene Name: T cell receptor beta variable 13
  ENST ID: ENST00000614171
  CDS Start-End: 1-374
atgcttagtcctgacctgcctgactctgcctggaacaccaggctcctctgccgtgtcatgctttgtctcctgggagcaggttcagtggctgctggagtcatccagtccccaagacatctgatcaaagaaaagagggaaacagccactctgaaatgctatcctatccctagacacgacactgtctactggtaccagcagggtccaggtcaggacccccagttcctcatttcgttttatgaaaagatgcagagcgataaaggaagcatccctgatcgattctcagctcaacagttcagtgactatcattctgaactgaacatgagctccttggagctgggggactcagccctgtacttctgtgccagcagcttagg

SEQ ID NO: 188807 - DNA, 374 bp, Homo sapiens; identical to SEQ ID NO: 188806
  Payload ID: 17237
  Gene Symbol: TRBV13
  Gene Name: T cell receptor beta variable 13
  ENST ID: ENST00000633796
  CDS Start-End: 1-374

SEQ ID NO: 188808 - DNA, 406 bp, Homo sapiens
  Payload ID: 17238
  Gene Symbol: TRBV14
  Gene Name: T cell receptor beta variable 14
  ENST ID: ENST00000617639
  CDS Start-End: 60-406
cctttttctcatgcttgtaagctccttcatctggaaatgtgatttacctgggtcctgccatggtttccaggcttctcagtttagtgtccctttgtctcctgggagcaaagcacatagaagctggagttactcagttccccagccacagcgtaatagagaagggccagactgtgactctgagatgtgacccaatttctggacatgataatctttattggtatcgacgtgttatgggaaaagaaataaaatttctgttacattttgtgaaagagtctaaacaggatgagtccggtatgcccaacaatcgattcttagctgaaaggactggagggacgtattctactctgaaggtgcagcctgcagaactggaggattctggagtttatttctgtgccagcagccaaga

SEQ ID NO: 188809 - DNA, 406 bp, Homo sapiens; identical to SEQ ID NO: 188808
  Payload ID: 17238
  Gene Symbol: TRBV14
  Gene Name: T cell receptor beta variable 14
  ENST ID: ENST00000632432
  CDS Start-End: 60-406

SEQ ID NO: 188810 - DNA, 421 bp, Homo sapiens
  Payload ID: 17239
  Gene Symbol: TRBV15
  Gene Name: T cell receptor beta variable 15
  ENST ID: ENST00000616518
  CDS Start-End: 78-421
actcccacctctcaacccaggaatcagagcctgagacagacagatgcttcattcctgtatggggtggtattcctgccatgggtcctgggcttctccactggatggccctttgtctccttggaacaggtcatggggatgccatggtcatccagaacccaagataccaggttacccagtttggaaagccagtgaccctgagttgttctcagactttgaaccataacgtcatgtactggtaccagcagaagtcaagtcaggccccaaagctgctgttccactactatgacaaagattttaacaatgaagcagacacccctgataacttccaatccaggaggccgaacacttctttctgctttcttgacatccgctcaccaggcctgggggacgcagccatgtacctgtgtgccaccagcagaga

SEQ ID NO: 188811 - DNA, 421 bp, Homo sapiens; identical to SEQ ID NO: 188810
  Payload ID: 17239
  Gene Symbol: TRBV15
  Gene Name: T cell receptor beta variable 15
  ENST ID: ENST00000631835
  CDS Start-End: 78-421

SEQ ID NO: 188812 - DNA, 347 bp, Homo sapiens
  Payload ID: 17240
  Gene Symbol: TRBV16
  Gene Name: T cell receptor beta variable 16 (gene/pseudogene)
  ENST ID: ENST00000620773
  CDS Start-End: 1-347
atgagcccaatattcacctgcatcacaatcctttgtctgctggctgcaggttctcctggtgaagaagtcgcccagactccaaaacatcttgtcagaggggaaggacagaaagcaaaattatattgtgccccaataaaaggacacagttatgttttttggtaccaacaggtcctgaaaaacgagttcaagttcttgatttccttccagaatgaaaatgtctttgatgaaacaggtatgcccaaggaaagattttcagctaagtgcctcccaaattcaccctgtagccttgagatccaggctacgaagcttgaggattcagcagtgtatttttgtgccagcagccaatc

SEQ ID NO: 188813 - DNA, 347 bp, Homo sapiens; identical to SEQ ID NO: 188812
  Payload ID: 17240
  Gene Symbol: TRBV16
  Gene Name: T cell receptor beta variable 16 (gene/pseudogene)
  ENST ID: ENST00000633244
  CDS Start-End: 1-347

SEQ ID NO: 188814 - DNA, 344 bp, Homo sapiens
  Payload ID: 17241
  Gene Symbol: TRBV17
  Gene Name: T cell receptor beta variable 17 (non-functional)
  ENST ID: ENST00000619103
  CDS Start-End: 1-344
atggatatctggctcctctgctgggtgaccctgtgtctcttggcggcaggacactcggagcctggagtcagccagacccccagacacaaggtcaccaacatgggacaggaggtgattctgaggtgcgatccatcttctggtcacatgtttgttcactggtaccgacagaatctgaggcaagaaatgaagttgctgatttccttccagtaccaaaacattgcagttgattcagggatgcccaaggaacgattcacagctgaaagacctaacggaacgtcttccacactgaagatccatcccgcagagccgagggactcagccgtgtatctctacagtagcggtgg

SEQ ID NO: 188815 - DNA, 344 bp, Homo sapiens
  Payload ID: 17241
  Gene Symbol: TRBV17
  Gene Name: T cell receptor beta variable 17 (non-functional)
  ENST ID: ENST00000631663
  CDS Start-End: 1-344
atggatatctggctcctctgctgggtgaccctgtgtctcttggcggcaggacactcggagcctggagtcagccagacccccagacacaaggtcaccaacatgggacaggaggtgattctgaggtgcgatccatcttctggtcacatgtttgttcactggtaccgacagaatctgaggcaagaaatgaagttgctgatttccttccagtaccaaaacattgcagttgattcagggatgcccaaggaacgattcacagctgaaagacctaacggaacgtcttccacgctgaagatccatcccgcagagccgagggactcagccgtgtatctctacagtagcggtgg

SEQ ID NO: 188816 - DNA, 428 bp, Homo sapiens
  Payload ID: 17242
  Gene Symbol: TRBV18
  Gene Name: T cell receptor beta variable 18
  ENST ID: ENST00000611520
  CDS Start-End: 82-428
agctgtgaggtctggttccccgacgtgctgcagcaagtgcctttgccctgcctgtgggctccctccatggccaactctgctatggacaccagactactctgctgtgcggtcatctgtcttctgggggcaggtctctcaaatgccggcgtcatgcagaacccaagacacctggtcaggaggaggggacaggaggcaagactgagatgcagcccaatgaaaggacacagtcatgtttactggtatcggcagctcccagaggaaggtctgaaattcatggtttatctccagaaagaaaatatcatagatgagtcaggaatgccaaaggaacgattttctgctgaatttcccaaagagggccccagcatcctgaggatccagcaggtagtgcgaggagattcggcagcttatttctgtgccagctcaccacc

SEQ ID NO: 188817 - DNA, 428 bp, Homo sapiens
  Payload ID: 17242
  Gene Symbol: TRBV18
  Gene Name: T cell receptor beta variable 18
  ENST ID: ENST00000631559
  CDS Start-End: 82-428
agctgtgaggtctggttccccgacgtgctgcagcaagtgcctttgccctgcctgtgggctccctccatggccaactctgctatggacaccagagtactctgctgtgcggtcatctgtcttctgggggcaggtctctcaaatgccggcgtcatgcagaacccaagacacctggtcaggaggaggggacaggaggcaagactgagatgcagcccaatgaaaggacacagtcatgtttactggtatcggcagctcccagaggaaggtctgaaattcatggtttatctccagaaagaaaatatcatagatgagtcaggaatgccaaaggaacgattttctgctgaatttcccaaagagggccccagcatcctgaggatccagcaggtagtgcgaggagattcggcagcttatttctgtgccagctcaccacc

SEQ ID NO: 188818 - DNA, 552 bp, Homo sapiens
  Payload ID: 17243
  Gene Symbol: TRBV19
  Gene Name: T cell receptor beta variable 19
  ENST ID: ENST00000390393
  CDS Start-End: 209-552
ggaggtgcgaatgactctgctctctgtcctgtctcctcatctgcaaaattaggaagcctgtcttgattatctccaggaacctcccacctcttcattccagcctctgacaaactctgcacattaggccaggagaagcccccgagccaagtctcttttctcattctcttccaacaagtgcttggagctccaagaaggccccctttgcactatgagcaaccaggtgctctgctgtgtggtcctttgtctcctgggagcaaacaccgtggatggtggaatcactcagtccccaaagtacctgttcagaaaggaaggacagaatgtgaccctgagttgtgaacagaatttgaaccacgatgccatgtactggtaccgacaggacccagggcaagggctgagattgatctactactcacagatagtaaatgactttcagaaaggagatatagctgaagggtacagcgtctctcgggagaagaaggaatcctttcctctcactgtgacatcggcccaaaagaacccgacagctttctatctctgtgccagtagtataga

SEQ ID NO: 188819 - DNA, 552 bp, Homo sapiens
  Payload ID: 17243
  Gene Symbol: TRBV19
  Gene Name: T cell receptor beta variable 19
  ENST ID: ENST00000632638
  CDS Start-End: 209-552
ggaggtgcgaatgactctgctctctgtcctgtctcctcatctgcaaaattaggaagcctgtcttgattatctccaggaacctcccacctcttcattccagcctctgacaaactctgcacattaggccaggagaagcccccgagccaagtctcttttctcattctcttccaacaagtgcttggagctccaagaaggccccctttgcactatgagcaaccaggtgctctgctgtgtggtcctttgtttcctgggagcaaacaccgtggatggtggaatcactcagtccccaaagtacctgttcagaaaggaaggacagaatgtgaccctgagttgtgaacagaatttgaaccacgatgccatgtactggtaccgacaggacccagggcaagggctgagattgatctactactcacagatagtaaatgactttcagaaaggagatatagctgaagggtacagcgtctctcgggagaagaaggaatcctttcctctcactgtgacatcggcccaaaagaacccgacagctttctatctctgtgccagtagtataga

SEQ ID NO: 188820 - DNA, 421 bp, Homo sapiens
  Payload ID: 17244
  Gene Symbol: TRBV2
  Gene Name: T cell receptor beta variable 2
  ENST ID: ENST00000455382
  CDS Start-End: 75-421
aaaatgcccctcctttcctccacaggaccagatgcctgagctaggaaaggcctcattcctgctgtgatcctgccatggatacctggctcgtatgctgggcaatttttagtctcttgaaagcaggactcacagaacctgaagtcacccagactcccagccatcaggtcacacagatgggacaggaagtgatcttgcgctgtgtccccatctctaatcacttatacttctattggtacagacaaatcttggggcagaaagtcgagtttctggtttccttttataataatgaaatctcagagaagtctgaaatattcgatgatcaattctcagttgaaaggcctgatggatcaaatttcactctgaagatccggtccacaaagctggaggactcagccatgtacttctgtgccagcagtgaagc

SEQ ID NO: 188821 - DNA, 421 bp, Homo sapiens
  Payload ID: 17244
  Gene Symbol: TRBV2
  Gene Name: T cell receptor beta variable 2
  ENST ID: ENST00000632828
  CDS Start-End: 75-421
aaaatgcccctcctttcctccacaggaccagatgcctgagctaggaaaggcctcattcctgctgtgatcctgccatggatacctggctcgtatgctgggcaatttttagtctcttgaaagcaggactcacagaacctgaagtcacccagactcccagccatcaggtcacacagatgggacaggaagtgatcttgcactgtgtccccatctctaatcacttatacttctattggtacagacaaatcttggggcagaaagtcgagtttctggtttccttttataataatgaaatctcagagaagtctgaaatattcgatgatcaattctcagttgaaaggcctgatggatcaaatttcactctgaagatccggtccacaaagctggaggactcagccatgtacttctgtgccagcagtgaagc

SEQ ID NO: 188822 - DNA, 416 bp, Homo sapiens
  Payload ID: 17245
  Gene Symbol: TRBV20OR9-2
  Gene Name: T cell receptor beta variable 20/OR9-2 (non-functional)
  ENST ID: ENST00000379435
  CDS Start-End: 27-416
gatcagtcatccctcctcgctggtgaatggagacagtggtcacaactctccccagagaaggtggtgtggggccatcacggaagatgctgctgcttctgctgcttctggggccaggctccgggcttagtgctgtcgtctctcaacatccgagcagggttatctgtaagagtggaacctctgtgaacatcgagtgccgttccctggactttcaggccacaactatgttttggtatcgtcagctccggaaacagagcctcatgctgatggcaacttccaatgagggctccgaggtcacatacgagcaaggcgtcaagaaggacaagtttcccatcaaccatccaaacctgaccttctccgctctgacagtgaccagtgcccatcctgaagacagcagcttctacatctgcagtgctaga

SEQ ID NO: 188823 - DNA, 413 bp, Homo sapiens
  Payload ID: 17246
  Gene Symbol: TRBV20-1
  Gene Name: T cell receptor beta variable 20-1
  ENST ID: ENST00000390394
  CDS Start-End: 79-413
gtcatccctcctcgctggtgaatggaggcagtggtcacaactctccccagagaaggtggtgtgaggccatcacggaagatgctgctgcttctgctgcttctggggccaggctccgggcttggtgctgtcgtctctcaacatccgagcagggttatctgtaagagtggaacctctgtgaagatcgagtgccgttccctggactttcaggccacaactatgttttggtatcgtcagttcccgaaacagagtctcatgctgatggcaacttccaatgagggctccaaggccacatacgagcaaggcgtcgagaaggacaagtttctcatcaaccatgcaagcctgaccttgtccactctgacagtgaccagtgcccatcctgaagacagcagcttctacatctgcagtgctagaga

SEQ ID NO: 188824 - DNA, 413 bp, Homo sapiens
  Payload ID: 17246
  Gene Symbol: TRBV20-1
  Gene Name: T cell receptor beta variable 20-1
  ENST ID: ENST00000633466
  CDS Start-End: 79-413
gtcatccctcctcgctggtgaatggaggcagtggtcacaactctccccagagaaggtggtgtgaggccatcacggaagatgctgctgcttctgctgcttctggggccaggctccgggcttggtgctgtcgtctctcaacatccgagctgggttatctgtaagagtggaacctctgtgaagatcgagtgccgttccctggactttcaggccacaactatgttttggtatcgtcagttcccgaaacagagtctcatgctgatggcaacttccaatgagggctccaaggccacatacgagcaaggcgtcgagaaggacaagtttctcatcaaccatgcaagcctgaccttgtccactctgacagtgaccagtgcccatcctgaagacagcagcttctacatctgcagtgctagaga

SEQ ID NO: 188825 - DNA, 367 bp, Homo sapiens
  Payload ID: 17247
  Gene Symbol: TRBV21OR9-2
  Gene Name: T cell receptor beta variable 21/OR9-2 (pseudogene)
  ENST ID: ENST00000331828
  CDS Start-End: 1-367
acgatttctgtctgagccaaccaggtgcctcagacttctctgctgtgtggccctttctttctggggagcagcctccatggacaccaaggtcacccagagacctagatttctggtcaaagcaaatgaacagaaagcaaagatggactgtgttcctataaaaagacatagttatgtttactggtatcataagacgctggaagaagagctcaagttttttatttactttcagaatgaagaaattattcagaaagcagaaataatcaatgagcgattttcagcccaatgcccccaaaactcaccctgtaccttggagatccagtccacggagtcaggagacacagcacggtatttctgtgccaacagcaaa

SEQ ID NO: 188826 - DNA, 335 bp, Homo sapiens
  Payload ID: 17248
  Gene Symbol: TRBV23OR9-2
  Gene Name: T cell receptor beta variable 23/OR9-2 (non-functional)
  ENST ID: ENST00000390389
  CDS Start-End: 1-335
ccacgggcaccaggcttctcggctgggtagctctttgtctcctggcagcaggctgttttcatgccaaagtcacacagactccaggatatttggtcaaaggaaaaggaaggaaaacaaagatgtattgtacccccaaaaacggacatacttttgtttgttggtatcagcagaatcagaataaagagtttatgtttttgatttcctttcagaatgaacaagttcttcaagaaatggagatgcacaagaagcgattctcatctcaatgccccaagaacccaccctgcagcctggcaatcctgtcctcggaaccgggagacaccgcactgtatctctgt

SEQ ID NO: 188827 - DNA, 347 bp, Homo sapiens
  Payload ID: 17249
  Gene Symbol: TRBV23-1
  Gene Name: T cell receptor beta variable 23-1 (non-functional)
  ENST ID: ENST00000390396
  CDS Start-End: 1-347
atgggcaccaggctcctcggctgtgcagccctgtgtctcctggcagcagactcttttcatgccaaagtcacacagactccaggacatttggtcaaaggaaaaggacagaaaacaaagatggattgtacccccgaaaaaggacatacttttgtttattggtatcaacagaatcagaataaagagtttatgcttttgatttcctttcagaatgaacaagttcttcaagaaacggagatgcacaagaagcgattctcatctcaatgccccaagaacgcaccctgcagcctggcaatcctgtcctcagaaccgggagacacggcactgtatctctgcgccagcagtcaatc

SEQ ID NO: 188828 - DNA, 347 bp, Homo sapiens; identical to SEQ ID NO: 188827
  Payload ID: 17249
  Gene Symbol: TRBV23-1
  Gene Name: T cell receptor beta variable 23-1 (non-functional)
  ENST ID: ENST00000633842
  CDS Start-End: 1-347

SEQ ID NO: 188829 - DNA, 381 bp, Homo sapiens
  Payload ID: 17250
  Gene Symbol: TRBV24-1
  Gene Name: T cell receptor beta variable 24-1
  ENST ID: ENST00000390397
  CDS Start-End: 37-381
agagctggaaacacctccatcctgcctcttcatgccatggcctccctgctcttcttctgtggggccttttatctcctgggaacagggtccatggatgctgatgttacccagaccccaaggaataggatcacaaagacaggaaagaggattatgctggaatgttctcagactaagggtcatgatagaatgtactggtatcgacaagacccaggactgggcctacagttgatctattactcctttgatgtcaaagatataaacaaaggagagatctctgatggatacagtgtctctcgacaggcacaggctaaattctccctgtccctagagtctgccatccccaaccagacagctctttacttctgtgccaccagtgatttg

SEQ ID NO: 188830 - DNA, 381 bp, Homo sapiens
  Payload ID: 17250
  Gene Symbol: TRBV24-1
  Gene Name: T cell receptor beta variable 24-1
  ENST ID: ENST00000633092
  CDS Start-End: 37-381
agagctggaaacacctccatcctgcctcttcatgccatggcctccctgctcttcttctgtggggccttttatctcctgggaacagggtccatggatgctgatgttacccagaccccaaggaataggatcacaaagacaggaaagaggattatgctggaatgttctcagactaagggtcatgatagaatgtactggtatcgacaagacccaggactgggcctacggttgatctattactcctttgatgtcaaagatataaacaaaggagagatctctgatggatacagtgtctctcgacaggcacaggctaaattctccctgtccctagagtctgccatccccaaccagacagctctttacttctgtgccaccagtgatttg

SEQ ID NO: 188831 - DNA, 381 bp, Homo sapiens
  Payload ID: 17251
  Gene Symbol: TRBV25-1
  Gene Name: T cell receptor beta variable 25-1
  ENST ID: ENST00000390398
  CDS Start-End: 38-381
actactgggagacatcctctctagccccaactgtgccatgactatcaggctcctctgctacgtgggcttttattttctgggggcaggcctcatggaagctgacatctaccagaccccaagataccttgttatagggacaggaaagaagatcactctggaatgttctcaaaccatgggccatgacaaaatgtactggtatcaacaagatccaggaatggaactacacctcatccactattcctatggagttaattccacagagaagggagatctttcctctgagtcaacagtctccagaataaggacggagcattttcccctgaccctggagtctgccaggccctcacatacctctcagtacctctgtgccagcagtgaata

SEQ ID NO: 188832 - DNA, 381 bp, Homo sapiens
  Payload ID: 17251
  Gene Symbol: TRBV25-1
  Gene Name: T cell receptor beta variable 25-1
  ENST ID: ENST00000610439
  CDS Start-End: 38-381
actactgggagacatcctctctagccccaactgtgccatgactatcaggctcctctgctacatgggcttttattttctgggggcaggcctcatggaagctgacatctaccagaccccaagataccttgttatagggacaggaaagaagatcactctggaatgttctcaaaccatgggccatgacaaaatgtactggtatcaacaagatccaggaatggaactacacctcatccactattcctatggagttaattccacagagaagggagatctttcctctgagtcaacagtctccagaataaggacggagcattttcccctgaccctggagtctgccaggccctcacatacctctcagtacctctgtgccagcagtgaata

SEQ ID NO: 188833 - DNA, 387 bp, Homo sapiens
  Payload ID: 17252
  Gene Symbol: TRBV27
  Gene Name: T cell receptor beta variable 27
  ENST ID: ENST00000390399
  CDS Start-End: 44-387
acctggagcccccagaactggcagacacctgcctgatgctgccatgggcccccagctccttggctatgtggtcctttgccttctaggagcaggccccctggaagcccaagtgacccagaacccaagatacctcatcacagtgactggaaagaagttaacagtgacttgttctcagaatatgaaccatgagtatatgtcctggtatcgacaagacccagggctgggcttaaggcagatctactattcaatgaatgttgaggtgactgataagggagatgttcctgaagggtacaaagtctctcgaaaagagaagaggaatttccccctgatcctggagtcgcccagccccaaccagacctctctgtacttctgtgccagcagtttatc

SEQ ID NO: 188834 - DNA, 387 bp, Homo sapiens; identical to SEQ ID NO: 188833
  Payload ID: 17252
  Gene Symbol: TRBV27
  Gene Name: T cell receptor beta variable 27
  ENST ID: ENST00000633283
  CDS Start-End: 44-387

SEQ ID NO: 188835 - DNA, 364 bp, Homo sapiens
  Payload ID: 17253
  Gene Symbol: TRBV28
  Gene Name: T cell receptor beta variable 28
  ENST ID: ENST00000390400
  CDS Start-End: 21-364
attctttcttcaaagcagccatgggaatcaggctcctctgtcgtgtggccttttgtttcctggctgtaggcctcgtagatgtgaaagtaacccagagctcgagatatctagtcaaaaggacgggagagaaagtttttctggaatgtgtccaggatatggaccatgaaaatatgttctggtatcgacaagacccaggtctggggctacggctgatctatttctcatatgatgttaaaatgaaagaaaaaggagatattcctgaggggtacagtgtctctagagagaagaaggagcgcttctccctgattctggagtccgccagcaccaaccagacatctatgtacctctgtgccagcagtttatg

SEQ ID NO: 188836 - DNA, 364 bp, Homo sapiens; identical to SEQ ID NO: 188835
  Payload ID: 17253
  Gene Symbol: TRBV28
  Gene Name: T cell receptor beta variable 28
  ENST ID: ENST00000619125
  CDS Start-End: 21-364

SEQ ID NO: 188837 - DNA, 402 bp, Homo sapiens
  Payload ID: 17254
  Gene Symbol: TRBV29-1
  Gene Name: T cell receptor beta variable 29-1
  ENST ID: ENST00000422143
  CDS Start-End: 68-402
gaaggaaagatgaacttgagtttcacttcttagtgccttttctcaggggagaggccatcacttgaagatgctgagtcttctgctccttctcctgggactaggctctgtgttcagtgctgtcatctctcaaaagccaagcagggatatctgtcaacgtggaacctccctgacgatccagtgtcaagtcgatagccaagtcaccatgatgttctggtaccgtcagcaacctggacagagcctgacactgatcgcaactgcaaatcagggctctgaggccacatatgagagtggatttgtcattgacaagtttcccatcagccgcccaaacctaacattctcaactctgactgtgagcaacatgagccctgaagacagcagcatatatctctgcagcgttgaaga

SEQ ID NO: 188838 - DNA, 402 bp, Homo sapiens; identical to SEQ ID NO: 188837
  Payload ID: 17254
  Gene Symbol: TRBV29-1
  Gene Name: T cell receptor beta variable 29-1
  ENST ID: ENST00000634198
  CDS Start-End: 68-402

SEQ ID NO: 188839 - DNA, 447 bp, Homo sapiens
  Payload ID: 17255
  Gene Symbol: TRBV30
  Gene Name: T cell receptor beta variable 30 (gene/pseudogene)
  ENST ID: ENST00000417977
  CDS Start-End: 113-447
ttcctctgctctggcagcagatctcccagagggagcagcctgaccacatcactggcccagaagaggaggcgtctgtcccccagactagctgaaggaaaggctggcttggatgatgctctgctctctccttgcccttctcctgggcactttctttggggtcagatctcagactattcatcaatggccagcgaccctggtgcagcctgtgggcagcccgctctctctggagtgcactgtggagggaacatcaaaccccaacctatactggtaccgacaggctgcaggcaggggcctccagctgctcttctactccgttggtattggccagatcagctctgaggtgccccagaatctctcagcctccagaccccaggaccggcagttcatcctgagttctaagaagctccttctcagtgactctggcttctatctctgtgcctggagtgt

SEQ ID NO: 188840 - DNA, 447 bp, Homo sapiens
  Payload ID: 17255
  Gene Symbol: TRBV30
  Gene Name: T cell receptor beta variable 30 (gene/pseudogene)
  ENST ID: ENST00000631690
  CDS Start-End: 113-447
ttcctctgctctggcagcagatctcccagagggagcagcctgaccacatcactggcccagaagaggaggcgtctgtcccccagactagctgaaggaaaggctggcttggatgatgctctgctctctccttgcccttctcctgggcactttctttggggtcagatctcagactattcatcaatggccagcgaccctggtgcagcctgtgggcagcccgctctctctggagtgcactgtggagggaacatcaaaccccaacctatactggtaccgacaggctgcaggcaggggcctccagctgctcttctactccgttggtattggccagatcagctctgaggtgccccagaatctctcagcctccagaccccaggaccggcagttcatcctgagttctaagaagctcctcctcagtgactctggcttctatctctgtgcctggagtgt

SEQ ID NO: 188841 - DNA, 391 bp, Homo sapiens
  Payload ID: 17256
  Gene Symbol: TRBV3-1
  Gene Name: T cell receptor beta variable 3-1
  ENST ID: ENST00000390387
  CDS Start-End: 48-391
agaccagaatcctgccctgggccttgcctggtctgcctcactctgccatgggctgcaggctcctctgctgtgtggtcttctgcctcctccaagcaggtcccttggacacagctgtttcccagactccaaaatacctggtcacacagatgggaaacgacaagtccattaaatgtgaacaaaatctgggccatgatactatgtattggtataaacaggactctaagaaatttctgaagataatgtttagctacaataataaggagctcattataaatgaaacagttccaaatcgcttctcacctaaatctccagacaaagctcacttaaatcttcacatcaattccctggagcttggtgactctgctgtgtatttctgtgccagcagccaaga

SEQ ID NO: 188842 - DNA, 391 bp, Homo sapiens; identical to SEQ ID NO: 188841
  Payload ID: 17256
  Gene Symbol: TRBV3-1
  Gene Name: T cell receptor beta variable 3-1
  ENST ID: ENST00000632422
  CDS Start-End: 48-391

SEQ ID NO: 188843 - DNA, 373 bp, Homo sapiens
  Payload ID: 17257
  Gene Symbol: TRBV4-1
  Gene Name: T cell receptor beta variable 4-1
  ENST ID: ENST00000390357
  CDS Start-End: 30-373
agaggccccatctcagacccgaggctagcatgggctgcaggctgctctgctgtgcggttctctgtctcctgggagcagttcccatagacactgaagttacccagacaccaaaacacctggtcatgggaatgacaaataagaagtctttgaaatgtgaacaacatatggggcacagggctatgtattggtacaagcagaaagctaagaagccaccggagctcatgtttgtctacagctatgagaaactctctataaatgaaagtgtgccaagtcgcttctcacctgaatgccccaacagctctctcttaaaccttcacctacacgccctgcagccagaagactcagccctgtatctctgcgccagcagccaaga

SEQ ID NO: 188844 - DNA, 373 bp, Homo sapiens
  Payload ID: 17257
  Gene Symbol: TRBV4-1
  Gene Name: T cell receptor beta variable 4-1
  ENST ID: ENST00000632713
  CDS Start-End: 30-373
agaggccccatctcagacccgaggctagcatgggctgcaggctgctctgctgtgcggttctctgtctcctgggagcagttcccatagacactgaagttacccagacaccaaaacacctggtcatgggaatgacaaataagaagtctttgaaatgtgaacaacatatggggcacagggctatgtattggtacaagcagaaagctaagaagccaccggagctcatgtttgtctacagctatgagaaactctctataaatgaaagtgtgcgaagtcgcttctcacctgaatgccccaacagctctctcttaaaccttcacctacacgccctgcagccagaagactcagccctgtatctctgcgccagcagccaaga

SEQ ID NO: 188845 - DNA, 455 bp, Homo sapiens
  Payload ID: 17258
  Gene Symbol: TRBV4-2
  Gene Name: T cell receptor beta variable 4-2
  ENST ID: ENST00000390392
  CDS Start-End: 112-455
aggagcagtgacatcacaggaaaaaccaccaaccaaggccaaggagaccagagcccagcacctcacccagaggaccccagtcagaggccccatctcagacccgaggctagcatgggctgcaggctgctctgctgtgcggttctctgtctcctgggagcggtccccatggaaacgggagttacgcagacaccaagacacctggtcatgggaatgacaaataagaagtctttgaaatgtgaacaacatctggggcataacgctatgtattggtacaagcaaagtgctaagaagccactggagctcatgtttgtctacaactttaaagaacagactgaaaacaacagtgtgccaagtcgcttctcacctgaatgccccaacagctctcacttattccttcacctacacaccctgcagccagaagactcggccctgtatctctgtgccagcagccaaga

SEQ ID NO: 188846 - DNA, 455 bp, Homo sapiens; identical to SEQ ID NO: 188845
  Payload ID: 17258
  Gene Symbol: TRBV4-2
  Gene Name: T cell receptor beta variable 4-2
  ENST ID: ENST00000632512
  CDS Start-End: 112-455

SEQ ID NO: 188847 - DNA, 455 bp, Homo sapiens
  Payload ID: 17259
  Gene Symbol: TRBV4-3
  Gene Name: T cell receptor beta variable 4-3
  ENST ID: ENST00000631427
  CDS Start-End: 112-455
aggagcagtgacatcacaggaaaaaccaccaaccaaggccaaggagaccagagcccagcacctcacccagaggaccccagtcagaggccccatctcagacccgaggctagcatgggctgcaggctgctctgctgtgcggttctctgtctcctgggagcggtccccatggaaacgggagttacgcagacaccaagacacctggtcatgggaatgacaaataagaagtctttgaaatgtgaacaacatctgggtcataacgctatgtattggtacaagcaaagtgctaagaagccactggagctcatgtttgtctacagtcttgaagaacgggttgaaaacaacagtgtgccaagtcgcttctcacctgaatgccccaacagctctcacttattccttcacctacacaccctgcagccagaagactcggccctgtatctctgcgccagcagccaaga

SEQ ID NO: 188848 - DNA, 652 bp, Homo sapiens
  Payload ID: 17260
  Gene Symbol: TRBV5-1
  Gene Name: T cell receptor beta variable 5-1
  ENST ID: ENST00000390381
  CDS Start-End: 310-652
ctcagaggaccagtatccctcacagggtgacacctgaccagctctgtcccacctggccatgggctccaggtacctctgatgggaagacctttgtctcttgggaacaagtgaatccttggcacaggcccagtggattctgctgtgcagaacagagagcagtggacctcaggaggcctgcaaggggaggacataggacagtgacatcacagtatgcccctcccaccaggaaaagcaaggctgagaatttagctctttcccaggaggaccaagccctgagcacagacacagtgctgcctgcccctttgtgccatgggctccaggctgctctgttgggtgctgctttgtctcctgggagcaggcccagtaaaggctggagtcactcaaactccaagatatctgatcaaaacgagaggacagcaagtgacactgagctgctcccctatctctgggcataggagtgtatcctggtaccaacagaccccaggacagggccttcagttcctctttgaatacttcagtgagacacagagaaacaaaggaaacttccctggtcgattctcagggcgccagttctctaactctcgctctgagatgaatgtgagcaccttggagctgggggactcggccctttatctttgcgccagcagcttgg

SEQ ID NO: 188849 - DNA, 652 bp, Homo sapiens; identical to SEQ ID NO: 188848
  Payload ID: 17260
  Gene Symbol: TRBV5-1
  Gene Name: T cell receptor beta variable 5-1
  ENST ID: ENST00000633384
  CDS Start-End: 310-652

SEQ ID NO: 188850 - DNA, 343 bp, Homo sapiens
  Payload ID: 17261
  Gene Symbol: TRBV5-3
  Gene Name: T cell receptor beta variable 5-3 (non-functional)
  ENST ID: ENST00000390362
  CDS Start-End: 1-343
atgggccctgggctcctctgctgggaactgctttatctcctgggagcaggcccagtggaggctggagtcacccaaagtcccacacacctgatcaaaacgagaggacagcaagtgactctgagatgctctcctatctctgggcacagcagtgtgtcctggtaccaacaggccccgggtcaggggccccagtttatctttgaatatgctaatgagttaaggagatcagaaggaaacttccctaatcgattctcagggcgccagttccatgactattgctctgagatgaatgtgagtgccttggagctgggggactcggccctgtatctctgtgccagaagcttgg

SEQ ID NO: 188851 - DNA, 343 bp, Homo sapiens
  Payload ID: 17261
  Gene Symbol: TRBV5-3
  Gene Name: T cell receptor beta variable 5-3 (non-functional)
  ENST ID: ENST00000634123
  CDS Start-End: 1-343
atgggccccgggctcctctgctgggaactgctttatctcctgggagcaggcccagtggaggctggagtcacccaaagtcccacacacctgatcaaaacgagaggacagcaagtgactctgagatgctctcctatctctgggcacagcagtgtgtcctggtaccaacaggccccgggtcaggggccccagtttatctttgaatatgctaatgagttaaggagatcagaaggaaacttccctaatcgattctcagggcgccagttccatgactgttgctctgagatgaatgtgagtgccttggagctgggggactcggccctgtatctctgtgccagaagcttgg

SEQ ID NO: 188852 - DNA, 544 bp, Homo sapiens
  Payload ID: 17262
  Gene Symbol: TRBV5-4
  Gene Name: T cell receptor beta variable 5-4
  ENST ID: ENST00000454561
  CDS Start-End: 202-544
ttcagctctgcaggacaggtagagactccaggatcatccactgagcactggacataaggaaggctgcatggggaggacacaggacagtgacatcacaggatacccctcctattaggaaaatcaaggcccagaattcactcggctcttccccaggaggaccaagccctgaatcaggtgcagtgctgcctgccccactgtgccatgggccctgggctcctctgctgggcgctgctttgtctcctgggagcaggctcagtggagactggagtcacccaaagtcccacacacctgatcaaaacgagaggacagcaagtgactctgagatgctcttctcagtctgggcacaacactgtgtcctggtaccaacaggccctgggtcaggggccccagtttatctttcagtattatagggaggaagagaatggcagaggaaacttccctcctagattctcaggtctccagttccctaattatagctctgagctgaatgtgaacgccttggagctggacgactcggccctgtatctctgtgccagcagcttgg

SEQ ID NO: 188853 - DNA, 544 bp, Homo sapiens
  Payload ID: 17262
  Gene Symbol: TRBV5-4
  Gene Name: T cell receptor beta variable 5-4
  ENST ID: ENST00000633696
  CDS Start-End: 202-544
ttcagctctgcaggacaggtagagactccaggatcatccactgagcactggacataaggaaggctgcatggggaggactcaggacagtgacatcacaggatacccctcctattaggaaaatcaaggcccagaattcactcggctcttccccaggaggaccaagccctgaatcaggtgcagtgctgcctggcccactgtgccatgggccctgggctcctctgctgggcgctgctttgtctcctgggagcaggctcagtggacgctggagtcacccaaagtcccacacacctgatcaaaacgagaggacagcaagtgactctgagatgctcttctcagtctgggcacaacactgtgtcctggtaccaacaggccctgggtcaggggccccagtttatctttcagtattatagggaggaagagaatggcagaggaaacttccctcctagattctcaggtctccagttccctaatgatagctctgagctgaatgtgaatgccttggagctggacgactcggccctgtatctctgtgccagcagcttgg

SEQ ID NO: 188854 - DNA, 350 bp, Homo sapiens
  Payload ID: 17263
  Gene Symbol: TRBV5-5
  Gene Name: T cell receptor beta variable 5-5
  ENST ID: ENST00000390372
  CDS Start-End: 8-350
ctgtgccatgggccctgggctcctctgctgggtgctgctttgtctcctgggagcaggcccagtggacgctggagtcacccaaagtcccacacacctgatcaaaacgagaggacagcaagtgactctgagatgctctcctatctctgggcacaagagtgtgtcctggtaccaacaggtcctgggtcaggggccccagtttatctttcagtattatgagaaagaagagagaggaagaggaaacttccctgatcgattctcagctcgccagttccctaactatagctctgagctgaatgtgaacgccttgttgctgggggactcggccctgtatctctgtgccagcagcttgg

SEQ ID NO: 188855 - DNA, 350 bp, Homo sapiens
  Payload ID: 17263
  Gene Symbol: TRBV5-5
  Gene Name: T cell receptor beta variable 5-5
  ENST ID: ENST00000632187
  CDS Start-End: 8-350
ctgtgccatgggccctgggctcctctgctgggtgctgctttgtctcctggtagcaggcccagtggacgctggagtcacccaaagtcccacacacctgatcaaaacgagaggacagcaagtgactctgagatgctctcctatctctgggcacaagagtgtgtcctggtaccaacaggtcctgggtcaggggccccagtttatctttcagtattatgagaaagaagagagaggaagaggaaacttccctgatcgattctcagctcgccagttccctaactatagctctgagctgaatgtgaacgccttgttgctgggggactcggccctgtatctctgtgccagcagcttgg

SEQ ID NO: 188856 - DNA, 384 bp, Homo sapiens
  Payload ID: 17264
  Gene Symbol: TRBV5-6
  Gene Name: T cell receptor beta variable 5-6
  ENST ID: ENST00000390375
  CDS Start-End: 42-384
aagccctgaatcagatgcagtgcttcctgtccctctgtgccatgggccccgggctcctctgctgggcactgctttgtctcctgggagcaggcttagtggacgctggagtcacccaaagtcccacacacctgatcaaaacgagaggacagcaagtgactctgagatgctctcctaagtctgggcatgacactgtgtcctggtaccaacaggccctgggtcaggggccccagtttatctttcagtattatgaggaggaagagagacagagaggcaacttccctgatcgattctcaggtcaccagttccctaactatagctctgagctgaatgtgaacgccttgttgctgggggactcggccctctatctctgtgccagcagcttgg

SEQ ID NO: 188857 - DNA, 384 bp, Homo sapiens; identical to SEQ ID NO: 188856
  Payload ID: 17264
  Gene Symbol: TRBV5-6
  Gene Name: T cell receptor beta variable 5-6
  ENST ID: ENST00000632216
  CDS Start-End: 42-384

SEQ ID NO: 188858 - DNA, 343 bp, Homo sapiens
  Payload ID: 17265
  Gene Symbol: TRBV5-7
  Gene Name: T cell receptor beta variable 5-7 (non-functional)
  ENST ID: ENST00000390378
  CDS Start-End: 1-343
atgggccccgggctcctctgctgggtgctgctttgtcccctaggagaaggcccagtggacgctggagtcacccaaagtcccacacacctgatcaaaacgagaggacagcacgtgactctgagatgctctcctatctctgggcacaccagtgtgtcctcgtaccaacaggccctgggtcaggggccccagtttatctttcagtattatgagaaagaagagagaggaagaggaaacttccctgatcaattctcaggtcaccagttccctaactatagctctgagctgaatgtgaacgccttgttgctaggggactcggccctctatctctgtgccagcagcttgg

SEQ ID NO: 188859 - DNA, 343 bp, Homo sapiens; identical to SEQ ID NO: 188858
  Payload ID: 17265
  Gene Symbol: TRBV5-7
  Gene Name: T cell receptor beta variable 5-7 (non-functional)
  ENST ID: ENST00000633790
  CDS Start-End: 1-343

SEQ ID NO: 188860 - DNA, 478 bp, Homo sapiens
  Payload ID: 17266
  Gene Symbol: TRBV5-8
  Gene Name: T cell receptor beta variable 5-8
  ENST ID: ENST00000631639
  CDS Start-End: 136-478
tggccactgaggaaagggaagagaatgttgcctgggacaggaaaatatagaaaatgaaggcccagaactcactcggctcttccccaggaagaccaagccctgaatcaggtgcagtgccgcctggcccactgtgccatgggacccaggctcctcttctgggcactgctttgtctcctcggaacaggcccagtggaggctggagtcacacaaagtcccacacacctgatcaaaacgagaggacagcaagcgactctgagatgctctcctatctctgggcacaccagtgtgtactggtaccaacaggccctgggtctgggcctccagttcctcctttggtatgacgagggtgaagagagaaacagaggaaacttccctcctagattttcaggtcgccagttccctaattatagctctgagctgaatgtgaacgccttggagctggaggactcggccctgtatctctgtgccagcagcttgg

SEQ ID NO: 188861 - DNA, 401 bp, Homo sapiens
  Payload ID: 17267
  Gene Symbol: TRBV6-1
  Gene Name: T cell receptor beta variable 6-1
  ENST ID: ENST00000390353
  CDS Start-End: 58-401
gttcccctatcaccgatgcacagacccagaagacccctccatcctgtagcacctgccatgagcatcgggctcctgtgctgtgtggccttttctctcctgtgggcaagtccagtgaatgctggtgtcactcagaccccaaaattccaggtcctgaagacaggacagagcatgacactgcagtgtgcccaggatatgaaccataactccatgtactggtatcgacaagacccaggcatgggactgaggctgatttattactcagcttctgagggtaccactgacaaaggagaagtccccaatggctacaatgtctccagattaaacaaacgggagttctcgctcaggctggagtcggctgctccctcccagacatctgtgtacttctgtgccagcagtgaagc

SEQ ID NO: 188862 - DNA, 401 bp, Homo sapiens; identical to SEQ ID NO: 188861
  Payload ID: 17267
  Gene Symbol: TRBV6-1
  Gene Name: T cell receptor beta variable 6-1
  ENST ID: ENST00000631557
  CDS Start-End: 58-401

SEQ ID NO: 188863 - DNA, 392 bp, Homo sapiens
  Payload ID: 17268
  Gene Symbol: TRBV6-2
  Gene Name: T cell receptor beta variable 6-2 (gene/pseudogene)
  ENST ID: ENST00000632016
  CDS Start-End: 49-392
tcaccaatgcacagacccagaggacccctccatcctgcagttcctgccatgagcctcgggctcctgtgctgtggggccttttctctcctgtgggcaggtccagtgaatgctggtgtcactcagaccccaaaattccgggtcctgaagacaggacagagcatgacactgctgtgtgcccaggatatgaaccatgaatacatgtactggtatcgacaagacccaggcatggggctgaggctgattcattactcagttggtgagggtacaactgccaaaggagaggtccctgatggctacaatgtctccagattaaaaaaacagaatttcctgctggggttggagtcggctgctccctcccaaacatctgtgtacttctgtgccagcagttactc

SEQ ID NO: 188864 - DNA, 424 bp, Homo sapiens
  Payload ID: 17268
  Gene Symbol: TRBV6-2
  Gene Name: T cell receptor beta variable 6-2 (gene/pseudogene)
  ENST ID: ENST00000634383
  CDS Start-End: 81-424
agaatgacgcccttgaaagacgtgttcccttttcaccaatgcacagacccagaggacccctccatcctgcagttcctgccatgagcctcgggctcctgtgctgtggggccttttctctcctgtgggcaggtccagtgaatgctggtgtcactcagaccccaaaattccgggtcctgaagacaggacagagcatgacactgctgtgtgcccaggatatgaaccatgaatacatgtactggtatcgacaagacccaggcatggggctgaggctgattcattactcagttggtgagggtacaactgccaaaggagaggtccctgatggctacaatgtctccagattaaaaaaacagaatttcctgctggggttggagtcggctgctccctcccaaacatctgtgtacttctgtgccagcagttactc

SEQ ID NO: 188865 - DNA, 424 bp, Homo sapiens; identical to SEQ ID NO: 188864
  Payload ID: 17269
  Gene Symbol: TRBV6-3
  Gene Name: T cell receptor beta variable 6-3
  ENST ID: ENST00000632148
  CDS Start-End: 81-424

SEQ ID NO: 188866 - DNA, 365 bp, Homo sapiens
  Payload ID: 17270
  Gene Symbol: TRBV6-4
  Gene Name: T cell receptor beta variable 6-4
  ENST ID: ENST00000390360
  CDS Start-End: 22-365
ctctgtcttgtagcatctgccatgagcatcaggctcctgtgctgtgtggccttttctctcctgtgggcaggtccagtgactgctgggatcacccaggcaccaacatctcagatcctggcagcaggacggagcatgacactgagatgtacccaggatatgagacataatgccatgtactggtatagacaagatctaggactggggctaaggctcatccattattcaaatactgcaggtaccactggcaaaggagaagtccctgatggttatagtgtctccagagcaaacacagatgatttccccctcacgttggcgtctgctgtaccctctcagacatctgtgtacttctgtgccagcagtgactc

SEQ ID NO: 188867 - DNA, 365 bp, Homo sapiens
  Payload ID: 17270
  Gene Symbol: TRBV6-4
  Gene Name: T cell receptor beta variable 6-4
  ENST ID: ENST00000633472
  CDS Start-End: 22-365
ctctgtcttgtagcatctgccatgagaatcaggctcctgtgctgtgtggccttttctctcctgtgggcaggtccagtgattgctgggatcacccaggcaccaacatctcagatcctggcagcaggacggcgcatgacactgagatgtacccaggatatgagacataatgccatgtactggtatagacaagatctaggactggggctaaggctcatccattattcaaatactgcaggtaccactggcaaaggagaagtccctgatggttatagtgtctccagagcaaacacagatgatttccccctcacgttggcgtctgctgtaccctctcagacatctgtgtacttctgtgccagcagtgactc

SEQ ID NO: 188868 - DNA, 410 bp, Homo sapiens
  Payload ID: 17271
  Gene Symbol: TRBV6-5
  Gene Name: T cell receptor beta variable 6-5
  ENST ID: ENST00000390368
  CDS Start-End: 67-410
gagagtcctgctcccctttcatcaatgcacagatacagaagacccctccgtcatgcagcatctgccatgagcatcggcctcctgtgctgtgcagccttgtctctcctgtgggcaggtccagtgaatgctggtgtcactcagaccccaaaattccaggtcctgaagacaggacagagcatgacactgcagtgtgcccaggatatgaaccatgaatacatgtcctggtatcgacaagacccaggcatggggctgaggctgattcattactcagttggtgctggtatcactgaccaaggagaagtccccaatggctacaatgtctccagatcaaccacagaggatttcccgctcaggctgctgtcggctgctccctcccagacatctgtgtacttctgtgccagcagttactc

SEQ ID NO: 188869 - DNA, 432 bp, Homo sapiens
  Payload ID: 17271
  Gene Symbol: TRBV6-5
  Gene Name: T cell receptor beta variable 6-5
  ENST ID: ENST00000616186
  CDS Start-End: 58-432
gttcccttttcaccaatgcacagacccagaggacccctccatcctgcagttcctgccatgagcctcgggctcctgtgctgtggggccttttctctcctgtgggcaggtccagtgaatgctggtgtcactcagaccccaaaattccaggtcctgaagacaggacagagcatgacactgcagtgtgcccaggatatgaaccatgaatacatgtcctggtatcgacaagacccaggcatggggctgaggctgattcattactcagttggtgctggtatcactgaccaaggagaagtccccaatggctacaatgtctccagatcaaccacagaggatttcccgctcaggctgctgtcggctgctccctcccagacatctgtgtacttctgtgccagcttactccacagcgctacaaggcccactgtgacatcggcc

SEQ ID NO: 188870 - DNA, 410 bp, Homo sapiens; identical to SEQ ID NO: 188868
  Payload ID: 17271
  Gene Symbol: TRBV6-5
  Gene Name: T cell receptor beta variable 6-5
  ENST ID: ENST00000633072
  CDS Start-End: 67-410

SEQ ID NO: 188871 - DNA, 388 bp, Homo sapiens
  Payload ID: 17272
  Gene Symbol: TRBV6-6
  Gene Name: T cell receptor beta variable 6-6
  ENST ID: ENST00000390371
  CDS Start-End: 45-388
caatgcacagatacagaagacccctccgtcctggagcacctgccatgagcatcagcctcctgtgctgtgcagcctttcctctcctgtgggcaggtccagtgaatgctggtgtcactcagaccccaaaattccgcatcctgaagataggacagagcatgacactgcagtgtgcccaggatatgaaccataactacatgtactggtatcgacaagacccaggcatggggctgaagctgatttattattcagttggtgctggtatcactgacaaaggagaagtcccgaatggctacaacgtctccagatcaaccacagaggatttcccgctcaggctggagttggctgctccctcccagacatctgtgtacttctgtgccagcagttactc

SEQ ID NO: 188872 - DNA, 390 bp, Homo sapiens
  Payload ID: 17272
  Gene Symbol: TRBV6-6
  Gene Name: T cell receptor beta variable 6-6
  ENST ID: ENST00000633963
  CDS Start-End: 47-390
atcaatgcacagatacagaagacccctccgtcctggagcacctgccatgagcatcagcctcctgtgctgtgcagcctttcctctcctgtgggcaggtccagtgaatgctggtgtcactcagaccccaaaattccgcatcctgaagataggacagagcatgacactgcagtgtgcccaggatatgaaccataactacatgtactggtatcgacaagacccaggcatggggctgaagctgatttattattcagttggtgctggtatcactgataaaggagaagtcccgaatggctacaacgtctccagatcaaccacagagtatttcccgctcaggctggagttggctgctccctcccagacatctgtgtacttctgtgccagcagttactc

SEQ ID NO: 188873 - DNA, 344 bp, Homo sapiens
  Payload ID: 17273
  Gene Symbol: TRBV6-7
  Gene Name: T cell receptor beta variable 6-7 (non-functional)
  ENST ID: ENST00000390373
  CDS Start-End: 1-344
atgagcctcgggctcctgtgctgtgtggccttttctctcctgtgggcaggtccaatgaatgctggtgtcactcagaccccaaaattccacgtcctgaagacaggacagagcatgactctgctgtgtgcccaggatatgaaccatgaatacatgtatcggtatcgacaagacccaggcaaggggctgaggctgatttactactcagttgctgctgctctcactgacaaaggagaagttcccaatggctacaatgtctccagatcaaacacagaggatttccccctcaagctggagtcagctgctccctctcagacttctgtttacttctgtgccagcagttactc

SEQ ID NO: 188874 - DNA, 386 bp, Homo sapiens
  Payload ID: 17273
  Gene Symbol: TRBV6-7
  Gene Name: T cell receptor beta variable 6-7 (non-functional)
  ENST ID: ENST00000631511
  CDS Start-End: 43-386
atgcacagacccagaagacccctccgtcctgcagcccctgccatgagcctcgggctcctgtgctgtgtggccttttctctcctgtgggcaggtccaatgaatgctggtgtcactcagaccccaaaattccacgtcctgaagacaggacagagcatgactctgctgtgtgcccaggatatgaaccatgaatacatgtatcggtatcgacaagacccaggcaaggggctgaggcttatttactactcagttgctgctgctctcactgacaaaggagaagttcccaatggctacaatgtctccagatcaaacacagaggatttccccctcaagctggagtcagctgctccctctcagacttctgtttacttctgtgccagcagttactc

SEQ ID NO: 188875 - DNA, 341 bp, Homo sapiens
  Payload ID: 17274
  Gene Symbol: TRBV6-8
  Gene Name: T cell receptor beta variable 6-8
  ENST ID: ENST00000390376
  CDS Start-End: 1-341
atgagcctcgggctcctgtgctgtgcggccttttctctcctgtgggcaggtcccgtgaatgctggtgtcactcagaccccaaaattccacatcctgaagacaggacagagcatgacactgcagtgtgcccaggatatgaaccatggatacatgtcctggtatcgacaagacccaggcatggggctgagactgatttactactcagctgctgctggtactactgacaaagaagtccccaatggctacaatgtctctagattaaacacagaggatttcccactcaggctggtgtcggctgctccctcccagacatctgtgtacttgtgtgccagcagttactc

SEQ ID NO: 188876 - DNA, 407 bp, Homo sapiens
  Payload ID: 17274
  Gene Symbol: TRBV6-8
  Gene Name: T cell receptor beta variable 6-8
  ENST ID: ENST00000632425
  CDS Start-End: 67-407
gagagtcctgttccccttttatcaatgcacagacccagaagacccctccgtcctgcagcccctgccatgagcctcgggctcctgtgctgtgcggccttttctctcctgtgggcaggtccagtgaatgctggtgtcactcagaccccaaaattccacatcctgaagacaggacagagcatgacactgcagtgtgcccaggatatgaaccatggatacatgtcctggtatcgacaagacccaggcatggggctgagactgatttactactcagctgctgctggtactactgacaaagaagtccccaatggctacaatgtctctagattaaacacagaggatttcccactcaggctggtgtcggctgctccctcccggacatctgtgtacttgtgtgccagcagttactc

SEQ ID NO: 188877 - DNA, 344 bp, Homo sapiens
  Payload ID: 17275
  Gene Symbol: TRBV6-9
  Gene Name: T cell receptor beta variable 6-9
  ENST ID: ENST00000634093
  CDS Start-End: 1-344
atgagcatcgggctcctgtgctgtgtggccttttctctcctgtgggcaggtccagtgaatgctggtgtcactcagaccccaaaattccacatcctgaagacaggacagagcatgacactgcagtgtgcccaggatatgaaccatggatacttgtcctggtatcgacaagacccaggcatggggctgaggcgcattcattactcagttgctgctggtatcactgacaaaggagaagtccccgatggctacaatgtatccagatcaaacacagaggatttcccgctcaggctggagtcagctgctccctcccagacatctgtatacttctgtgccagcagttattc

SEQ ID NO: 188878 - DNA, 380 bp, Homo sapiens
  Payload ID: 17276
  Gene Symbol: TRBV7-1
  Gene Name: T cell receptor beta variable 7-1 (non-functional)
  ENST ID: ENST00000547918
  CDS Start-End: 34-380
ctggtaaagctcccatcctgccctgaccctgccatgggcacaaggctcctctgctgggcagccatatgtctcctgggggcagatcacacaggtgctggagtctcccagtccctgagacacaaggtagcaaagaagggaaaggatgtagctctcagatatgatccaatttcaggtcataatgccctttattggtaccgacagagcctggggcagggcctggagtttccaatttacttccaaggcaaggatgcagcagacaaatcggggcttccccgtgatcggttctctgcacagaggtctgagggatccatctccactctgaagttccagcgcacacagcagggggacttggctgtgtatctctgtgccagcagctcagc

SEQ ID NO: 188879 - DNA, 380 bp, Homo sapiens; identical to SEQ ID NO: 188878
  Payload ID: 17276
  Gene Symbol: TRBV7-1
  Gene Name: T cell receptor beta variable 7-1 (non-functional)
  ENST ID: ENST00000632308
  CDS Start-End: 34-380

SEQ ID NO: 188880 - DNA, 386 bp, Homo sapiens
  Payload ID: 17277
  Gene Symbol: TRBV7-2
  Gene Name: T cell receptor beta variable 7-2
  ENST ID: ENST00000631392
  CDS Start-End: 40-386
cctgatctggtaaagctcccatcctgccctgaccctgccatgggcaccaggctcctcttctgggtggccttctgtctcctgggggcagatcacacaggagctggagtctcccagtcccccagtaacaaggtcacagagaagggaaaggatgtagagctcaggtgtgatccaatttcaggtcatactgccctttactggtaccgacagagcctggggcagggcctggagtttttaatttacttccaaggcaacagtgcaccagacaaatcagggctgcccagtgatcgcttctctgcagagaggactgggggatccgtctccactctgacgatccagcgcacacagcaggaggactcggccgtgtatctctgtgccagcagcttagc

SEQ ID NO: 188881 - DNA, 394 bp, Homo sapiens
  Payload ID: 17277
  Gene Symbol: TRBV7-2
  Gene Name: T cell receptor beta variable 7-2
  ENST ID: ENST00000634605
  CDS Start-End: 48-394
acagtgatcctgatctggtaaagctcccatcctgccctgaccctgccatgggcaccaggctcctcttctgggtggccttctgtctcctgggggcagatcacacaggagctggagtctcccagtcccccagtaacaaggtcacagagaagggaaaggatgtagagctcaggtgtgatccaatttcaggtcatactgccctttactggtaccgacagagcctggggcagggcctggagtttttaatttacttccaaggcaacagtgcaccagacaaatcagggctgcccagtgatcgcttctctgcagagaggactgggggatccgtctccactctgacgatccagcgcacacagcaggaggactcggccgtgtatctctgtgccagcagcttagc

SEQ ID NO: 188882 - DNA, 397 bp, Homo sapiens
  Payload ID: 17278
  Gene Symbol: TRBV7-3
  Gene Name: T cell receptor beta variable 7-3
  ENST ID: ENST00000390361
  CDS Start-End: 51-397
ctcacagtgaccctgatctggtaaagctcccatcctgccctgactctgtcatgggcaccaggctcctctgctgggcagccctgtgcctcctgggggcagatcacacaggtgctggagtctcccagacccccagtaacaaggtcacagagaagggaaaagatgtagagctcaggtgtgatccaatttcaggtcatactgccctttactggtaccgacaaagcctggggcagggcccagagtttctaatttacttccaaggcacgggtgcggcagatgactcagggctgcccaaagatcggttctttgcagtcaggcctgagggatccgtctctactctgaagatccagcgcacagagcagggggactcagccgcgtatctccgtgccagcagcttaac

SEQ ID NO: 188883 - DNA, 397 bp, Homo sapiens
  Payload ID: 17278
  Gene Symbol: TRBV7-3
  Gene Name: T cell receptor beta variable 7-3
  ENST ID: ENST00000631882
  CDS Start-End: 51-397
ctcacagtgaccctgatctggtaaagctcccatcctgccctgactctgtcatgggcaccaggctcctctgctgggcagccctgtgcctcctgggggcagatcacacaggtgctggagtctcccagacccccagtaacaaggtcacagagaagggaaaatatgtagagctcaggtgtgatccaatttcaggtcatactgccctttactggtaccgacaaagcctggggcagggcccagagtttctaatttacttccaaggcacgggtgcggcagatgactcagggctgcccaacgatcggttctttgcagtcaggcctgagggatccgtctctactctgaagatccagcgcacagagcggggggactcagccgtgtatctctgtgccagcagcttaac

SEQ ID NO: 188884 - DNA, 347 bp, Homo sapiens
  Payload ID: 17279
  Gene Symbol: TRBV7-4
  Gene Name: T cell receptor beta variable 7-4 (gene/pseudogene)
  ENST ID: ENST00000390369
  CDS Start-End: 1-347
atgggcaccaggctcctctgctgggtggtcctgggtttcctagggacagatcacacaggtgctggagtctcccagtccccaaggtacaaagtcgcaaagaggggacgggatgtagctctcaggtgtgattcaatttcgggtcatgtaaccctttattggtaccgacagaccctggggcagggctcagaggttctgacttactcccagagtgatgctcaacgagacaaatcagggcggcccagtggtcggttctctgcagagaggcctgagagatccgtctccactctgaagatccagcgcacagagcagggggactcagctgtgtatctctgtgccagcagcttagc

SEQ ID NO: 188885 - DNA, 347 bp, Homo sapiens
  Payload ID: 17279
  Gene Symbol: TRBV7-4
  Gene Name: T cell receptor beta variable 7-4 (gene/pseudogene)
  ENST ID: ENST00000633313
  CDS Start-End: 1-347
atgggcaccaggctcctctgctgggtggtcctgggtttcctagggacagatcacacaggtgctggagtctcccagtccccaaggtacaaagtcgcaaagaggggacgggatgtagctctcaggtgtgattcaatttcgggtcatgtaaccctttattggtaccgacagaccctggggcagggctcagaggttctgacttactcccagagtgatgctcaacgagacaaatcagggcggcccagtggtcggttctctgcagagaggcctgagagatccgtctccactctgaagatccagtgcacagagcagggggactcagctgtgtatctctgtgccagcagcttagc

SEQ ID NO: 188886 - DNA, 392 bp, Homo sapiens
  Payload ID: 17280
  Gene Symbol: TRBV7-6
  Gene Name: T cell receptor beta variable 7-6
  ENST ID: ENST00000390374
  CDS Start-End: 46-392
agtgacactgatctggtaaagccctcatcctgtcctgaccctgccatgggcaccagtctcctatgctgggtggtcctgggtttcctagggacagatcacacaggtgctggagtctcccagtctcccaggtacaaagtcacaaagaggggacaggatgtagctctcaggtgtgatccaatttcgggtcatgtatccctttattggtaccgacaggccctggggcagggcccagagtttctgacttacttcaattatgaagcccaacaagacaaatcagggctgcccaatgatcggttctctgcagagaggcctgagggatccatctccactctgacgatccagcgcacagagcagcgggactcggccatgtatcgctgtgccagcagcttagc

SEQ ID NO: 188887 - DNA, 392 bp, Homo sapiens
  Payload ID: 17280
  Gene Symbol: TRBV7-6
  Gene Name: T cell receptor beta variable 7-6
  ENST ID: ENST00000633265
  CDS Start-End: 46-392
agtgacactgatctggtaaagccctcatcctggcctgaccctgccatgggcaccagtctcctatgctgggtggtcctgggtttcctagggacagatcacacaggtgctggagtctcccagtctcccaggtacaaagtcacaaagaggggacaggatgtagctctcaggtgtgatccaatttcgggtcatgtatccctttattggtaccgacaggccctggggcagggcccagagtttctgacttacttcaattatgaagcccaacaagacaaatcagggctgcccaatgatcggttctctgcagagaggcctgagggatccgtctccactctgacgatccagcgcacagagcagcgggactcggccatgtatcgctgtgccagcagcttagc

SEQ ID NO: 188888 - DNA, 347 bp, Homo sapiens
  Payload ID: 17281
  Gene Symbol: TRBV7-7
  Gene Name: T cell receptor beta variable 7-7
  ENST ID: ENST00000390377
  CDS Start-End: 1-347
atgggtaccagtctcctatgctgggtggtcctgggtttcctagggacagatcacacaggtgctggagtctcccagtctcccaggtacaaagtcacaaagaggggacaggatgtaactctcaggtgtgatccaatttcgagtcatgcaaccctttattggtatcaacaggccctggggcagggcccagagtttctgacttacttcaattatgaagctcaaccagacaaatcagggctgcccagtgatcggttctctgcagagaggcctgagggatccatctccactctgacgattcagcgcacagagcagcgggactcagccatgtatcgctgtgccagcagcttagc

SEQ ID NO: 188889 - DNA, 347 bp, Homo sapiens; identical to SEQ ID NO: 188888
  Payload ID: 17281
  Gene Symbol: TRBV7-7
  Gene Name: T cell receptor beta variable 7-7
  ENST ID: ENST00000631548
  CDS Start-End: 1-347

SEQ ID NO: 188890 - DNA, 347 bp, Homo sapiens
  Payload ID: 17282
  Gene Symbol: TRBV7-8
  Gene Name: T cell receptor beta variable 7-8
  ENST ID: ENST00000632560
  CDS Start-End: 1-347
atgggcaccaggctcctctgctgggtggtcctgggtttcctagggacagatcacacaggtgctggagtctcccagtcccctaggtacaaagtcgcaaagagaggacaggatgtagctctcaggtgtgatccaatttcgggtcatgtatcccttttttggtaccaacaggccctggggcaggggccagagtttctgacttatttccagaatgaagctcaactagacaaatcggggctgcccagtgatcgcttctttgcagaaaggcctgagggatccgtctccactctgaagatccagcgcacacagcaggaggactccgccgtgtatctctgtgccagcagcttagc

SEQ ID NO: 188891 - DNA, 347 bp, Homo sapiens
  Payload ID: 17283
  Gene Symbol: TRBV7-9
  Gene Name: T cell receptor beta variable 7-9
  ENST ID: ENST00000612787
  CDS Start-End: 1-347
atgggcaccagcctcctctgctggatggccctgtgtctcctgggggcagatcacgcagatactggagtctcccagaaccccagacacaagatcacaaagaggggacagaatgtaactttcaggtgtgatccaatttctgaacacaaccgcctttattggtaccgacagaccctggggcagggcccagagtttctgacttacttccagaatgaagctcaactagaaaaatcaaggctgctcagtgatcggttctctgcagagaggcctaagggatctttctccaccttggagatccagcgcacagagcagggggactcggccatgtatctctgtgccagcagcttagc

SEQ ID NO: 188892 - DNA, 347 bp, Homo sapiens
  Payload ID: 17283
  Gene Symbol: TRBV7-9
  Gene Name: T cell receptor beta variable 7-9
  ENST ID: ENST00000632021
  CDS Start-End: 1-347
atgggcaccagcctcctctgctggatggccctgtgtctcctgggggcagatcacgcagatactggagtctcccaggaccccagacacaagatcacaaagaggggacagaatgtaactttcaggtgtgatccaatttctgaacacaaccgcctttattggtaccgacagaccctggggcagggcccagagtttctgacttacttccagaatgaagctcaactagaaaaatcaaggctgctcagtgatcggttctctgcagagaggcctaagggatctttctccaccttggagatccagcgcacagagcagggggactcggccatgtatctctgtgccagcagcttagc

SEQ ID NO: 188893 - DNA, 390 bp, Homo sapiens
  Payload ID: 17284
  Gene Symbol: TRBV9
  Gene Name: T cell receptor beta variable 9
  ENST ID: ENST00000390363
  CDS Start-End: 48-390
agaatgcttactacagagacaccagccccaagctaggagatcctgccatgggcttcaggctcctctgctgtgtggccttttgtctcctgggagcaggcccagtggattctggagtcacacaaaccccaaagcacctgatcacagcaactggacagcgagtgacgctgagatgctcccctaggtctggagacctctctgtgtactggtaccaacagagcctggaccagggcctccagttcctcattcactattataatggagaagagagagcaaaaggaaacattcttgaacgattctccgcacaacagttccctgacttgcactctgaactaaacctgagctctctggagctgggggactcagctttgtatttctgtgccagcagcgtag

SEQ ID NO: 188894 - DNA, 390 bp, Homo sapiens
  Payload ID: 17284
  Gene Symbol: TRBV9
  Gene Name: T cell receptor beta variable 9
  ENST ID: ENST00000633328
  CDS Start-End: 48-390
agaatgcttactacagagacaccagccccaagctaggagatcctgccatgggcttcaggctcctctgctgtgtggccttttgtctcctgggagcaggcccagtggattctggagtcacacaaaccccaaagcacctgatcacagcaactggacagcgagtgacgctgagatgctcccctaggtctggagacctctctgtgtactggtaccaacagagcctggaccagggcctccagttcctcattcagtattataatggagaagagagagcaaaaggaaacattcttgaacgattctccgcacaacagttccctgacttgcactctgaactaaacctgagctctctggagctgggggactcagctttgtatttctgtgccagcagcgtag

SEQ ID NO: 188895 - DNA, 720 bp, Homo sapiens
  Payload ID: 17285
  Gene Symbol: TRDC
  Gene Name: T cell receptor delta constant
  ENST ID: ENST00000390477
  CDS Start-End: 1-464
gaagtcagcctcataccaaaccatccgtttttgtcatgaaaaatggaacaaatgtcgcttgtctggtgaaggaattctaccccaaggatataagaataaatctcgtgtcatccaagaagataacagagtttgatcctgctattgtcatctctcccagtgggaagtacaatgctgtcaagcttggtaaatatgaagattcaaattcagtgacatgttcagttcaacacgacaataaaactgtgcactccactgactttgaagtgaagacagattctacagatcacgtaaaaccaaaggaaactgaaaacacaaagcaaccttcaaagagctgccataaacccaaagccatagttcataccgagaaggtgaacatgatgtccctcacagtgcttgggctacgaatgctgtttgcaaagactgttgccgtcaattttctcttgactgccaagttatttttcttgtaaggctgactggcatgaggaagctacactcctgaagaaaccaaaggcttacaaaaatgcatctccttggcttctgacttctttgtgattcaagttgacctgtcatagccttgttaaaatggctgctagccaaaccactttttcttcaaagacaacaaacccagctcatcctccagcttgatgggaagacaaaagtcctggggaaggggggtttatgtcctaactgctttgtatgctgttttataaagggatagaagga

SEQ ID NO: 188896 - DNA, 8 bp, Homo sapiens
  Payload ID: 17286
  Gene Symbol: TRDD1
  Gene Name: T cell receptor delta diversity 1
  ENST ID: ENST00000415118
  CDS Start-End: 1-8
gaaatagt

SEQ ID NO: 188897 - DNA, 9 bp, Homo sapiens
  Payload ID: 17287
  Gene Symbol: TRDD2
  Gene Name: T cell receptor delta diversity 2
  ENST ID: ENST00000434970
  CDS Start-End: 1-9
ccttcctac

SEQ ID NO: 188898 - DNA, 13 bp, Homo sapiens
  Payload ID: 17288
  Gene Symbol: TRDD3
  Gene Name: T cell receptor delta diversity 3
  ENST ID: ENST00000448914
  CDS Start-End: 1-13
actgggggatacg

SEQ ID NO: 188899 - DNA, 51 bp, Homo sapiens
  Payload ID: 17289
  Gene Symbol: TRDJ1
  Gene Name: T cell receptor delta joining 1
  ENST ID: ENST00000390473
  CDS Start-End: 1-51
acaccgataaactcatctttggaaaaggaacccgtgtgactgtggaaccaa

SEQ ID NO: 188900 - DNA, 54 bp, Homo sapiens
  Payload ID: 17290
  Gene Symbol: TRDJ2
  Gene Name: T cell receptor delta joining 2
  ENST ID: ENST00000390475
  CDS Start-End: 1-54
ctttgacagcacaactcttctttggaaagggaacacaactcatcgtggaaccag

SEQ ID NO: 188901 - DNA, 59 bp, Homo sapiens
  Payload ID: 17291
  Gene Symbol: TRDJ3
  Gene Name: T cell receptor delta joining 3
  ENST ID: ENST00000390476
  CDS Start-End: 1-59
ctcctgggacacccgacagatgtttttcggaactggcatcaaactcttcgtggagcccc

SEQ ID NO: 188902 - DNA, 48 bp, Homo sapiens
  Payload ID: 17292
  Gene Symbol: TRDJ4
  Gene Name: T cell receptor delta joining 4
  ENST ID: ENST00000390474
  CDS Start-End: 1-48
ccagacccctgatctttggcaaaggaacctatctggaggtacaacaac

SEQ ID NO: 188903 - DNA, 365 bp, Homo sapiens
  Payload ID: 17293
  Gene Symbol: TRDV1
  Gene Name: T cell receptor delta variable 1
  ENST ID: ENST00000390452
  CDS Start-End: 19-365
caaagagctacatgccacatgctgttctccagcctgctgtgtgtatttgtggccttcagctactctggatcaagtgtggcccagaaggttactcaagcccagtcatcagtatccatgccagtgaggaaagcagtcaccctgaactgcctgtatgaaacaagttggtggtcatattatattttttggtacaagcaacttcccagcaaagagatgattttccttattcgccagggttctgatgaacagaatgcaaaaagtggtcgctattctgtcaacttcaagaaagcagcgaaatccgtcgccttaaccatttcagccttacagctagaagattcagcaaagtacttttgtgctcttggggaact

SEQ ID NO: 188904 - DNA, 102 bp, Homo sapiens
  Payload ID: 17293
  Gene Symbol: TRDV1
  Gene Name: T cell receptor delta variable 1
  ENST ID: ENST00000621643
  CDS Start-End: 1-102
aaaagtggtcgctattctgtcaacttcaagaaagcagcgaaatccgtcgccttaaccatttcagccttacagctagaagattcagcaaagtacttttgtgct

SEQ ID NO: 188905 - DNA, 520 bp, Homo sapiens
  Payload ID: 17294
  Gene Symbol: TRDV2
  Gene Name: T cell receptor delta variable 2
  ENST ID: ENST00000390469
  CDS Start-End: 176-520
attagcaggcagcaggccctgcgagcctcctgtgatcagctagatttctctggggaatgaaacagctgctgatagggactgacttcctcagtcacaagtgtttcacaagtgtgttggttcagaggagggaccaggcagaaggtggttgagaggcagagctgcccctgagtgagccatgcagaggatctcctccctcatccatctctctctcttctgggcaggagtcatgtcagccattgagttggtgcctgaacaccaaacagtgcctgtgtcaataggggtccctgccaccctcaggtgctccatgaaaggagaagcgatcggtaactactatatcaactggtacaggaagacccaaggtaacacaatgactttcatataccgagaaaaggacatctatggccctggtttcaaagacaatttccaaggtgacattgatattgcaaagaacctggctgtacttaagatacttgcaccatcagagagagatgaagggtcttactactgtgcctgtgacacc

SEQ ID NO: 188906 - DNA, 425 bp, Homo sapiens
  Payload ID: 17295
  Gene Symbol: TRDV3
  Gene Name: T cell receptor delta variable 3
  ENST ID: ENST00000535880
  CDS Start-End: 85-425
tctttcattagaaccgtcagatagtctctgagatcttaggaaccctgttttgttgtatatcctctgccctgatatgaagaaaagatgattcttactgtgggctttagctttttgtttttctacaggggcacgctgtgtgacaaagtaacccagagttccccggaccagacggtggcgagtggcagtgaggtggtactgctctgcacttacgacactgtatattcaaatccagatttattctggtaccggataaggccagattattcctttcagtttgtcttttatggggataacagcagatcagaaggtgcagattttactcaaggacggttttctgtgaaacacattctgacccagaaagcctttcacttggtgatctctccagtaaggactgaagacagtgccacttactactgtgcctttag

SEQ ID NO: 188907 - DNA, 2730 bp, Homo sapiens
  Payload ID: 17296
  Gene Symbol: TRGC1
  Gene Name: T cell receptor gamma constant 1
  ENST ID: ENST00000443402
  CDS Start-End: 1-521
ataaacaacttgatgcagatgtttcccccaagcccactatttttcttccttcaattgctgaaacaaagctccagaaggctggaacatacctttgtcttcttgagaaatttttccctgatgttattaagatacattggcaagaaaagaagagcaacacgattctgggatcccaggaggggaacaccatgaagactaacgacacatacatgaaatttagctggttaacggtgccagaaaagtcactggacaaagaacacagatgtatcgtcagacatgagaataataaaaacggagttgatcaagaaattatctttcctccaataaagacagatgtcatcacaatggatcccaaagacaattgttcaaaagatgcaaatgatacactactgctgcagctcacaaacacctctgcatattacatgtacctcctcctgctcctcaagagtgtggtctattttgccatcatcacctgctgtctgcttagaagaacggctttctgctgcaatggagagaaatcataacagacggtggcacaaggaggccatcttttcctcatcggttattgtccctagaagcgtcttctgaggatctagttgggctttctttctgggtttgggccatttcagttctcatgtgtgtactattctatcattattgtataacggttttcaaaccagtgggcacacagagaacctcactctgtaataacaatgaggaatagccacggcgatctccagcaccaatctctccatgttttccacagctcctccagccaacccaaatagcgcctgctatagtgtagacatcctgcggcttctagccttgtccctctcttagtgttctttaatcagataactgcctggaagcctttcattttacacgccctgaagcagtcttctttgctagttgaattatgtggtgtgtttttccgtaataagcaaaataaatttaaaaaaatgaaaagttgacttttgtccatggtattttaattggatgacatcaaattgaacatccaaggtaagaaacagcatggcaattgggctgtggaattctgtattggttgtaagaatggtccaacaccccatttctaattctttccctgagatcgtggttatcacaccttctaagaagaactacaaccaaatgaaggagctcatgtgacttctgtttgaaaggtcaccagagtcagattcattcggtttaggacattccagtggctataggacactatctactgtgacgcgtaccgtgtgagctcagctctagagtgtttcacagacactgtgtttcctgatcctcacgatacccccatgagagctgccctaaaagcagagaggcagcgtgatggagaggttcagcacatgctctctgatcccaggaatcctgggtatggtgtttcgtatctgtgtgacctcaggtgagttccaggaactctatgtgccataatctcctcatgtaaaatgaagttataatgccccgtttcctggagttatgtggattagatgagttaatgacacctggcacatgcaagtcctccacagtgtcggcacgcactgttggtagctctactctagagacagtaataaaccaaaaagtatctgacacaggcctcaatcaacttagaagtttattttgcctatgttaagggcatgcccaacttcctgagataataatttatttcataagaatattttaaaaactcgagtaaacttgttaatgtttattgctgcagccactctgtccatctccaccatcactgcaacaacgcaggtccttgttgcctcttattggcttatggtgaccacctataaaaccatctgcttcacccaaattgctgtcctggggagtgccccttcctttctgcttgcacatttatcttcctcaagtgcaaatgtgatcatgtgactttcctccctaaatcttttagcaagtcctcattgtctattcttctttcaaaaacatttatttgaaaatactattaaaatagaaaattttccacattcttacttcttaaaaattaatgtgttttaagtttctcctactccatttccatcccatgcctctttactcaatggatgcaattattcttctacatgttccttctggccatgtgtagctttgtcattttaattttaatctatttggaccctgtgttatctgggatgaggtagagtgatatttttattttctcaggtaattatttgcctaatgcctgtttccaaataatccaccatttccttacaatttaaaaatgctccagcatgtttttaatagctacacatatttgacacattttctggagaatttctgttttatttgtctatttcattattcttgtatcattatcatattatctcagtagctttgtggcaagtattaagatctactatgccaaatgtctattcactgtaccatttttcagaaaattctttttcaatcatctcatatttattcactcctgtagaatttaaaatcaacttatctagcctaacattaaacctcacaccctagaacaacaacatgtcgtagtaattctgactaaaattgctggaaatttatagatgaatttagggtgtattggcctctttatgatagaagctttttattcatcaatgtatgtttctccatttatttaggttttattttatgcccttaggaaaactaaatactgtgttcttcatatcattcttgtatttttttggtaaatttaataaaagattttataattca

SEQ ID NO: 188908 - DNA, 1013 bp, Homo sapiens
  Payload ID: 17297
  Gene Symbol: TRGC2
  Gene Name: T cell receptor gamma constant 2
  ENST ID: ENST00000436911
  CDS Start-End: 1-569
ataaacaacttgatgcagatgtttcccccaagcccactatttttcttccttcgattgctgaaacaaaactccagaaggctggaacatacctttgtcttcttgagaaatttttcccagatattattaagatacattggcaagaaaagaagagcaacacgattctgggatcccaggaggggaacaccatgaagactaacgacacatacatgaaatttagctggttaacggtgccagaagagtcactggacaaagaacacagatgtatcgtcagacatgagaataataaaaacggaattgatcaagaaattatctttcctccaataaagacagatgtcaccacagtggatcccaaatacaattattcaaaggatgcaaatgatgtcatcacaatggatcccaaagacaattggtcaaaagatgcaaatgatacactactgctgcagctcacaaacacctctgcatattacacgtacctcctcctgctcctcaagagtgtggtctattttgccatcatcacctgctgtctgcttagaagaacggctttctgctgcaatggagagaaatcataacagacggtggcacaaggaggccatcttttcctcatcggttattgtccctagaagcgtcttctgaggatctagttgggctttctttctgggtttgggccatttcagttctcatgtgtgtactattctatcattattgtataatggttttcaaaccagtgggcacacagagaacctcactctgtaataacaatgaggaatagccatggcgatctccagcaccaatctctccatgttttccacagctcctccagccaacccaaatagcgcctgctatagtgtagacagcctgcggcttctagccttgtccctctcttagtgttctttaatcagataactgcctggaagcctttcattttacacgccctgaagcagtcttctttgctagttgaattatgtggtgtgtttttccgtaataagcaaaataaatttaaaaaaatgaaaagt

SEQ ID NO: 188909 - DNA, 1060 bp, Homo sapiens
  Payload ID: 17297
  Gene Symbol: TRGC2
  Gene Name: T cell receptor gamma constant 2
  ENST ID: ENST00000610547
  CDS Start-End: 37-1002
tggtccctttccttccaaggccccagagaggaaggcatgcggtgggccctagcggtgcttctagctttcctgtctcctgccagtcagatatcttccaacttggaagggagaacgaagtcagtcaccaggctgactgggtcatctgctgaaatcacctgtgatcttcctggagcaagtaccttatacatccactggtacctgcaccaggaggggaaggccccacagtgtcttctgtactatgaaccctactactccagggttgtgctggaatcaggaatcactccaggaaagtatgacactggaagcacaaggagcaattggaatttgagactgcaaaatctaattaaaaatgattctgggttctattactgtgccacctgggacaggcacagtattcagacactgtctgcctgtggttcatttctccccatagataaacaacttgatgcagatgtttcccccaagcccactatttttcttccttcgattgctgaaacaaaactccagaaggctggaacatacctttgtcttcttgagaaatttttcccagatattattaagatacattggcaagaaaagaagagcaacacgattctgggatcccaggaggggaacaccatgaagactaacgacacatacatgaaatttagctggttaacggtgccagaagagtcactggacaaagaacacagatgtatcgtcagacatgagaataataaaaacggaattgatcaagaaattatctttcctccaataaagacagatgtcaccacagtggatcccaaatacaattattcaaaggatgcaaatgatgtcatcacaatggatcccaaagacaattggtcaaaagatgcaaatgatacactactgctgcagctcacaaacacctctgcatattacacgtacctcctcctgctcctcaagagtgtggtctattttgccatcatcacctgctgtctgcttagaagaacggctttctgctgcaatggagagaaatcataacagacggtggcacaaggaggccatcttttcctcatcggttattgtccctagaagcgtc

SEQ ID NO: 188910 - DNA, 50 bp, Homo sapiens
  Payload ID: 17298
  Gene Symbol: TRGJ1
  Gene Name: T cell receptor gamma joining 1
  ENST ID: ENST00000390337
  CDS Start-End: 1-50
gaattattataagaaactctttggcagtggaacaacacttgttgtcacag

SEQ ID NO: 188911 - DNA, 50 bp, Homo sapiens; identical to SEQ ID NO: 188910
  Payload ID: 17299
  Gene Symbol: TRGJ2
  Gene Name: T cell receptor gamma joining 2
  ENST ID: ENST00000390333
  CDS Start-End: 1-50

SEQ ID NO: 188912 - DNA, 61 bp, Homo sapiens
  Payload ID: 17300
  Gene Symbol: TRGJP
  Gene Name: T cell receptor gamma joining P
  ENST ID: ENST00000390338
  CDS Start-End: 1-61
gggcaagagttgggcaaaaaaatcaaggtatttggtcccggaacaaagcttatcattacag

SEQ ID NO: 188913 - DNA, 60 bp, Homo sapiens
  Payload ID: 17301
  Gene Symbol: TRGJP1
  Gene Name: T cell receptor gamma joining P1
  ENST ID: ENST00000390339
  CDS Start-End: 1-60
ataccactggttggttcaagatatttgctgaagggactaagctcatagtaacttcacctg

SEQ ID NO: 188914 - DNA, 60 bp, Homo sapiens
  Payload ID: 17302
  Gene Symbol: TRGJP2
  Gene Name: T cell receptor gamma joining P2
  ENST ID: ENST00000390334
  CDS Start-End: 1-60
atagtagtgattggatcaagacgtttgcaaaagggactaggctcatagtaacttcgcctg

SEQ ID NO: 188915 - DNA, 465 bp, Homo sapiens
  Payload ID: 17303
  Gene Symbol: TRGV1
  Gene Name: T cell receptor gamma variable 1 (non-functional)
  ENST ID: ENST00000390348
  CDS Start-End: 115-465
tactgtcttctgtgctagggatcacttccttgttgagtggggcctgagttttaagaggatcttctgctcctcttcatctggtccctttccttccaaggccccagagaggaaggcatgcggtgggccctagcggtgcttctagctttcctgtctcctgccagtcagatatcttccaacttggaagggagaacgaagtcagtcaccaggctgactgggtcatctgctgaaatcacctgtgatcttcctggagcaagtaccttatacatccactggtacctgcaccaggaggggaaggccccacagtgtcttctgtactatgaaccctactactccagggttgtgctggaatcaggaatcactccaggaaagtatgacactggaagcacaaggagcaattggaatttgagactgcaaaatctaattaaaaatgattctgggttctattactgtgccacctgggacagg

SEQ ID NO: 188916 - DNA, 512 bp, Homo sapiens
  Payload ID: 17304
  Gene Symbol: TRGV10
  Gene Name: T cell receptor gamma variable 10 (non-functional)
  ENST ID: ENST00000390341
  CDS Start-End: 160-512
actttcctgccttctccttgggtacaccgccccgaagacaggatgtcactgctggaagcatttgccttctcctcctgggctcctgagttgctgtccgaacatttcagtctagctgcgtgaccaaaatcattcttcaatgtttccctcttctactgtcagatgttcattggaaattctcctcttttacttacagttggacttggattatcaaaagtggagcagttccagctatccatttccacggaagtcaagaaaagtattgacataccttgcaagatatcgagcacaaggtttgaaacagatgtcattcactggtaccggcagaaaccaaatcaggctttggagcacctgatctatattgtctcaacaaaatccgcagctcgacgcagcatgggtaagacaagcaacaaagtggaggcaagaaagaattctcaaactctcacttcaatccttaccatcaagtccgtagagaaagaagacatggccgtttactactgtgctgcgtgggatta

SEQ ID NO: 188917 - DNA, 463 bp, Homo sapiens
  Payload ID: 17305
  Gene Symbol: TRGV11
  Gene Name: T cell receptor gamma variable 11 (non-functional)
  ENST ID: ENST00000390340
  CDS Start-End: 155-463
atgccactggtagtagctgttatcttcttctccctctgggtttgtgagttgccccctaatcatttcagtctacagaagagattgaagtcattctgtattattacctcttcacgtatcgttggcttatgggaatttctcttcacttgcaattgcacttgggcagttggaacaacctgaaatatctatttccagaccagcaaataagagtgcccacatatcttggaaggcatccatccaaggctttagcagtaaaatcatacactggtactggcagaaaccaaacaaaggcttagaatatttattacatgtcttcttgacaatctctgctcaagattgctcaggtgggaagactaagaaacttgaggtaagtaaaaatgctcacacttccacttccactttgaaaataaagttcttagagaaagaagatgaggtggtgtaccactgtgcctgctggattaggcac

SEQ ID NO: 188918 - DNA, 544 bp, Homo sapiens
  Payload ID: 17306
  Gene Symbol: TRGV2
  Gene Name: T cell receptor gamma variable 2
  ENST ID: ENST00000426402
  CDS Start-End: 191-544
ggaaggcttgggagtcctcttagacagatcctcagtcacttccctctgcttgtgtctcaggaagaccacctcctcctactgtcttctgtgctagggatcacttccttgttgagtggaacctgagttttaagaggatcttctgctcctcttcatctggtccctttccttccaaggccccagagaggaaggcatgcagtgggccctagcggtgcttctagctttcctgtctcctgccagtcagaaatcttccaacttggaagggagaacgaagtcagtcatcaggcagactgggtcatctgctgaaatcacttgtgatcttgctgaaggaagtaacggctacatccactggtacctacaccaggaggggaaggccccacagcgtcttcagtactatgactcctacaactccaaggttgtgttggaatcaggagtcagtccagggaagtattatacttacgcaagcacaaggaacaacttgagattgatactgcgaaatctaattgaaaatgactttggggtctattactgtgccacctgggacggg

SEQ ID NO: 188919 - DNA, 537 bp, Homo sapiens
  Payload ID: 17307
  Gene Symbol: TRGV3
  Gene Name: T cell receptor gamma variable 3
  ENST ID: ENST00000390346
  CDS Start-End: 184-537
cttgggagtcccctaagacacatcttcagtcacttctctctgcctgtgtctcaggaaaccagctcctcctactgtcttctgtgctagggatcacttccttgttgagtggggcctgagttttaagaggatcttctgctcctcttcatctggtccgtttccttccaaggcccccgagaggaaggcatgcggtgggccctactggtgcttctagctttcctgtctcctgccagtcagaaatcttccaacttggaagggagaacgaagtcagtcaccaggcagactgggtcatctgctgaaatcacttgcgatcttactgtaacaaataccttctacatccactggtacctacaccaggaggggaaggccccacagcgtcttctgtactatgacgtctccaccgcaagggatgtgttggaatcaggactcagtccaggaaagtattatactcatacacccaggaggtggagctggatattgagactgcaaaatctaattgaaaatgattctggggtctattactgtgccacctgggacagg

SEQ ID NO: 188920 - DNA, 688 bp, Homo sapiens
  Payload ID: 17308
  Gene Symbol: TRGV4
  Gene Name: T cell receptor gamma variable 4
  ENST ID: ENST00000390345
  CDS Start-End: 335-688
ggcctgagctctcctggcccctggctctcttctgcagagggcctgctctcagctgccacaagagggcgccggagaacggacctgagcaagagaggcaggagctcctctgcaggtcctcccaggcaccaatccttctgggagggaggaaggcttgggagtcctcttagacagatcctcagtcacttctctctgcttgtgtctcaggaagaccagctcctcctactgtcttctgtgctagggatcacttccttgttgagtggggcctgagttttaagaggatcttctgctcctcttcatctggtccctttccttccaaggcctcagagaggaaggcatgcagtgggccctagcggtgcttctagctttcctgtctcctgccagtcagaaatcttccaacttggaagggagaacgaagtcagtcatcaggcagactgggtcatctgctgaaatcacttgtgatcttgctgaaggaagtaccggctacatccactggtacctacaccaggaggggaaggccccacagcgtcttctgtactatgactcctacacctccagcgttgtgttggaatcaggaatcagcccagggaagtatgatacttacggaagcacaaggaagaacttgagaatgatactgcgaaatcttattgaaaatgactctggagtctattactgtgccacctgggatggg

SEQ ID NO: 188921 - DNA, 552 bp, Homo sapiens
  Payload ID: 17309
  Gene Symbol: TRGV5
  Gene Name: T cell receptor gamma variable 5
  ENST ID: ENST00000390344
  CDS Start-End: 199-552
ttctgggaggaaggcttgggagtcccctaagacacatcttcagtcacttctctctgcctgtgactcaggaagaccagctcctcctactgtcttctgtgctagggatcacttccttgttgagtggggccggagttttaagaggatcttctgctcctcctcatctggtccctttccttccaaggcccccgagaggaaggcatgcggtgggccctactggtgcttctagctttcctgtctcctgccagtcagaaatcttccaacttggaagggggaacgaagtcagtcacgaggccgactaggtcatctgctgaaatcacttgtgaccttactgtaataaatgccttctacatccactggtacctacaccaggaggggaaggccccacagcgtcttctgtactatgacgtctccaactcaaaggatgtgttggaatcaggactcagtccaggaaagtattatactcatacacccaggaggtggagctggatattgatactacgaaatctaattgaaaatgattctggggtctattactgtgccacctgggacagg

SEQ ID NO: 188922 - DNA, 2233 bp, Homo sapiens
  Payload ID: 17309
  Gene Symbol: TRGV5
  Gene Name: T cell receptor gamma variable 5
  ENST ID: ENST00000613175
  CDS Start-End: 188-544
aggcttgggagtcccctaagacacatcttcagtcacttctctctgcctgtgactcaggaagaccagctcctcctactgtcttctgtgctagggatcacttccttgttgagtggggccggagttttaagaggatcttctgctcctcctcatctggtccctttccttccaaggcccccgagaggaaggcatgcggtgggccctactggtgcttctagctttcctgtctcctgccagtcagaaatcttccaacttggaagggggaacgaagtcagtcacgaggccgactaggtcatctgctgaaatcacttgtgaccttactgtaataaatgccttctacatccactggtacctacaccaggaggggaaggccccacagcgtcttctgtactatgacgtctccaactcaaaggatgtgttggaatcaggactcagtccaggaaagtattatactcatacacccaggaggtggagctggatattgatactacgaaatctaattgaaaatgattctggggtctattactgtgccacctgggacaggcacagtgattcagacctgtcctacaccacactgaaaatctgccttgtggctgcctctggttcacaggatagagccgccccctctcatttcctgtcaccaaatttactgtattctgaacaagagaaagacagcttaactcctgatctccctcctaatatcacactgtcctggcagcagccgcaccctgttccccacccctcccccacaactttcctgaagatcaagctgccatctccaggcctcagccagtcagaaatcttccaacttggaagggagaatgaagtcagtcaccaggccgactgggtcatctgctgaaatcacttgtgaccttactgtaataaatgccgtctacatccactggtacctacagcaggaggggaagaccccacagcatcttctgcactatgatgtctccaactcaagggatgtgttggaatcaggtctcagtcttggaaagtattatactcatacaccgaggaggtggagctggaatttgagactgcaaaatctaattgaaaatgattctggggtctattactgtgccacctggggcaggcacagtgattcagatctgccctacaccacactgaacatctgccttgtggctgcctctggtacacaagatagagccgccccctctcatttcctgccaccaaatttactgtattctgaacaagagaaagacagcttaactcctgatctccctcctaatatcacactgtcctggcagcagctgcaccctgttccctacccctcccccacaactttcctgaagatcaagctgccatctccgggcctcagttaagcagcctggctgagagtaaggttctctcagctctcctaggacatgggggaggcccactcactctgcttcctatgacagacaggtacaactagggtccagctgcgaatctagatattttggacagcaaataggaaggttatttatactgaatcatttatccagtcatggtccagagatcacagctgagagtggtgcttattccttatgtctataacaatataagcaatagtataatgaccactaaaacactaggcctaggtatgcagttgaacattctctccctctgccctcccttttattctctctctcttttttcttacttctttgcttgtttttatttttctctccctccctaactccctccctccatccatcctttcctcccttcctcccttgtttccttccatccattctccttccttgttttcctccttccttccttgtttttctctctctttctttcctttttgggtacataatgagaatactttttccacaaaatcatttgaaataatttttctctatttgttcatgccaacatttatacagctagtttaactgttcagttttcatttttacattttggaaatttgttgtattactttgttttgtttcaaatctgttttgtatatataaaatatttacatggaactgaagtcaaaatcataaaaggtgatgcatttgaagattttagcttccattgtagatttcttgttcctcttttctccctgacactacaggtaacaatatttttgtcagttcacttgagctgtttcactctgtttgtcatagcagagtatgtattgtttctatttcaatgccatatttatattttcattctgatatttggtttttatacattttaataaatcttatattttcctgtg

SEQ ID NO: 188923 - DNA, 468 bp, Homo sapiens
  Payload ID: 17310
  Gene Symbol: TRGV8
  Gene Name: T cell receptor gamma variable 8
  ENST ID: ENST00000390343
  CDS Start-End: 115-468
ctactgtcttctgtgttagggatcacttccttgttgagtgggacctgagttttgagagggtcttctgctcctcttcgtctggtcccttacttccaagaccccagagaggaaggcatgctgttggctctagctctgcttctagctttcctgcctcctgccagtcagaaatcttccaacttggaagggagaacaaagtcagtcaccaggccaactgggtcatcagctgtaatcacttgtgatcttcctgtagaaaatgccgtctacacccactggtacctacaccaggaggggaaggccccacagcgtcttctgtactatgactcctacaactccagggttgtgttggaatcaggaatcagtcgagaaaagtatcatacttatgcaagcacagggaagagccttaaatttatactggaaaatctaattgaacgtgactctggggtctattactgtgccacctgggatagg

SEQ ID NO: 188924 - DNA, 1735 bp, Homo sapiens
  Payload ID: 17311
  Gene Symbol: TRGV9
  Gene Name: T cell receptor gamma variable 9
  ENST ID: ENST00000444775
  CDS Start-End: 1370-1735
aaaaaaattcaagtcaatccatagaagtgggtcgtggaattccaggcagaaagtgactaaatgaagatggaaggacagggagggggtggccacatcacagagaacctcttatcctaagaactctggacttcatcttcagaggcaaggtagagagagcaaggactttagagcaggaaaaggaccaggtcagtctagtggccatggggaaggtgggtgggaggggccgagatgggatgtatggaggtgcgtgaggtggaggcagtggtgagccaggaaatgtttaggacgtagaatcctcaggaattagagtgcggtgaattagaggggagaattgaggctgatgctcaagctcctggcttgggcaatgtgggtagttatgtcatacagggaactcggaagaagatatggtttgggggaagggaatgagttcactctggctatgagcagactttgtttgagatcccatgtcagacgtacttgaaaatgtccaagagttagctggatatgggtacagacagctttcgatttaactgaggtccgacttaagatttttttttactttatgatggtgcaaaagtgacacgcatttggtagaaaacataatttgacctttgctgtttccccaggacagtgatataaggttatgatactctcttgcgatgctgggcagtggcagtgagctgcagctcccagtgggtaaattaagcatggaaatctggaacacagcagcttttaagggatgcactggggagagcagtttgtaaaaataccttgggacggattaaatgtcttggcttagagaaagaacaacagacaataggaaactgtcattgaggagaagccgggattcaggagatgtacattattcaggtagctgagggaggggacaggaacctgaatcttcaacagaagcaaacaaactgggatggagggcccagcctcatgaaggtgaccagaaggacccggtgctgcaggctgtgtgggtagctgagcagagctaagcggcttgacggaccaacatctctccagctggttgaagacaagctctcagaagacaatgctgcatgtcacagccccagcaaccaacaacaccagcctgacaacttgctggggtggccgccttgtggtctgaggtggccgtctaaactatgtggtctgatctcaggctgcagaccttgcaggactgtcttcacacagactggaagtgctaacaggtggtgaggacaccgctttacaacgatgcagggggccccatgtcaccctcacccatgggaagtttgacttggtggactcagccaagccacagaggtctaacgcttctctgcggtgatttcaggctgccctggcagaaagcacagtgcctgcagacatgctgtcactgctccacacatcaacgctggcagtccttggggctctgtgtgtatatggtgcaggtcacctagagcaacctcaaatttccagtactaaaacgctgtcaaaaacagcccgcctggaatgtgtggtgtctggaataacaatttctgcaacatctgtatattggtatcgagagagacctggtgaagtcatacagttcctggtgtccatttcatatgacggcactgtcagaaaggaatccggcattccgtcaggcaaatttgaggtggataggatacctgaaacgtctacatccactctcaccattcacaatgtagagaaacaggacatagctacctactactgtgccttgtgggaggtg

SEQ ID NO: 188925 - DNA, 897 bp, Homo sapiens
  Payload ID: 17312
  Gene Symbol: TARM1
  Gene Name: T cell-interacting, activating receptor on myeloid cells 1
  Uniprot ID: B6A8C7
  ENST ID: ENST00000432826
  CDS Start-End: 26-841
actctgggagggctaaggagccatcatgatccctaagctgctttccctcctctgtttcagactgtgcgtgggccaaggagacacaaggggagatgggtcactgcccaagccgtccctcagtgcctggcccagctcggtggtccctgccaacagcaatgtgacgctgcgatgttggactcctgccagaggtgtgagctttgttctcaggaagggaggaattattctggagtccccgaagccccttgattctacagagggcgcggccgaatttcacctcaataatctaaaagtcagaaatgctggagagtacacctgtgaatactacagaaaagcatccccccacatcctttcacagcacagtgacgtccttctactgttggtgacaggacatttatctaaacctttcctccgaacctaccaaaggggtacagtgaccgcaggtggaagggtgactctgcagtgccagaagcgagaccaattgtttgtgcctatcatgttcgctctactgaaggcagggacgccatcacccatccagctgcagagtccagcggggaaggagatagacttctctctggtggacgtgacagccggcgatgctgggaactacagctgcatgtactaccagacaaagtctcccttctgggcctcagaacccagtgatcagcttgagatattggtgacagttcccccaggtaccacatcgagcaactactccctgggtaacttcgtacgactgggtctggctgccgtaattgtggttatcatgggagctttcctggtggaggcctggtacagccggaatgtgtctccaggtgaatcagaggccttcaaaccagagtgactccatcttgaaccggggctgggtaaactgaggctgcaacctgctggactgcattc

SEQ ID NO: 188926 - DNA, 1234 bp, Homo sapiens
  Payload ID: 17312
  Gene Symbol: TARM1
  Gene Name: T cell-interacting, activating receptor on myeloid cells 1
  Uniprot ID: B6A8C7
  ENST ID: ENST00000620140
  CDS Start-End: 287-1126
actaataatacaaaactcagccgggcgtcctggcgcatgcctgtgatcccagctatttgggaggctgaggcaggagaatcacttgaacccgggaggcggaggttgcagtgagccgagattgcgtcactctactccagcctgggcgacagagcgcaactctgtctctggaatgaatgaaagaaagaaagaatgaatgaaagaaagaaagaatgaatgaaagaaagaaagaaagaaaaagaaagaaagagcgagactctgtctctggaatgaatgaaagaaagaatgaatgaaagaaagaaaaaagaaagaaagaaaggaaagaaaaagaaagaaagaaagaaatggactgtgcgtgggccaaggagacacaaggggagatgggtcactgcccaagccgtccctcagtgcctggcccagctcggtggtccctgccaacagcaatgtgacgctgcgatgttggactcctgccagaggtgtgagctttgttctcaggaagggaggaattattctggagtccccgaagccccttgattctacagagggcgcggccgaatttcacctcaataatctaaaagtcagaaatgctggagagtacacctgtgaatactacagaaaagcatccccccacatcctttcacagcgcagtgacgtccttctactgttggtgacaggacatttatctaaacctttcctccgaacctaccaaaggggtacagtgaccgcaggtggaagggtgactctgcagtgccagaagcgagaccaattgtttgtgcctatcatgttcgctctactgaaggcagggacgccatcacccatccagctgcagagtccagcggggaaggagatagacttctctctggtggacgtgacagccggcgatgctgggaactacagctgcatgtactaccagacaaagtctcccttctgggcctcagaacccagtgatcagcttgagatattggtgacagttcccccaggtaccacatcgagcaactactccctgggtaacttcgtacgactgggtctggctgccgtaattgtggttatcatgggagctttcctggtggaggcctggtacagccggaatgtgtctccaggtgaatcagaggccttcaaaccagagtgactccatcttgaaccggggctgggtaaactgaggctgcaacctgctggactgcattcccagggggttgaggctttctaagtcacaggatgagacaggtcacaacataca

SEQ ID NO: 188927 - DNA, 897 bp, Homo sapiens
  Payload ID: 17312
  Gene Symbol: TARM1
  Gene Name: T cell-interacting, activating receptor on myeloid cells 1
  ENST ID: ENST00000611419
  CDS Start-End: 26-841
actctgggagggctaaggagccatcatgatccctaagctgctttccctcctctgtttcagactgtgcgtgggccaaggagacacaaggggagatgggtcactgcccaagccgtccctcagtgcctggcccagctcggtggtccctgccaacagcaatgtgacgctgcgatgttggactcctgccagaggtgtgagctttgttctcaggaagggaggaattattctggagtccccgaagccccttgattctacagagggcgcggccgaatttcacctcaataatctaaaagtcagaaatgctggagagtacacctgtgaatactacagaaaagcatccccccacatcctttcacagcgcagtgacgtccttctactgttggtgacaggacatttatctaaacctttcctccgaacctaccaaaggggtacagtgaccgcaggtggaagggtgactctgcagtgccagaagcgagaccaattgtttgtgcctatcatgttcgctctactgaaggcagggacgccatcacccatccagctgcagagtccagcggggaaggagatagacttctctctggtggacgtgacagccggcgatgctgggaactacagctgcatgtactaccagacaaagtctcccttctgggcctcagaacccagtgatcagcttgagatattggtgacagttcccccaggtaccacatcgagcaactactccctgggtaacttcgtacgactgggtctggctgccgtaattgtggttatcatgggagctttcctggtggaggcctggtacagccggaatgtgtctccaggtgaatcagaggccttcaaaccagagtgactccatcttgaaccggggctgggtaaactgaggctgcaacctgctggactgcattc

SEQ ID NO: 188928 - DNA, 897 bp, Homo sapiens; identical to SEQ ID NO: 188927
  Payload ID: 17312
  Gene Symbol: TARM1
  Gene Name: T cell-interacting, activating receptor on myeloid cells 1
  ENST ID: ENST00000622245
  CDS Start-End: 26-841

SEQ ID NO: 188929 - DNA, 897 bp, Homo sapiens; identical to SEQ ID NO: 188927
  Payload ID: 17312
  Gene Symbol: TARM1
  Gene Name: T cell-interacting, activating receptor on myeloid cells 1
  ENST ID: ENST00000619320
  CDS Start-End: 26-841

SEQ ID NO: 188930 - DNA, 897 bp, Homo sapiens; identical to SEQ ID NO: 188927
  Payload ID: 17312
  Gene Symbol: TARM1
  Gene Name: T cell-interacting, activating receptor on myeloid cells 1
  Uniprot ID: B6A8C7
  ENST ID: ENST00000615726
  CDS Start-End: 26-841

SEQ ID NO: 188931 - DNA, 897 bp, Homo sapiens; identical to SEQ ID NO: 188927
  Payload ID: 17312
  Gene Symbol: TARM1
  Gene Name: T cell-interacting, activating receptor on myeloid cells 1
  ENST ID: ENST00000620398
  CDS Start-End: 26-841

SEQ ID NO: 188932 - DNA, 897 bp, Homo sapiens; identical to SEQ ID NO: 188927
  Payload ID: 17312
  Gene Symbol: TARM1
  Gene Name: T cell-interacting, activating receptor on myeloid cells 1
  ENST ID: ENST00000611088
  CDS Start-End: 26-841

SEQ ID NO: 188933 - DNA, 897 bp, Homo sapiens; identical to SEQ ID NO: 188927
  Payload ID: 17312
  Gene Symbol: TARM1
  Gene Name: T cell-interacting, activating receptor on myeloid cells 1
  Uniprot ID: B6A8C7
  ENST ID: ENST00000614463
  CDS Start-End: 26-841

SEQ ID NO: 188934 - DNA, 897 bp, Homo sapiens; identical to SEQ ID NO: 188927
  Payload ID: 17312
  Gene Symbol: TARM1
  Gene Name: T cell-interacting, activating receptor on myeloid cells 1
  Uniprot ID: B6A8C7
  ENST ID: ENST00000620707
  CDS Start-End: 26-841

SEQ ID NO: 188935 - DNA, 897 bp, Homo sapiens; identical to SEQ ID NO: 188927
  Payload ID: 17312
  Gene Symbol: TARM1
  Gene Name: T cell-interacting, activating receptor on myeloid cells 1
  ENST ID: ENST00000612678
  CDS Start-End: 26-841

SEQ ID NO: 188936 - DNA, 1218 bp, Homo sapiens
  Payload ID: 17312
  Gene Symbol: TARM1
  Gene Name: T cell-interacting, activating receptor on myeloid cells 1
  ENST ID: ENST00000616041
  CDS Start-End: 271-1110
actaataatacaaaactcagccgggcgtcctggcgcatgcctgtgatcccagctatttgggaggctgaggcaggagaatcacttgaacccgggaggcggaggttgcagtgagccgagattgcgtcactctactccagcctgggcgacagagcgcaactctgtctctggaatgaatgaaagaaagaaagaatgaatgaaagaaagaaagaaagaaagaaaaagaaagaaagagcgagactctgtctctggaatgaatgaaagaaagaatgaatgaaagaaagaaaaaagaaagaaagaaaggaaagaaaaagaaagaaagaaagaaatggactgtgcgtgggccaaggagacacaaggggagatgggtcactgcccaagccgtccctcagtgcctggcccagctcggtggtccctgccaacagcaatgtgacgctgcgatgttggactcctgccagaggtgtgagctttgttctcaggaagggaggaattattctggagtccccgaagccccttgattctacagagggcgcggccgaatttcacctcaataatctaaaagtcagaaatgctggagagtacacctgtgaatactacagaaaagcatccccccacatcctttcacagcacagtgacgtccttctactgttggtgacaggacatttatctaaacctttcctccgaacctaccaaaggggtacagtgaccgcaggtggaagggtgactctgcagtgccagaagcgagaccaattgtttgtgcctatcatgttcgctctactgaaggcagggacgccatcacccatccagctgcagagtccagcggggaaggagatagacttctctctggtggacgtgacagccggcgatgctgggaactacagctgcatgtactaccagacaaagtctcccttctgggcctcagaacccagtgatcagcttgagatattggtgacagttcccccaggtaccacatcgagcaactactccctgggtaacttcgtacgactgggtctggctgccgtaattgtggttatcatgggagctttcctggtggaggcctggtacagccggaatgtgtctccaggtgaatcagaggccttcaaaccagagtgactccatcttgaaccggggctgggtaaactgaggctgcaacctgctggactgcattcccagggggttgaggctttctaagtcacaggatgagacaggtcacaacataca

SEQ ID NO: 188937 - DNA, 1120 bp, Homo sapiens
  Payload ID: 17313
  Gene Symbol: TAC3
  Gene Name: tachykinin 3
  Uniprot ID: Q9UHF0
  ENST ID: ENST00000300108
  CDS Start-End: 140-505
agatcccctccactcggtttctctctttgcaggagcaccggcagcaccagtgtgtgaggggagcaggcagcggtcctagccagttccttgatcctgccagaccacccagcccccggcacagagctgctccacaggcaccatgaggatcatgctgctattcacagccatcctggccttcagcctagctcagagctttggggctgtctgtaaggagccacaggaggaggtggttcctggcgggggccgcagcaagagggatccagatctctaccagctgctccagagactcttcaaaagccactcatctctggagggattgctcaaagccctgagccaggctagcacagatcctaaggaatcaacatctcccgagaaacgtgacatgcatgacttctttgtgggacttatgggcaagaggagcgtccagccagactctcctacggatgtgaatcaagagaacgtccccagctttggcatcctcaagtatcccccgagagcagaatagggtattaaagctcatagatttgccctgaaatacactgccaatgcccagcacactgtcggccaaacacaaagacacttagaggcacgtgtgtttgtacacatcccccgtctttcatctctttcctctggatcatggacggcagctgactattgagcaggactctttcagagggacccataattgcagctttcataatcttaccattgagggagcattcccaacctgttaggtgtcaggcagaataggacataaggtttctgggagctggcatttaaagattagatgagatggatcaacacagatcattgtgtcatctgatttcattcatgtgaaacttactccacttccggactcctggactgcattaggaagacctctttccctgtcccaatccccaggtgcgcacgctcctgttaccctttctcttccctgttcttgtaacattcttgtgctttgactccttctccatcttttctacctgaccctggtgtggaaactgcatagtgaatatccccaaccccaatgggcattgactgtagaataccctagagttcctgtagtgtcctacattaaaaatataatgtctctctctattcctcaacaataaaggatttt

SEQ ID NO: 188938 - DNA, 930 bp, Homo sapiens
  Payload ID: 17313
  Gene Symbol: TAC3
  Gene Name: tachykinin 3
  Uniprot ID: Q9UHF0
  ENST ID: ENST00000357616
  CDS Start-End: 158-565
agtgactgcagccttcctagatcccctccactcggtttctctctttgcaggagcaccggcagcaccagtgtgtgaggggagcaggcagcggtcctagccagttccttgatcctgccagaccacccagcccccggcacagagctgctccacaggcaccatgaggatcatgctgctattcacagccatcctggccttcagcctagctcagagctttggggctgtctgtaaggagccacaggaggaggtggttcctggcgggggccgcagcaagagggatccagatctctaccagctgctccagagactcttcaaaagccactcatctctggagggattgctcaaagccctgagccaggctagcacagatcctaaggaatcaacatctcccgagaaacgtgacatgcatgacttctttgtgggacttatgggcaagaggagcgtccagccagagggaaagacaggacctttcttaccttcagtgagggttcctcggccccttcatcccaatcagcttggatccacaggaaagtcttccctgggaacagaggagcagagacctttataagactctcctacggatgtgaatcaagagaacgtccccagctttggcatcctcaagtatcccccgagagcagaataggtactccacttccggactcctggactgcattaggaagacctctttccctgtcccaatccccaggtgcgcacgctcctgttaccctttctcttccctgttcttgtaacattcttgtgctttgactccttctccatcttttctacctgaccctggtgtggaaactgcatagtgaatatccccaaccccaatgggcattgactgtagaataccctagagttcctgtagtgtcctacattaaaaatataatgtctctctctattcctcaacaataaaggatttttgcatatgaa

SEQ ID NO: 188939 - DNA, 1066 bp, Homo sapiens
  Payload ID: 17313
  Gene Symbol: TAC3
  Gene Name: tachykinin 3
  Uniprot ID: Q9UHF0
  ENST ID: ENST00000379411
  CDS Start-End: 140-451
agatcccctccactcggtttctctctttgcaggagcaccggcagcaccagtgtgtgaggggagcaggcagcggtcctagccagttccttgatcctgccagaccacccagcccccggcacagagctgctccacaggcaccatgaggatcatgctgctattcacagccatcctggccttcagcctagctcagagctttggggctgtctgtaaggagccacaggaggaggtggttcctggcgggggccgcagcaagagggatccagatctctaccagctgctccagagactcttcaaaagccactcatctctggagggattgctcaaagccctgagccaggctagcacagatcctaaggaatcaacatctcccgagaaacactctcctacggatgtgaatcaagagaacgtccccagctttggcatcctcaagtatcccccgagagcagaatagggtattaaagctcatagatttgccctgaaatacactgccaatgcccagcacactgtcggccaaacacaaagacacttagaggcacgtgtgtttgtacacatcccccgtctttcatctctttcctctggatcatggacggcagctgactattgagcaggactctttcagagggacccataattgcagctttcataatcttaccattgagggagcattcccaacctgttaggtgtcaggcagaataggacataaggtttctgggagctggcatttaaagattagatgagatggatcaacacagatcattgtgtcatctgatttcattcatgtgaaacttactccacttccggactcctggactgcattaggaagacctctttccctgtcccaatccccaggtgcgcacgctcctgttaccctttctcttccctgttcttgtaacattcttgtgctttgactccttctccatcttttctacctgaccctggtgtggaaactgcatagtgaatatccccaaccccaatgggcattgactgtagaataccctagagttcctgtagtgtcctacattaaaaatataatgtctctctctattcctcaacaataaaggatttt

SEQ ID NO: 188940 - DNA, 1237 bp, Homo sapiens
  Payload ID: 17313
  Gene Symbol: TAC3
  Gene Name: tachykinin 3
  Uniprot ID: Q9UHF0
  ENST ID: ENST00000393867
  CDS Start-End: 140-547
agatcccctccactcggtttctctctttgcaggagcaccggcagcaccagtgtgtgaggggagcaggcagcggtcctagccagttccttgatcctgccagaccacccagcccccggcacagagctgctccacaggcaccatgaggatcatgctgctattcacagccatcctggccttcagcctagctcagagctttggggctgtctgtaaggagccacaggaggaggtggttcctggcgggggccgcagcaagagggatccagatctctaccagctgctccagagactcttcaaaagccactcatctctggagggattgctcaaagccctgagccaggctagcacagatcctaaggaatcaacatctcccgagaaacgtgacatgcatgacttctttgtgggacttatgggcaagaggagcgtccagccagagggaaagacaggacctttcttaccttcagtgagggttcctcggccccttcatcccaatcagcttggatccacaggaaagtcttccctgggaacagaggagcagagacctttataagactctcctacggatgtgaatcaagagaacgtccccagctttggcatcctcaagtatcccccgagagcagaatagggtattaaagctcatagatttgccctgaaatacactgccaatgcccagcacactgtcggccaaacacaaagacacttagaggcacgtgtgtttgtacacatcccccgtctttcatctctttcctctggatcatggacggcagctgactattgagcaggactctttcagagggacccataattgcagctttcataatcttaccattgagggagcattcccaacctgttaggtgtcaggcagaataggacataaggtttctgggagctggcatttaaagattagatgagatggatcaacacagatcattgtgtcatctgatttcattcatgtgaaacttactccacttccggactcctggactgcattaggaagacctctttccctgtcccaatccccaggtgcgcacgctcctgttaccctttctcttccctgttcttgtaacattcttgtgctttgactccttctccatcttttctacctgaccctggtgtggaaactgcatagtgaatatccccaaccccaatgggcattgactgtagaataccctagagttcctgtagtgtcctacattaaaaatataatgtctctctctattcctcaacaataaaggatttt

SEQ ID NO: 188941 - DNA, 588 bp, Homo sapiens
  Payload ID: 17313
  Gene Symbol: TAC3
  Gene Name: tachykinin 3
  Uniprot ID: Q9UHF0
  ENST ID: ENST00000415231
  CDS Start-End: 222-587
aggttctcagtgaggttcaaggagaacagtgtggctgtcaaggtcgtccagggccctgcaggtggtgacaacagcaagctacgctacaaaaaaaaggggagtcattgcttggaggagcaccggcagcaccagtgtgtgaggggagcaggcagcggtcctagccagttccttgatcctgccagaccacccagcccccggcacagagctgctccacaggcaccatgaggatcatgctgctattcacagccatcctggccttcagcctagctcagagctttggggctgtctgtaaggagccacaggaggaggtggttcctggcgggggccgcagcaagagggatccagatctctaccagctgctccagagactcttcaaaagccactcatctctggagggattgctcaaagccctgagccaggctagcacagatcctaaggaatcaacatctcccgagaaacgtgacatgcatgacttctttgtgggacttatgggcaagaggagcgtccagccagactctcctacggatgtgaatcaagagaacgtccccagctttggcatcctcaagtatcccccgagagcagaatagg

SEQ ID NO: 188942 - DNA, 816 bp, Homo sapiens
  Payload ID: 17313
  Gene Symbol: TAC3
  Gene Name: tachykinin 3
  Uniprot ID: Q9UHF0
  ENST ID: ENST00000458521
  CDS Start-End: 161-526
ctgagtgactgcagccttcctagatcccctccactcggtttctctctttgcaggagcaccggcagcaccagtgtgtgaggggagcaggcagcggtcctagccagttccttgatcctgccagaccacccagcccccggcacagagctgctccacaggcaccatgaggatcatgctgctattcacagccatcctggccttcagcctagctcagagctttggggctgtctgtaaggagccacaggaggaggtggttcctggcgggggccgcagcaagagggatccagatctctaccagctgctccagagactcttcaaaagccactcatctctggagggattgctcaaagccctgagccaggctagcacagatcctaaggaatcaacatctcccgagaaacgtgacatgcatgacttctttgtgggacttatgggcaagaggagcgtccagccagactctcctacggatgtgaatcaagagaacgtccccagctttggcatcctcaagtatcccccgagagcagaataggtactccacttccggactcctggactgcattaggaagacctctttccctgtcccaatccccaggtgcgcacgctcctgttaccctttctcttccctgttcttgtaacattcttgtgctttgactccttctccatcttttctacctgaccctggtgtggaaactgcatagtgaatatccccaaccccaatgggcattgactgtagaataccctagagttcctgtagtgtcctacattaaaaatataatgtctctctctattcctcaacaataaaggatttttgcatatgaa

SEQ ID NO: 188943 - DNA, 1060 bp, Homo sapiens
  Payload ID: 17313
  Gene Symbol: TAC3
  Gene Name: tachykinin 3
  Uniprot ID: Q9UHF0
  ENST ID: ENST00000438756
  CDS Start-End: 140-547
agatcccctccactcggtttctctctttgcaggagcaccggcagcaccagtgtgtgaggggagcaggcagcggtcctagccagttccttgatcctgccagaccacccagcccccggcacagagctgctccacaggcaccatgaggatcatgctgctattcacagccatcctggccttcagcctagctcagagctttggggctgtctgtaaggagccacaggaggaggtggttcctggcgggggccgcagcaagagggatccagatctctaccagctgctccagagactcttcaaaagccactcatctctggagggattgctcaaagccctgagccaggctagcacagatcctaaggaatcaacatctcccgagaaacgtgacatgcatgacttctttgtgggacttatgggcaagaggagcgtccagccagagggaaagacaggacctttcttaccttcagtgagggttcctcggccccttcatcccaatcagcttggatccacaggaaagtcttccctgggaacagaggagcagagacctttataagactctcctacggatgtgaatcaagagaacgtccccagctttggcatcctcaagtatcccccgagagcagaatagggtattaaagctcatagatttgccctgaaatacactgccaatgcccagcacactgtcggccaaacacaaagacacttagaggcacgtgtgtttgtacacatcccccgtctttcatctctttcctctggatcatggacggcagctgactattgagcaggatactccacttccggactcctggactgcattaggaagacctctttccctgtcccaatccccaggtgcgcacgctcctgttaccctttctcttccctgttcttgtaacattcttgtgctttgactccttctccatcttttctacctgaccctggtgtggaaactgcatagtgaatatccccaaccccaatgggcattgactgtagaataccctagagttcctgtagtgtcctacattaaaaatataatgtctctctctattcctcaacaataaaggatttt

SEQ ID NO: 188944 - DNA, 731 bp, Homo sapiens
  Payload ID: 17313
  Gene Symbol: TAC3
  Gene Name: tachykinin 3
  Uniprot ID: Q9UHF0
  ENST ID: ENST00000441881
  CDS Start-End: 140-451
agatcccctccactcggtttctctctttgcaggagcaccggcagcaccagtgtgtgaggggagcaggcagcggtcctagccagttccttgatcctgccagaccacccagcccccggcacagagctgctccacaggcaccatgaggatcatgctgctattcacagccatcctggccttcagcctagctcagagctttggggctgtctgtaaggagccacaggaggaggtggttcctggcgggggccgcagcaagagggatccagatctctaccagctgctccagagactcttcaaaagccactcatctctggagggattgctcaaagccctgagccaggctagcacagatcctaaggaatcaacatctcccgagaaacactctcctacggatgtgaatcaagagaacgtccccagctttggcatcctcaagtatcccccgagagcagaataggtactccacttccggactcctggactgcattaggaagacctctttccctgtcccaatccccaggtgcgcacgctcctgttaccctttctcttccctgttcttgtaacattcttgtgctttgactccttctccatcttttctacctgaccctggtgtggaaactgcatagtgaatatccccaaccccaatgggcattgactgtagaataccctagagttcctgtagtgtcctacattaaaaatataatgtctctctctattcctcaacaataaaggatttt

SEQ ID NO: 188945 - DNA, 889 bp, Homo sapiens
  Payload ID: 17313
  Gene Symbol: TAC3
  Gene Name: tachykinin 3
  Uniprot ID: Q9UHF0
  ENST ID: ENST00000423597
  CDS Start-End: 140-451
agatcccctccactcggtttctctctttgcaggagcaccggcagcaccagtgtgtgaggggagcaggcagcggtcctagccagttccttgatcctgccagaccacccagcccccggcacagagctgctccacaggcaccatgaggatcatgctgctattcacagccatcctggccttcagcctagctcagagctttggggctgtctgtaaggagccacaggaggaggtggttcctggcgggggccgcagcaagagggatccagatctctaccagctgctccagagactcttcaaaagccactcatctctggagggattgctcaaagccctgagccaggctagcacagatcctaaggaatcaacatctcccgagaaacactctcctacggatgtgaatcaagagaacgtccccagctttggcatcctcaagtatcccccgagagcagaatagggtattaaagctcatagatttgccctgaaatacactgccaatgcccagcacactgtcggccaaacacaaagacacttagaggcacgtgtgtttgtacacatcccccgtctttcatctctttcctctggatcatggacggcagctgactattgagcaggatactccacttccggactcctggactgcattaggaagacctctttccctgtcccaatccccaggtgcgcacgctcctgttaccctttctcttccctgttcttgtaacattcttgtgctttgactccttctccatcttttctacctgaccctggtgtggaaactgcatagtgaatatccccaaccccaatgggcattgactgtagaataccctagagttcctgtagtgtcctacattaaaaatataatgtctctctctattcctcaacaataaaggatttt

SEQ ID NO: 188946 - DNA, 1120 bp, Homo sapiens; identical to SEQ ID NO: 188937
  Payload ID: 17313
  Gene Symbol: TAC3
  Gene Name: tachykinin 3
  Uniprot ID: Q9UHF0
  ENST ID: ENST00000615887
  CDS Start-End: 140-505

SEQ ID NO: 188947 - DNA, 597 bp, Homo sapiens
  Payload ID: 17314
  Gene Symbol: TAC4
  Gene Name: tachykinin 4 (hemokinin)
  Uniprot ID: Q86UU9
  ENST ID: ENST00000326219
  CDS Start-End: 1-264
atgctgccttgcctcgccctgcttctcctgatggagctgtccgtgtgcactgtggcaggtgatggtggagaggaacagacactcagcactgaagcagagacctgggaaggcgctggccccagcattcagctccagctgcaggaggtgaagacgggcaaggcaagccagttctttgggctgatggggaagcgagtgggaggaagacctctgatccagccaaggagaaaaaaaggcagagaggatgaggcccaaggttcagagtaaaagcccccaccacagacttcccagaggacacggtgccgcttcttcctacctggatgtcacagctgacaagccggcaggccaactctcttctctgtgtctcctgtcctcatcgctggcacttcacacaaggcccacactgaacccactgggcttcttcctggactctcagtgtcaagcagcagtcctgcataaatgcacagcttcgccgtagcaagctgcactgactctgccctccctcacactcagagttggcatctcactgcacagcagtgaggagactcgcacactctgtatcctgtgcctagcacacagtaggcactcaataaatgagtg

SEQ ID NO: 188948 - DNA, 675 bp, Homo sapiens
  Payload ID: 17314
  Gene Symbol: TAC4
  Gene Name: tachykinin 4 (hemokinin)
  Uniprot ID: Q86UU9
  ENST ID: ENST00000334568
  CDS Start-End: 1-342
atgctgccttgcctcgccctgcttctcctgatggagctgtccgtgtgcactgtggcaggtgatggtggagaggaacagacactcagcactgaagcagagacctgggtaattgtggccttggaggaaggcgctggccccagcattcagctccagctgcaggaggtgaagacgggcaaggcaagccagttctttgggctgatggggaagcgagtgggaggaagacctctgatccagccaaggagaaaaaaagcatatcagctggaacacacgttccagggcctcctgggcaagagaagcctgttcacagaaggcagagaggatgaggcccaaggttcagagtaaaagcccccaccacagacttcccagaggacacggtgccgcttcttcctacctggatgtcacagctgacaagccggcaggccaactctcttctctgtgtctcctgtcctcatcgctggcacttcacacaaggcccacactgaacccactgggcttcttcctggactctcagtgtcaagcagcagtcctgcataaatgcacagcttcgccgtagcaagctgcactgactctgccctccctcacactcagagttggcatctcactgcacagcagtgaggagactcgcacactctgtatcctgtgcctagcacacagtaggcactcaataaatgagtg

SEQ ID NO: 188949 - DNA, 564 bp, Homo sapiens
  Payload ID: 17314
  Gene Symbol: TAC4
  Gene Name: tachykinin 4 (hemokinin)
  Uniprot ID: Q86UU9
  ENST ID: ENST00000352793
  CDS Start-End: 1-231
atgctgccttgcctcgccctgcttctcctgatggagctgtccgtgtgcactgtggcaggtgatggtggagaggaacagacactcagcactgaagcagagacctgggaaggcgctggccccagcattcagctccagctgcaggaggtgaagacgggcaaggcaagccagttctttgggctgatggggaagcgagtgggaggcagagaggatgaggcccaaggttcagagtaaaagcccccaccacagacttcccagaggacacggtgccgcttcttcctacctggatgtcacagctgacaagccggcaggccaactctcttctctgtgtctcctgtcctcatcgctggcacttcacacaaggcccacactgaacccactgggcttcttcctggactctcagtgtcaagcagcagtcctgcataaatgcacagcttcgccgtagcaagctgcactgactctgccctccctcacactcagagttggcatctcactgcacagcagtgaggagactcgcacactctgtatcctgtgcctagcacacagtaggcactcaataaatgagtg

SEQ ID NO: 188950 - DNA, 624 bp, Homo sapiens
  Payload ID: 17314
  Gene Symbol: TAC4
  Gene Name: tachykinin 4 (hemokinin)
  Uniprot ID: Q86UU9
  ENST ID: ENST00000398154
  CDS Start-End: 1-291
atgctgccttgcctcgccctgcttctcctgatggagctgtccgtgtgcactgtggcaggtgatggtggagaggaacagacactcagcactgaagcagagacctgggaaggcgctggccccagcattcagctccagctgcaggaggtgaagacgggcaaggcaagccagttctttgggctgatggggaagcgagtgggagcatatcagctggaacacacgttccagggcctcctgggcaagagaagcctgttcacagaaggcagagaggatgaggcccaaggttcagagtaaaagcccccaccacagacttcccagaggacacggtgccgcttcttcctacctggatgtcacagctgacaagccggcaggccaactctcttctctgtgtctcctgtcctcatcgctggcacttcacacaaggcccacactgaacccactgggcttcttcctggactctcagtgtcaagcagcagtcctgcataaatgcacagcttcgccgtagcaagctgcactgactctgccctccctcacactcagagttggcatctcactgcacagcagtgaggagactcgcacactctgtatcctgtgcctagcacacagtaggcactcaataaatgagtg

SEQ ID NO: 188951 - DNA, 657 bp, Homo sapiens
  Payload ID: 17314
  Gene Symbol: TAC4
  Gene Name: tachykinin 4 (hemokinin)
  Uniprot ID: Q86UU9
  ENST ID: ENST00000436235
  CDS Start-End: 1-324
atgctgccttgcctcgccctgcttctcctgatggagctgtccgtgtgcactgtggcaggtgatggtggagaggaacagacactcagcactgaagcagagacctgggaaggcgctggccccagcattcagctccagctgcaggaggtgaagacgggcaaggcaagccagttctttgggctgatggggaagcgagtgggaggaagacctctgatccagccaaggagaaaaaaagcatatcagctggaacacacgttccagggcctcctgggcaagagaagcctgttcacagaaggcagagaggatgaggcccaaggttcagagtaaaagcccccaccacagacttcccagaggacacggtgccgcttcttcctacctggatgtcacagctgacaagccggcaggccaactctcttctctgtgtctcctgtcctcatcgctggcacttcacacaaggcccacactgaacccactgggcttcttcctggactctcagtgtcaagcagcagtcctgcataaatgcacagcttcgccgtagcaagctgcactgactctgccctccctcacactcagagttggcatctcactgcacagcagtgaggagactcgcacactctgtatcctgtgcctagcacacagtaggcactcaataaatgagtg

SEQ ID NO: 188952 - DNA, 455 bp, Homo sapiens
  Payload ID: 17314
  Gene Symbol: TAC4
  Gene Name: tachykinin 4 (hemokinin)
  ENST ID: ENST00000503603
  CDS Start-End: 1-162
atgctgccttgcctcgccctgcttctcctgatggagctgtccgtgtgcactgtggcaggtgatggtggagaggaacagacactcagcactgaagcagagacctgggtaattgtggccttggaggtacttttggggagaggctctgacgagggcaggggataatcggcagtgcagaggcagaagatcccctgcatggctgctgggagagcaggcagtctgcaaggcaagttgtctgactctctaccatgggtagattcaaggctatgagccctggcctggcagacctccgaagtgtgtgtgtgtgtgtgtgtgtgtgtgtgtgtgtctgtgtgtgtgtgtgtgtgtgtaagaaatacttatttaacacacggtatatctctggcactgtctgaaatgctttataaatattaactcaatcctcccatcaacctcatggggaagcgagtgggaggtga

SEQ ID NO: 188953 - DNA, 4959 bp, Homo sapiens
  Payload ID: 17315
  Gene Symbol: TACR1
  Gene Name: tachykinin receptor 1
  Uniprot ID: P25103
  ENST ID: ENST00000305249
  CDS Start-End: 767-1990
acggcaagtagcaagcagcaaaaggcgtggtagctgcggcggtggaatgagacagttgtcaacagctggcgcagctgccgcgctgcgcaccgggactggcgagtacgcagcccaggtactgccccttcccagtgacgtctctgcagggggttataaaagcctcgtgcgcagctaactcgcgagctgagcaacccgaaccgagaggtgcccgcgaaactgcaggcggcggcagcggcagcaaaagagaaggaaaaatctccagctggatacgaagctccagaatcctggccataggctcagaacttttacaggtcgcgctgcaatgggcccccacttcgctcctaagtcctcacgcagcacagggctttgcctttccctgcggaggaaggagaaataggagttgcaggcagcagcaggtgcataaatgcgggggatctcttgcttcctagaactgtgaccggtggaatttctttccctttttcagtttaccgcaagagagatgctgtctccagacttctgaactcaaacgtctcctgaagcttgaaagtggaggaattcagagccaccgcgggcaggcgggcagtgcatccagaagcgtttatattctgagcgccagttcagctttcaaaaagagtgctgcccagaaaaagccttccaccctcctgtctggctttagaaggaccctgagccccaggcgccagccacaggactctgctgcagaggggggttgtgtacagatagtagggctttaccgcctagcttcgaaatggataacgtcctcccggtggactcagacctctccccaaacatctccactaacacctcggaacccaatcagttcgtgcaaccagcctggcaaattgtcctttgggcagctgcctacacggtcattgtggtgacctctgtggtgggcaacgtggtagtgatgtggatcatcttagcccacaaaagaatgaggacagtgacgaactattttctggtgaacctggccttcgcggaggcctccatggctgcattcaatacagtggtgaacttcacctatgctgtccacaacgaatggtactacggcctgttctactgcaagttccacaacttctttcccatcgccgctgtcttcgccagtatctactccatgacggctgtggcctttgataggtacatggccatcatacatcccctccagccccggctgtcagccacagccaccaaagtggtcatctgtgtcatctgggtcctggctctcctgctggccttcccccagggctactactcaaccacagagaccatgcccagcagagtcgtgtgcatgatcgaatggccagagcatccgaacaagatttatgagaaagtgtaccacatctgtgtgactgtgctgatctacttcctccccctgctggtgattggctatgcatacaccgtagtgggaatcacactatgggccagtgagatccccggggactcctctgaccgctaccacgagcaagtctctgccaagcgcaaggtggtcaaaatgatgattgtcgtggtgtgcaccttcgccatctgctggctgcccttccacatcttcttcctcctgccctacatcaacccagatctctacctgaagaagtttatccagcaggtctacctggccatcatgtggctggccatgagctccaccatgtacaaccccatcatctactgctgcctcaatgacaggttccgtctgggcttcaagcatgccttccggtgctgccccttcatcagcgccggcgactatgaggggctggaaatgaaatccacccggtatctccagacccagggcagtgtgtacaaagtcagccgcctggagaccaccatctccacagtggtgggggcccacgaggaggagccagaggacggccccaaggccacaccctcgtccctggacctgacctccaactgctcttcacgaagtgactccaagaccatgacagagagcttcagcttctcctccaatgtgctctcctaggccacagggcctttggcaggtgcagcccccactgcctttgacctgcctcccttcatgcatggaaattcccttcatctggaaccatcagaaacaccctcacactgggacttgcaaaaagggtcagtatgggttagggaaaacattccatccttgagtcaaaaaatctcaattcttccctatctttgccaccctcatgctgtgtgactcaaaccaaatcactgaactttgctgagcctgtaaaataaaaggtcggaccagcttttcccaaaagcccattcattccattctggaagtgactttggctgcatgcgagtgctcatttcaggatgaattctgcagcacagctgcggacccggaagactcattttcctggagccccgtgttacttcaataaagttatctcagattagcctcctgcagctggaggctcctatcaccccagcctacgcttgacagggtgaacaaaagaaggcaccacataacatctaaatgaaaaatttagccctgtcttctaagcatctgtgaaaagaaacatatgtattcccctttttggcatctcagtatttcagtacatttatacatcatgagattgagaacctcgggcttccacattatgtccccggtgactgtcctgagcagccgacgcaagcagaatatgtccactgatacctgctagttctcttacagaccaggaattgggagacttgcactacatttaatgtgtagttgaccctcttttcctacttgtaaacaaggggactgaactagataatctaagtgttccttcgaatcttaacatcccgtggttcaaggattgtatgagttttttgtttgttttacaaaaaaaaacaaaacgaagaataaaagaatagaaaagaataggagcagtgagtcttgtaactaatacccagttcctggagatgtagcaactgctaaggccatctgtaactatccatctcagacattctccgatttatcttaaaatcctgagtacattccttctcatggaaggttttggcttttgacagagcagaggacttcatgccaaggcctgcatccatccagctttagcaggcagaatttcatagctgcagaacactgtcagagaagacaaatgtgggctccctgctttaaccttttgggtattttagggtgggggccctaaccttcattcttagttttacactagcatcgtgctcatatgtgcgacaagcaagaaggctgcactttgcagctgcacttctgggaagagggcatcttgcatcttcccttcagactctctgaatgtctcctccctgctccatggctttgccagcttcctgtctctaaggggtagaatgactcatcaaccctaaaggacagtcagtcttccaagagccatgaactgaatgctttatatcctaatttagatttagagtttccagaaggtgagcatgcagttttgttttgtttttttttctgtctcccaaatctgtgttttttccagatatggctggaagcagaagcttcatgtaacatccatgaatgtcctcctggtagtttgcataatggatgcacatgtgccgcatccataacattaaggggagaataatgcatggtttacagcctttgccagccctgctggctctaattctaccagggcatccacaggcctgggggaagaagaaacagtataagccagaaaacctcaagaactacattctctaaagcagcatggaaagttttaaataaactaagtgaagccagatcattgcagatatataaatggaagacaaaatttagaagcaacaaaagttagtgccctaagcattagtcatacttccaatagagaatcttgctgtgtatggattactcactttggaagaatgtaaagagctaacatgattatgagaagtacctgagaagatggtgtcaagaagttggggacaccccatctatggaagagaaggttagagttgagctcaacgaggattaactgagtgcctcctctggactttgccctgaactgggaacacacagcccctgcagctcttgaagagcctaccttattggccatcactaactaactcaccagtcctagtgagtctaagctgcccagcagtcttggaggcatctgagaggacagattctccacagaattctaaaaacccacactcaacatgggcagtcaagccaaagactgggacctttggagagcctctggaatgagagttctctggggtacttccaaagggagctggcagtcagtccaggggacctaaaggaatttggttgaacagtatcatctctgtgcatagtaagagggaatgttgggtggtccgggcagtttccaatatggcaaagcatctgcttggacagtgccagcaagccttcctctgacccagtctccaatgtccactaacttataaaaatgtcatcaactcccacatgtaagaaacaccatgatttgtactgtgcatgggtcacattcttattctagaaatgcatcaccctgtgtttatccaagtgtgtttacttggtgtaatgtccagtagtaatagaatatgaaatatcaaggaaccatctttgttacgtgacttccaaaatgtgagatctcattgctgtcactgtgatatttgtattgtgtgaatctcttcctcctcttcctcctcatgctttctcagggaggagccctgatgtatatcatgaactcacagttcctagaccacagtaattgaggggcggtgggggggcctttatcggagaagctagagaacaagagtccttctcctccttatcccccaacaggacactaagagacaaggactgagtggaatcctggagaaaggggactcaggaactgacctcattggcctgatttgtgaggagaggagtataagtggagaggggccattcctgaggtttccgtgttttccagcctggtctcctggaaagaatctttatacagaaataaagtatgtgtttcactc

SEQ ID NO: 188954 - DNA, 1270 bp, Homo sapiens
  Payload ID: 17315
  Gene Symbol: TACR1
  Gene Name: tachykinin receptor 1
  Uniprot ID: P25103
  ENST ID: ENST00000409848
  CDS Start-End: 124-1059
gaaaaagccttccaccctcctgtctggctttagaaggaccctgagccccaggcgccagccacaggactctgctgcagaggggggttgtgtacagatagtagggctttaccgcctagcttcgaaatggataacgtcctcccggtggactcagacctctccccaaacatctccactaacacctcggaacccaatcagttcgtgcaaccagcctggcaaattgtcctttgggcagctgcctacacggtcattgtggtgacctctgtggtgggcaacgtggtagtgatgtggatcatcttagcccacaaaagaatgaggacagtgacgaactattttctggtgaacctggccttcgcggaggcctccatggctgcattcaatacagtggtgaacttcacctatgctgtccacaacgaatggtactacggcctgttctactgcaagttccacaacttctttcccatcgccgctgtcttcgccagtatctactccatgacggctgtggcctttgataggtacatggccatcatacatcccctccagccccggctgtcagccacagccaccaaagtggtcatctgtgtcatctgggtcctggctctcctgctggccttcccccagggctactactcaaccacagagaccatgcccagcagagtcgtgtgcatgatcgaatggccagagcatccgaacaagatttatgagaaagtgtaccacatctgtgtgactgtgctgatctacttcctccccctgctggtgattggctatgcatacaccgtagtgggaatcacactatgggccagtgagatccccggggactcctctgaccgctaccacgagcaagtctctgccaagcgcaaggtggtcaaaatgatgattgtcgtggtgtgcaccttcgccatctgctggctgcccttccacatcttcttcctcctgccctacatcaacccagatctctacctgaagaagtttatccagcaggtctacctggccatcatgtggctggccatgagctccaccatgtacaaccccatcatctactgctgcctcaatgacaggtgaggatcccaaccccatgagctctccaggggccacaagaccatctacatacacagtggccaagcggccatcctaaatgagtaaacccagctgtgagacaagagggacaagtggggactgcagctaacttatcatcacacaactcagcctggctgattatcaccatccaggaatgggagcccggagtggactgattttctttttttcttttcca

SEQ ID NO: 188955 - DNA, 2083 bp, Homo sapiens
  Payload ID: 17316
  Gene Symbol: TACR2
  Gene Name: tachykinin receptor 2
  Uniprot ID: P21452
  ENST ID: ENST00000373306
  CDS Start-End: 545-1741
gcacccagcacccagcccggcttgcagcccaaagcctggagagaggctgctgcgccattgacctgtggactccagagactcccgctgtgcattcctctgatctggaaggtttcctgaattacgtgacgagaaacctgggttcgagtcctaacttgtcaccaacttcctgagtgacctgggctggtcccgtcccctcttggaatctctgtcttccatctcttcagcgaaggggttgatttataagggtgttttctgctctgacactgtgatttgaattctgtgtttccacatgatattcgagaagtctggccggaaggatggaatctgaaatgacaatggttctggactgggctttgtgctcagcccagctcatctttgcctgagacctaggagtggccccaggctctcctgatgtgccaccacgcttggcatctgctcctctccctgcccccatattcccatgctctgaaggggagttctctttcatagcaaatccgagaggagccgaggagccaggtcctttgttccagacccagaagcagccatggggacctgtgacattgtgactgaagccaatatctcatctggccctgagagcaacaccacgggcatcacagccttctccatgcccagctggcaactggcactgtgggccacagcctacctggccctggtgctggtggccgtgacgggtaatgccatcgtcatctggatcatcctggcccatcggaggatgcgcacagtcaccaactacttcatcgtcaatctggcgctggctgacctctgcatggctgccttcaatgccgccttcaactttgtctatgccagccacaacatctggtactttggccgtgccttctgctacttccagaacctcttccccatcacagccatgtttgtcagcatctactccatgaccgccattgctgccgacaggtacatggccatcgtccaccccttccagcctcggctttcagctcccagcaccaaggcggttattgctggcatctggctggtggctctcgccctggcctcccctcagtgcttctactccaccgtcaccatggaccagggtgccaccaagtgcgtggtggcctggcccgaagacagcgggggcaagacgctcctcctgtaccacctcgtggtgatcgccctcatctacttcctgccgctcgcggtgatgtttgtagcctacagcgtcatcggcctcacgctctggaggcgcgcagtgcccggacatcaggcgcacggtgccaacctgcgccacctgcaggccatgaagaagtttgtgaagaccatggtgctggtggtgctgacgtttgccatctgctggctgccctaccacctctacttcatcctgggcagcttccaggaggacatctactgccacaagttcatccagcaagtctacctggcactcttctggttggccatgagctctaccatgtacaatcccatcatctactgctgtctcaaccacaggtttcgctctggattccggcttgccttccgctgctgcccatgggtcacacccaccaaggaagataagctcgagctgactcccacgacctccctctccacgagagtcaacaggtgtcacactaaggagactttgttcatggctggggacacagccccctccgaggctaccagtggggaggcggggcgtccccaggatggatcagggctatggtttgggtatggtttgcttgcccccaccaaaactcatgttgaaatttgatcccaatgtggcagtgttgggaggtaggggttagtgggaggtgtttgggtattggggatggatcccttatgaatagattaatgccttccagttgaagtgaatcatcactcttgtgggaatggactagttcccaaaataacaagttgttagaaagagtgtggtgtcctcagtttccctgtcttgcttcctctctcaccatgtgatctctttgcacacaacacttcccttccactttccaccatgacaagaagcagcctgaggccttcaccagatgcagctgcccaatcttggatattccagccaccagaatcatgagccaaataaacctcttttctttataaa

SEQ ID NO: 188956 - DNA, 1740 bp, Homo sapiens
  Payload ID: 17316
  Gene Symbol: TACR2
  Gene Name: tachykinin receptor 2
  ENST ID: ENST00000373307
  CDS Start-End: 257-817
ccttttgcagggaagccgtctcctggcacacaggctacccaatgccacctttatttttgtttaaatcaaaccaagtccctgggaggcgcccagggtgggcccgcaggggcggctccacagtgcccgcggggtcccaggaccaggcgctggcagacttcggagtcgcccccgggccctccgctgcccaggcctcggctctccctgcaggtaccacctcgtggtgatcgccctcatctacttcctgccgctcgcggtgatgtttgtagcctacagcgtcatcggcctcacgctctggaggcgcgcagtgcccggacatcaggcgcacggtgccaacctgcgccacctgcaggccatgaagaagtttgtgaagaccatggtgctggtggtgctgacgtttgccatctgctggctgccctaccacctctacttcatcctgggcagcttccaggaggacatctactgccacaagttcatccagcaagtctacctggcactcttctggttggccatgagctctaccatgtacaatcccatcatctactgctgtctcaaccacaggtttcgctctggattccggcttgccttccgctgctgcccatgggtcacacccaccaaggaagataagctcgagctgactcccacgacctccctctccacgagagtcaacaggtgtcacactaaggagactttgttcatggctggggacacagccccctccgaggctaccagtggggaggcggggcgtccccaggatggatcagggctatggtttgggtatggtttgcttgcccccaccaaaactcatgttgaaatttgatcccaatgtggcagtgttgggaggtaggggttagtgggaggtgtttgggtattggggatggatcccttatgaatagattaatgccttccagttgaagtgaatcatcactcttgtgggaatggactagttcccaaaataacaagttgttagaaagagtgtggtgtcctcagtttccctgtcttgcttcctctctcaccatgtgatctctttgcacacaacacttcccttccactttccaccatgacaagaagcagcctgaggccttcaccagatgcagctgcccaatcttggatattccagccaccagaatcatgagccaaataaacctcttttctttataaattacctagtctcaggtattccatgaaagcaacacaaatggactgagataggtgcctattgaaccctgaagccttgtgcctggctgcagaatgaggtgtagcaccctttgagaagtagccaatcgagaagaccacatctgaaagttcagctcatgccccatccttcagtataccaatacaaagacaacatggggccagaactccagaaaggatgctgactttaagaggactcagccacccatctcagagagcacttcagaggatccagtaagggtcagaaaagacagtgtaagctgatatttatctaatttaagagatgcaagctcaaatgccttcctggggcatacaagaatatgtataaaagaaaaactgcaaatgtgatgataaaaggcaactgacttccaccctcagtttgagctaatagggaatggtgggggccatggcaacctggagaggacaggcattcaaaggggacaagaactactcagctctggacaaacgttgccacatgataatgggagcccactgttgctagatcttctaaatctttcaagagaagctataaatccacatttgtatgtg

SEQ ID NO: 188957 - DNA, 1713 bp, Homo sapiens
  Payload ID: 17316
  Gene Symbol: TACR2
  Gene Name: tachykinin receptor 2
  ENST ID: ENST00000619173
  CDS Start-End: 1-1089
atggggacctgtgacattgtgactgaagccaatatctcatctggccctgagagcaacaccacgggcatcacagccttctcgatgcgcacagtcaccaactacttcatcgtcaatctggcgctggctgacctctgcatggctgccttcaatgccgccttcaactttgtctatgccagccacaacatctggtactttggccgtgccttctgctacttccagaacctcttccccatcacagccatgtttgtcagcatctactccatgaccgccattgctgccgacaggtacatggccatcgtccaccccttccagcctcggctttcagctcccagcaccaaggcggttattgctggcatctggctggtggctctcgccctggcctcccctcagtgcttctactccaccgtcaccatggaccagggtgccaccaagtgcgtggtggcctggcccgaagacagcgggggcaagacgctcctcctgtaccacctcgtggtgatcgccctcatctacttcctgccgctcgcggtgatgtttgtagcctacagcgtcatcggcctcacgctctggaggcgcgcagtgcccggacatcaggcgcacggtgccaacctgcgccacctgcaggccatgaagaagtttgtgaagaccatggtgctggtggtgctgacgtttgccatctgctggctgccctaccacctctacttcatcctgggcagcttccaggaggacatctactgccacaagttcatccagcaagtctacctggcactcttctggttggccatgagctctaccatgtacaatcccatcatctactgctgtctcaaccacaggtttcgctctggattccggcttgccttccgctgctgcccatgggtcacacccaccaaggaagataagctcgagctgactcccacgacctccctctccacgagagtcaacaggtgtcacactaaggagactttgttcatggctggggacacagccccctccgaggctaccagtggggaggcggggcgtccccaggatggatcagggctatggtttgggtatggtttgcttgcccccaccaaaactcatgttgaaatttgatcccaatgtggcagtgttgggaggtaggggttagtgggaggtgtttgggtattggggatggatcccttatgaatagattaatgccttccagttgaagtgaatcatcactcttgtgggaatggactagttcccaaaataacaagttgttagaaagagtgtggtgtcctcagtttccctgtcttgcttcctctctcaccatgtgatctctttgcacacaacacttcccttccactttccaccatgacaagaagcagcctgaggccttcaccagatgcagctgcccaatcttggatattccagccaccagaatcatgagccaaataaacctcttttctttataaattacctagtctcaggtattccatgaaagcaacacaaatggactgagataggtgcctattgaaccctgaagccttgtgcctggctgcagaatgaggtgtagcaccctttgagaagtagccaatcgagaagaccacatctgaaagttcagctcatgccccatccttcagtataccaatacaaagacaacatggggccagaactccagaaaggatgctgactttaagaggactcagccacccatctcagagagcacttcagaggatccagtaagggtcagaaaag

SEQ ID NO: 188958 - DNA, 5190 bp, Homo sapiens
  Payload ID: 17317
  Gene Symbol: TACR3
  Gene Name: tachykinin receptor 3
  Uniprot ID: P29371
  ENST ID: ENST00000304883
  CDS Start-End: 142-1539
attgcagtatctttcagcttccagtcttatctgaagactccggcaccaaagtgaccaggaggcagagaagaacttcagaggagtctcgtcttgggctgcccgtgggtgagtgggagggtccgggactgcagaccggtggcgatggccactctcccagcagcagaaacctggatagacgggggtggaggcgtgggtgcagacgccgtgaacctgaccgcctcgctagctgccggggcggccacgggggcagttgagactgggtggctgcaactgctggaccaagctggcaacctctcctcctccccttccgcgctgggactgcctgtggcttcccccgcgccctcccagccctgggccaacctcaccaaccagttcgtgcagccgtcctggcgcatcgcgctctggtccctggcgtatggtgtggtggtggcagtggcagttttgggaaatctcatcgtcatctggatcatcctggcccacaagcgcatgaggactgtcaccaactacttccttgtgaacctggctttctccgacgcctccatggccgccttcaacacgttggtcaatttcatctacgcgcttcatagcgagtggtactttggcgccaactactgccgcttccagaacttctttcctatcacagctgtgttcgccagcatctactccatgacggccattgcggtggacaggtatatggctattattgatcccttgaaacccagactgtctgctacagcaaccaagattgtcattggaagtatttggattctagcatttctacttgccttccctcagtgtctttattccaaaaccaaagtcatgccaggccgtactctctgctttgtgcaatggccagaaggtcccaaacaacatttcacttaccatattatcgtcattatactggtgtactgtttcccattgctcatcatgggtattacatacaccattgttggaattactctctggggaggagaaatcccaggagatacctgtgacaagtatcatgagcagctaaaggccaaaagaaaggttgtcaaaatgatgattattgttgtcatgacatttgctatctgctggctgccctatcatatttacttcattctcactgcaatctatcaacaactaaatagatggaaatacatccagcaggtctacctggctagcttttggctggcaatgagctcaaccatgtacaatcccatcatctactgctgtctgaataaaagatttcgagctggcttcaagagagcatttcgctggtgtcctttcatcaaagtttccagctatgatgagctagagctcaagaccaccaggtttcatccaaaccggcaaagcagtatgtacaccgtgaccagaatggagtccatgacagtcgtgtttgaccccaacgatgcagacaccaccaggtccagtcggaagaaaagagcaacgccaagagacccaagtttcaatggctgctctcgcaggaattccaaatctgcctccgccacttcaagtttcataagctcaccctatacctctgtggatgaatattcttaattccatttcctgaggtaaaagattagtgtgagaccatcatggtgccagtctaggaccccattctcctatttaccagtcctgtcctatataccctctagaaacagaaagcaatttttaggcagctatggtcaaattgagaaaggtagtgtataaatgtgacaaagacactaataacatgttagcctccacccaaaataaaatgggctttaaatttattctttgaaaactctaaattattatatgcaatgaacaaaaatatgtcaggaaaatacttgtaaactcgccagtctatctcatttacaaattgcaatatacatttgtgacattaaaatgatatatagtttttccaagagattaaagaatctttaaaacataatattgtaagtgaagggaaacaaaatctgtataaaatctgtataaaataggcttttttgcctagagatataaaatgggaaaaaaagttaaatgattcattttcccactagagtaatggaaaattaacctcaagaagtaggaactgaaaatctttgctcaagaaaactcattttgtagaatgtaaagatttaaagatttaaagatttcttccatggcatttaactgaaaaggaaatctagttaaatcattaggcaaatgtatatttcattctcttgattttttttctgagaaagtgaaattttaaaaaattatatactttttgaccattacttatttttgaataccaagctaaaaagtagtcagttaagaccctaaaaatatgaagaaaattcctatcattttttatttttcacagattttttaaatagctagattataaaacagtaaaggtacattccaataaatagaggaagaatactatttatgttctcttcctctcccctcactgaaaatagaataaggactaggagaaaatatcttcaaaggcaactccttagggaaaaaaagtcacaagtgtgacaaaagactatatggttgaaaaataccaatatatgttacatatgagtaaactaggcaaggtgtagacaagtgaattacctcttagaaaacgaatctgcacaatagtttggatacatgtaaactaataacagctgagcaagagggtgagtttaacacacatccttccacagaaagaccttttctttcatttgcttagattattcagaagtcttaccagaaagaaatgagataatagtcctaagaaagcatcacatttactacaagaagatatatactagcacatttctgagactcataacataacaagaaatacttttaagtgtaaaaagtaacatccaggcctcagtgcttacagatcatctttccttgaattagggatactgttaatcctgctcaagaaagcagaaactttttgagaatgtgaatgtgtagtacaaacttctcctttaaactcttcagtttgatttttaaagatatttgtctaaaataatactctctaacaaacactttactgttgtgcctccaccgatattaaaacaaaatatttttgaagaacagaataaaagcaaatattcaatggcaaatcatggtctatttctcaaatctcttccctattttgaagccaaaaccagaaatatccaattgttacaaaaagttcggagtctaaacaagctaaacatatgtgttccagctgaatttcttctgatgataccaataaacaaagagacacacacacacacacacacacatacaaatgtgcctacacattcaatcatttaatgaatgcaacaacttcaaagaattaaaatcaaatactgaaatgataagtggtcattacagcattgccatatgctcaataaagtctgtgaagcttgtgtgcatgttttaaataagcaaatttaatatatagtatctaattgtttgaatataatgtttttgaatgttcattcttaaaacatatatttatcatacaatgttaaagtgtcaagaaaaagcctaatatgtaaaaagttattattttcttaaatttatgaatgatatggtactagcattaattaatgttttagacatatggaaccatattcagctgtaaaatatgaatatgaagtttagccctcaaatttaatgtcatcagccactaccaaagtatcatacatttgaaaaatataactcctggccctcacatattagagaaattcagtagaattttctaagacatttatttctaaggaaaaatactggcctcgtcagttggattgttggtttgctttggcttctgtgaacatacatattgttgtgttgcttaccgagcacctcccttctagtgtgacagaaatacccagacagtattttttcaatgctttccagaaaaaaactggcatcattcactcactactcatggcccttaaactgagacctataggcagaattttttaagttcaaaaatttaaacgacaataataaaacaagagtgaaatataaaagagaagatttttcactcttttgtctgcattttgacaataagaattacagaataatgcacaaaatcaaattcagtgagattcatttttaaataaagtcatcccagtgttttcatatttgctaagcttggaaagaatctgccttcaaaatttactctaccctctgtttctaaagttcagtatgaatctttccattgtttgaaggcaaacactggctcagactactaggcagatggttaaaacagcccaggtttttttacttagatcagtatcagaaaaattcaaaatatttttaaacaaatatgaaagaatcaaaaaggcttacatcattgtaagtattctcttttaaacaaaatacattaaatcaaaaataaacattgcttactattttgcatctggacaaagtacaagatattgaaattacctgtatgggaaaatattaaagcggacataattgttacagaattcactctcacacttttttattttttaccaagtacagcacactgttgcattattccatcttctaacttcatgatggtgacatttctgacccagcagctgaattcatgtccttttccaaatcctgccaatgtcttagaaacagtgaactgagcaatttcagagtgaaccccgcccttacaaagcacataaagaataccaagaagcttggtatcaagcctatgaaatacaaaataaatgtgaaaaataaatgctggccagctcaacatttgaatttagtttttgcaaatgcaaaatttcctctaaaaatttatgattagtacctggtaaactatttcatcaaatagaaaagcaggagacttacaaacatttctcacacttctaacagtaacaatttcctacttatcattgataatatgtcaaaagctaaggaaatccagaatgacatggaccatgtagaacaataaggttggaataatttcccttagggccaagcaggaatagagaataaagttcagaagggctgtacaaggtcattagttttgtgttttcatacatatatatatatatatgaaaaatctgtttatataagaagtaaatgtatataaagtttgtagtgaataaagtattttcaagttgtggtaattatattgaatatgtttaatgtatttacaccctttgcatatgtgataatgtgacagatttaatttctattttttctttaaaaacattaaaactaatattaaaagtaaaa

SEQ ID NO: 188959 - DNA, 1011 bp, Homo sapiens
  Payload ID: 17318
  Gene Symbol: TAC1
  Gene Name: tachykinin, precursor 1
  Uniprot ID: P20366
  ENST ID: ENST00000346867
  CDS Start-End: 122-466
aaagagcgcgctcggacctccttcccggcggcagctaccgagagtgcggagcgaccagcgtgcgctcggaggaaccagagaaactcagcaccccgcgggactgtccgtcgcaaaatccaacatgaaaatcctcgtggccttggcagtcttttttcttgtctccactcagctgtttgcagaagaaataggagccaatgatgatctgaattactggtccgactggtacgacagcgaccagatcaaggaggaactgccggagccctttgagcatcttctgcagagaatcgcccggagacccaagcctcagcagttctttggattaatgggcaaacgggatgctggacatggccagatctctcacaaaagacataaaacagattcctttgttggactaatgggcaaaagagctttaaattctgtggcttatgaaaggagtgcaatgcagaattatgaaagaagacgttaataaactacctaacattatttattcagcttcatttgtgtcaatgggcaatgacaggtaaattaagacatgcactatgaggaataattatttatttaataacaattgtttggggttgaaaattcaaaaagtgtttatttttcatattgtgccaatatgtattgtaaacatgtgttttaattccaatatgatgactcccttaaaatagaaataagtggttatttctcaacaaagcacagtgttaaatgaaattgtaaaacctgtcaatgatacagtccctaaagaaaaaaaatcattgctttgaagcagttgtgtcagctactgcggaaaaggaaggaaactcctgacagtcttgtgcttttcctatttgttttcatggtgaaaatgtactgagattttggtattacactgtatttgtatctctgaagcatgtttcatgttttgtgactatatagagatgtttttaaaagtttcaatgtgattctaatgtcttcatttcattgtatgatgtgttgtgatagctaacattttaaataaaagaaaaaata

SEQ ID NO: 188960 - DNA, 975 bp, Homo sapiens
  Payload ID: 17318
  Gene Symbol: TAC1
  Gene Name: tachykinin, precursor 1
  Uniprot ID: P20366
  ENST ID: ENST00000350485
  CDS Start-End: 122-457
aaagagcgcgctcggacctccttcccggcggcagctaccgagagtgcggagcgaccagcgtgcgctcggaggaaccagagaaactcagcaccccgcgggactgtccgtcgcaaaatccaacatgaaaatcctcgtggccttggcagtcttttttcttgtctccactcagctgtttgcagaagaaataggagccaatgatgatctgaattactggtccgactggtacgacagcgaccagatcaaggaggaactgccggagccctttgagcatcttctgcagagaatcgcccggagacccaagcctcagcagttctttggattaatgggcaaacgggatgctgattcctcaattgaaaaacaagtggccctgttaaaggctctttatggacatggccagatctctcacaaaatggcttatgaaaggagtgcaatgcagaattatgaaagaagacgttaataaactacctaacattatttattcagcttcatttgtgtcaatgggcaatgacaggtaaattaagacatgcactatgaggaataattatttatttaataacaattgtttggggttgaaaattcaaaaagtgtttatttttcatattgtgccaatatgtattgtaaacatgtgttttaattccaatatgatgactcccttaaaatagaaataagtggttatttctcaacaaagcacagtgttaaatgaaattgtaaaacctgtcaatgatacagtccctaaagaaaaaaaatcattgctttgaagcagttgtgtcagctactgcggaaaaggaaggaaactcctgacagtcttgtgcttttcctatttgttttcatggtgaaaatgtactgagattttggtattacactgtatttgtatctctgaagcatgtttcatgttttgtgactatatagagatgtttttaaaagtttcaatgtgattctaatgtcttcatttcattgtatgatgtgttgtgatag

SEQ ID NO: 188961 - DNA, 1239 bp, Homo sapiens
  Payload ID: 17318
  Gene Symbol: TAC1
  Gene Name: tachykinin, precursor 1
  Uniprot ID: P20366
  ENST ID: ENST00000319273
  CDS Start-End: 298-687
gggtccagatgttatgggcatcgacgagttaccgtctcggaaactctcaatcacgcaagcgaaaggagaggaggcggctaattaaatattgagcagaaagtcgcgtggggagaatgtcacgtgggtctggaggctcaaggaggctgggataaataccgcaaggcactgagcaggcgaaagagcgcgctcggacctccttcccggcggcagctaccgagagtgcggagcgaccagcgtgcgctcggaggaaccagagaaactcagcaccccgcgggactgtccgtcgcaaaatccaacatgaaaatcctcgtggccttggcagtcttttttcttgtctccactcagctgtttgcagaagaaataggagccaatgatgatctgaattactggtccgactggtacgacagcgaccagatcaaggaggaactgccggagccctttgagcatcttctgcagagaatcgcccggagacccaagcctcagcagttctttggattaatgggcaaacgggatgctgattcctcaattgaaaaacaagtggccctgttaaaggctctttatggacatggccagatctctcacaaaagacataaaacagattcctttgttggactaatgggcaaaagagctttaaattctgtggcttatgaaaggagtgcaatgcagaattatgaaagaagacgttaataaactacctaacattatttattcagcttcatttgtgtcaatgggcaatgacaggtaaattaagacatgcactatgaggaataattatttatttaataacaattgtttggggttgaaaattcaaaaagtgtttatttttcatattgtgccaatatgtattgtaaacatgtgttttaattccaatatgatgactcccttaaaatagaaataagtggttatttctcaacaaagcacagtgttaaatgaaattgtaaaacctgtcaatgatacagtccctaaagaaaaaaaatcattgctttgaagcagttgtgtcagctactgcggaaaaggaaggaaactcctgacagtcttgtgcttttcctatttgttttcatggtgaaaatgtactgagattttggtattacactgtatttgtatctctgaagcatgtttcatgttttgtgactatatagagatgtttttaaaagtttcaatgtgattctaatgtcttcatttcattgtatgatgtgttgtgatagctaacattttaaataaaagaaaaaatatcttgaa

SEQ ID NO: 188962 - DNA, 6216 bp, Homo sapiens
  Payload ID: 17319
  Gene Symbol: TAF1L
  Gene Name: TAF1 RNA polymerase II, TATA box binding protein (TBP)-associated factor, 210kDa-like
  Uniprot ID: Q8IZX4
  ENST ID: ENST00000242310
  CDS Start-End: 91-5571
ccccgcctttattcagcttccggtagacgctggtagggtaagggagctaagtagatcacttccgggcgactgttgttttatttccggtttatgcgacccggctgcgatttgctgctgagggcagcagctaccgtcactgccgccatcatgtcagactcggacagcgaggaagattcatctggaggtggcccatttactttagcgggtatccttttcggcaacatcagtggagcggggcagctggagggggaaagcgtcttggatgatgagtgtaagaagcacttggcaggcttgggggctttggggctgggcagcctaatcactgaactcacggcaaatgaagaattgactgggactggcggtgccttggtaaatgatgaagggtggattaggagtacagaagatgctgtagactattcagacatcaatgaggtggcagaagatgaaagccaaagacaccagcagacgatggggagcttgcagcccctttaccactcggattatgatgaagatgactatgatgctgattgtgaagacattgattgcaagttgatgcctcctccacctccacccccgggaccaatgaagaaggataaggaccaagatgctattacctgtgtgtctgaaagtggagaagacatcatcttgccctccatcattgccccttcctttttggcctcagagaaagtggatttcagtagttactctgattcagaatctgagatgggacctcaggaagcaacacaggcagaatctgaggatggaaagctgacccttccattggctgggattatgcagcatgatgccaccaagctgttgccaagtgtcaccgaactttttccagaatttcgacctggaaaagtgttacgcttcctacatctttttggaccagggaagaatgtcccatctgtttggcggagtgctcggagaaagaggaagaagcatcgtgagctgatacaggaagagcagatccaggaggtggaatgctcagtagaatcagaagtcagccagaagtctttgtggaactatgactatgctccaccaccacccccagagcagtgtctcgctgatgatgaaatcacgatgatggttcctgtggagtccaaattttcccaatcaactggagatgtagataaagtgacagataccaaaccaagagtggctgagtggcgttatgggcctgcccgactgtggtatgatatgctgggtgtctccgaagatggcagtgggtttgactatggcttcaaactgagaaagacacaacatgaacctgtgataaaatctagaatgatggaggaatttaggaaacttgaggaaagcaatggcactgatcttctggctgacgaaaacttcctgatggtgacacagctgcattgggaggattctatcatctgggatggggaggatatcaaacacaaagggacaaaacctcagggtgcaagcctggcaggctggcttccttctattaagactaggaatgtaatggcttacaatgttcagcaaggttttgcacccactctggatgatgacaaaccttggtactccatttttcccattgacaatgaggatctggtgtatggacgctgggaggacaatatcatttgggatgctcaggccatgccccggctgttggaacctcctgttttggcacttgatcccaatgatgagaacctcattttggaaattcctgatgagaaggaagaggccacctctaactccccctccaaggagagtaagaaggaatcatctctgaagaagagtcgaattctcttgggcaaaacaggtgtcatcagggaggaaccacagcagaacatgtctcagccagaagtgaaagatccatggaatctctccaatgatgagtattatttccccaagcaacagggtcttcggggcacctttggagggaatattatccagcattcaattcctgctatggaattatggcagcccttctttcccacccacatggggcccatcaaaatccggcagttccatcgcccacctctgaaaaagtactcatttggtgcactctctcagccaggtccccattcagtccaacctttgctaaagcacatcaaaaaaaaggccaagatgagagaacaagagaggcaagcctcaggtggtggagagttgttttttatgcgcacacctcaggatctcacaggcaaagatggagatcttattcttgcagaatatagtgaggaaaatggacccttaatgatgcaggttggcatggcaaccaagataaagaactattataaacggaaacctggcaaagatcctggagcaccagattgtaaatatggggaaactgtttactgccatacatctcctttcttgggctctctccatcctggccaattactgcaggcacttgagaacaacctttttcgtgctccagtgtatcttcataagatgccagaaactgattttctgatcattcggacaagacagggttactatattcgggaattagtggatatttttgtggttggccagcagtgtcccttgtttgaagttcctgggcctaactccagaagggccaatatgcatattcgagactttctacaggtttttatttaccgccttttctggaagagtaaagatcggccacggaggatacgaatggaagatataaaaaaagcctttccttcccattcagaaagcagcatccggaagaggctaaagctctgcgctgacttcaaacgcacagggatggattcaaactggtgggtgcttaagtctgattttcgtttaccaacggaagaagagatcagagctaaggtgtcaccagagcagtgctgtgcttattatagcatgatagctgcaaagcaacgactgaaggatgctggctatggtgagaaatccttttttgccccagaagaagaaaatgaggaagatttccagatgaagattgatgatgaagttcacgctgctccttggaacaccacaagggccttcattgctgccatgaagggcaagtgtctcctagaggtgactggggtggcagatcccacagggtgtggtgaaggattctcctatgtgaagattccaaataaaccaacacagcagaaggatgataaagagccacaggcagtgaagaagacagtgacaggaacagatgcagaccttcgtcgcctttccctgaaaaatgccaagcaacttctacgtaaatttggtgtgcctgaggaagagattaaaaagttgtcccgctgggaagtgattgatgtggtgcgcacaatgtcaacagaacaggctcattctggagaggggcccatgagtaaatttgcccgtggatcaaggttttctgtggctgagcatcaagagcgttacaaagaggaatgtcagcgtatctttgacctacagaacaaggttctgtcatcaactgaggtcttatcaactgacacagacagcatctcagctgaagatagtgactttgaagaaatgggaaagaacattgagaacatgttgcagaacaagaaaaccagctctcagctgtcacgtgaatgggaggagcaggagcggaaggaactacggcgaatgctactggtagcaggctcagcagcatcaggaaacaatcacagagatgatgtcacagcttccatgactagccttaagtcttctgccactggacactgtctcaagatttatcgcacatttcgagatgaagaggggaaagagtatgttcgctgtgagacagtccgaaaaccagctgtcattgatgcctatgtgcgcatacggactacaaaagatgagaaattcattcaaaaatttgccctttttgatgaaaaacatcgggaagagatgcggaaagaacggcggaggattcaagagcaactgaggcggcttaagcggaaccaggaaaaggagaagcttaagggtcctcctgagaagaagcccaagaaaatgaaagagcgtcctgacctaaaactgaaatgtggggcatgtggtgccattggacatatgaggactaacaaattctgccccctctattatcaaacaaatgtgccaccttcgaaacctgttgccatgacagaagagcaggaggaggagttggaaaagacagtcattcataatgataatgaagaacttatcaaggttgaagggaccaaaattgtcttcgggaaacagctaattgagaatgtgcatgaggttcgcagaaaatctctggttctcaagtttcctaaacagcagcttcctccaaagaagaaacggcgagttggaaccactgttcattgtgactatttgaatatacctcataagtccatccaccgacgccgcacagaccctatggtgacgctgtcatccatcctggagtctatcatcaatgacatgagagatcttccaaatacacaccctttccacactccagtcaatgcaaaggttgtaaaggactactacaaaatcatcactcggccaatggacctacaaacactccgtgaaaatgtgcgtaaatgcctctacccatctcgggaagagttcagagagcatctggagctaattgtgaaaaacagtgcgacctacaatgggccaaaacattcattgactcagatctctcaatccatgctggatctctgtgatgaaaaacttaaagagaaagaagacaaattagctcgcttagagaaagctatcaaccccttgctggatgatgatgaccaagtggcattttctttcattctggacaacattgtcacccagaaaatgatggcagttccagattcttggccatttcatcacccagttaataagaagtttgttccagattattacaaaatgattgtcaatccagtggatttagagaccatacgtaagaacatctccaagcacaagtatcagagtcgggagagttttctagatgatgtaaaccttattcttgccaacagtgttaagtataatggacctgagagtcagtacactaagactgctcaggagattgtgaacatctgttaccagacaattactgagtatgatgagcatttgactcaacttgagaaggatatttgtacagctaaagaagcagctttggaggaagcagaattagaaagcctggacccaatgaccccagggccctacacatctcagcctcctgatatgtatgataccaacacatccctcagtacgtctcgagatgcctctgtatttcaagatgagagcaatttgtctgtcttggatatttccactgccactccagaaaaacagatgtgccagggccaaggtaggctgggtgaggaagactctgatgtggatgttgaagggtatgatgatgaggaggaggatgggaaacctaagcctccagccccagaagggggagatggtgatcttgcagatgaagaggaaggaactgtacaacaacctgaagccagtgtcctgtatgaggatttgcttatatctgaaggagaagatgatgaggaagatgctgggagtgacgaagaaggagacaatcctttctctgctatccagctgagtgaaagtggaagtgactctgatgtgggatatggtggaataagacccaaacaacccttcatgcttcagcatgcttcaggagaacacaaggatgggcacggaaaatgaagaaagcatgatgtcccatgagggagacggtggggaggcttcccatgatttggaggatagcaacatcagttatgggagctgtgaggagcctgatcccaagttgaacacccaagacacaagcttcagcagcatcggaaatttccagctgggcatggtggctcacacctgtaatctcagcactctgggaggccgaggcgggtggatcacctgaggtcagttcgagaccagcttggccaacatgtcgaaacttcatctctactaaaaatacaaaaattagccaggtgtggtggtgcacgcctgtaatccccagatactcgggaggctgaagcaggagaattgcttgaacccgggaggcagaggttgcagtgagtggagatcacgccactgcgctccagcctgggcgaaagagtgagactccatctcaaaaaaaaagaaaatttccaagcatggtatcatctcacttttctaatttacaggctggaacagatgagagccctcctgctgggacagagaattgggttctagtggactctgctacacttaaacctatgtgacaaaccgcccattattttattgtttatttaattatacaatgcctcgttcctatatggatttgaggcaaattaccataaattttgaaacagc

SEQ ID NO: 188963 - DNA, 5692 bp, Homo sapiens
  Payload ID: 17320
  Gene Symbol: TAF1
  Gene Name: TAF1 RNA polymerase II, TATA box binding protein (TBP)-associated factor, 250kDa
  Uniprot ID: P21675
  ENST ID: ENST00000276072
  CDS Start-End: 11-5692
tttccggtctatgggacccggctgcgatttgctgctgcggacagcagctaccatcactgctgccgccatcatgtcagacacggacagcgacgaagattccgctggaggcggcccattttctttagcgggtttccttttcggcaacatcaatggagccgggcagctggagggggaaagcgtcttggatgatgaatgtaagaagcacttggcaggcttgggggctttggggctgggcagcctgatcactgaactcacggcaaatgaagaattgaccgggactgacggtgccttggtaaatgatgaagggtgggttaggagtacagaagatgctgtggactattcagacatcaatgaggtggcagaagatgaaagccgaagataccagcagacgatggggagcttgcagcccctttgccactcagattatgatgaagatgactatgatgctgattgtgaagacattgattgcaagttgatgcctcctccacctccacccccgggaccaatgaagaaggataaggaccaggattctattactggtgtgtctgaaaatggagaaggcatcatcttgccctccatcattgccccttcctctttggcctcagagaaagtggacttcagtagttcctctgactcagaatctgagatgggacctcaggaagcaacacaggcagaatctgaagatggaaagctgacccttccattggctgggattatgcagcatgatgccaccaagctgttgccaagtgtcacagaactttttccagaatttcgacctggaaaggtgttacgttttctacgtctttttggaccagggaagaatgtcccatctgtttggcggagtgctcggagaaagaggaagaagaagcaccgtgagctgatacaggaagagcagatccaggaggtggagtgctcagtagaatcagaagtcagccagaagtctttgtggaactacgactacgctccaccaccacctccagagcagtgtctctctgatgatgaaatcacgatgatggctcctgtggagtccaaattttcccaatcaactggagatatagataaagtgacagataccaaaccaagagtggctgagtggcgttatgggcctgcccgactgtggtatgatatgctgggtgtccctgaagatggcagtgggtttgactatggcttcaaactgagaaagacagaacatgaacctgtgataaaatctagaatgatagaggaatttaggaaacttgaggaaaacaatggcactgatcttctggctgatgaaaacttcctgatggtgacacagctgcattgggaggatgatatcatctgggatggggaggatgtcaaacacaaagggacaaaacctcagcgtgcaagcctggcaggctggcttccttctagcatgactaggaatgcgatggcttacaatgttcagcaaggttttgcagccactcttgatgatgacaaaccttggtactccatttttcccattgacaatgaggatctggtatatggacgctgggaggacaatatcatttgggatgctcaggccatgccccggctgttggaacctcctgttttgacacttgatcccaatgatgagaacctcattttggaaattcctgatgagaaggaagaggccacctctaactccccctccaaggagagtaagaaggaatcatctctgaagaagagtcgaattctcttagggaaaacaggagtcatcaaggaggaaccacagcagaacatgtctcagccagaagtgaaagatccatggaatctctccaatgatgagtattattatcccaagcaacagggtcttcgaggcacctttggagggaatattatccagcattcaattcctgctgtggaattacggcagcccttctttcccacccacatggggcccatcaaactccggcagttccatcgcccacctctgaaaaagtactcatttggtgcactttctcagccaggtccccactcagtccaacctttgctaaagcacatcaaaaaaaaggccaagatgagagaacaagagaggcaagcttcaggtggtggagagatgttttttatgcgcacacctcaggacctcacaggcaaagatggtgatcttattcttgcagaatatagtgaggaaaatggacccttaatgatgcaggttggcatggcaaccaagataaagaactattataaacggaaacctggaaaagatcctggagcaccagattgtaaatatggggaaactgtttactgccatacatctcctttcctgggttctctccatcctggccaattgctgcaagcatttgagaacaacctttttcgtgctccaatttatcttcataagatgccagaaactgatttcttgatcattcggacaagacagggttactatattcgggaattagtggatatttttgtggttggccagcagtgtcccttgtttgaagttcctgggcctaactccaaaagggccaatacgcatattcgagactttctacaggtttttatttaccgccttttctggaaaagtaaagatcggccacggaggatacgaatggaagatataaaaaaagcctttccttcccattcagaaagcagcatccggaagaggctaaagctctgcgctgacttcaaacgcacagggatggactcaaactggtgggtgcttaagtctgattttcgtttaccaacggaagaagagatcagagctatggtgtcaccagagcagtgctgtgcttattatagcatgatagctgcagagcaacgactgaaggatgctggctatggtgagaaatccttttttgctccagaagaagaaaatgaggaagatttccagatgaagattgatgatgaagttcgcactgccccttggaacaccacaagggccttcattgctgccatgaagggcaagtgtctgctagaggtgactggggtggcagatcccacggggtgtggtgaaggattctcctatgtgaagattccaaacaaaccaacacagcagaaggatgataaagaaccgcagccagtgaagaagacagtgacaggaacagatgcagaccttcgtcgcctttccctgaaaaatgccaagcaacttctacgtaaatttggtgtgcctgaggaagagattaaaaagttgtcccgctgggaagtgattgatgtggtgcgcacaatgtcaacagaacaggctcgttctggagaggggcccatgagtaaatttgcccgtggatcaaggttttctgtggctgagcatcaagagcgttacaaagaggaatgtcagcgcatctttgacctacagaacaaggttctgtcatcaactgaagtcttatcaactgacacagacagcagctcagctgaagatagtgactttgaagaaatgggaaagaacattgagaacatgttgcagaacaagaaaaccagctctcagctttcacgtgaacgggaggaacaggagcggaaggaactacagcgaatgctactggcagcaggctcagcagcatccggaaacaatcacagagatgatgacacagcttccgtgactagccttaactcttctgccactggacgctgtctcaagatttatcgcacgtttcgagatgaagaggggaaagagtatgttcgctgtgagacagtccgaaaaccagctgtcattgatgcctatgtgcgcatacggactacaaaagatgaggaattcattcgaaaatttgccctttttgatgaacaacatcgggaagagatgcgaaaagaacggcggaggattcaagagcaactgaggcggcttaagaggaaccaggaaaaggagaagcttaagggtcctcctgagaagaagcccaagaaaatgaaggagcgtcctgacctaaaactgaaatgtggggcatgtggtgccattggacacatgaggactaacaaattctgccccctctattatcaaacaaatgcgccaccttccaaccctgttgccatgacagaagaacaggaggaggagttggaaaagacagtcattcataatgataatgaagaacttatcaaggttgaagggaccaaaattgtcttggggaaacagctaattgagagtgcggatgaggttcgcagaaaatctctggttctcaagtttcctaaacagcagcttcctccaaagaagaaacggcgagttggaaccactgttcactgtgactatttgaatagacctcataagtccatccaccggcgccgcacagaccctatggtgacgctgtcgtccatcttggagtctatcatcaatgacatgagagatcttccaaatacataccctttccacactccagtcaatgcaaaggttgtaaaggactactacaaaatcatcactcggccaatggacctacaaacactccgcgaaaacgtgcgtaaacgcctctacccatctcgggaagagttcagagagcatctggagctaattgtgaaaaatagtgcaacctacaatgggccaaaacactcattgactcagatctctcaatccatgctggatctctgtgatgaaaaactcaaagagaaagaagacaaattagctcgcttagagaaagctatcaaccccttgctggatgatgatgaccaagtggcgttttctttcattctggacaacattgtcacccagaaaatgatggcagttccagattcttggccatttcatcacccagttaataagaaatttgttccagattattacaaagtgattgtcaatccaatggatttagagaccatacgtaagaacatctccaagcacaagtatcagagtcgggagagctttctggatgatgtaaaccttattctggccaacagtgttaagtataatggacctgagagtcagtatactaagactgcccaggagattgtgaacgtctgttaccagacattgactgagtatgatgaacatttgactcaacttgagaaggatatttgtactgctaaagaagcagctttggaggaagcagaattagaaagcctggacccaatgaccccagggccctacacgcctcagcctcctgatttgtatgataccaacacatccctcagtatgtctcgagatgcctctgtatttcaagatgagagcaatatgtctgtcttggatattcccagtgccactccagaaaagcaggtaacacaggaaggtgaagatggagatggtgatcttgcagatgaagaggaaggaactgtacaacagcctcaagccagtgtcctgtatgaggatttgcttatgtctgaaggagaagatgatgaggaagatgctgggagtgatgaagaaggagacaatcctttctctgctatccagctgagtgaaagtggaagtgactctgatgtgggatctggtggaataagacccaaacaaccccgcatgcttcaggagaacacaaggatggacatggaaaatgaagaaagcatgatgtcctatgagggagacggtggggaggcttcccatggtttggaggatagcaacatcagttatgggagctatgaggagcctgatcccaagtcgaacacccaagacacaagcttcagcagcatcggtgggtatgaggtatcagaggaggaagaagatgaggaggaggaagagcagcgctctgggccgagcgtactaagccaggtccacctgtcagaggacgaggaggacagtgaggatttccactccattgctggggacagtgacttggactctgatgaatga

SEQ ID NO: 188964 - DNA, 2199 bp, Homo sapiens
  Payload ID: 17320
  Gene Symbol: TAF1
  Gene Name: TAF1 RNA polymerase II, TATA box binding protein (TBP)-associated factor, 250kDa
  ENST ID: ENST00000373775
  CDS Start-End: 1-1376
ctaaacagcagcttcctccaaagaagaaacggcgagttggaaccactgttcactgtgactatttgaatagacctcataagtccatccaccggcgccgcacagaccctatggtgacgctgtcgtccatcttggagtctatcatcaatgacatgagagatcttccaaatacataccctttccacactccagtcaatgcaaaggttgtaaaggactactacaaaatcatcactcggccaatggacctacaaacactccgcgaaaacgtgcgtaaacgcctctacccatctcgggaagagttcagagagcatctggagctaattgtgaaaaatagtgcaacctacaatgggccaaaacactcattgactcagatctctcaatccatgctggatctctgtgatgaaaaactcaaagagaaagaagacaaattagctcgcttagagaaagctatcaaccccttgctggatgatgatgaccaagtggcgttttctttcattctggacaacattgtcacccagaaaatgatggcagttccagattcttggccatttcatcacccagttaataagaaatttgttccagattattacaaagtgattgtcaatccaatggatttagagaccatacgtaagaacatctccaagcacaagtatcagagtcgggagagctttctggatgatgtaaaccttattctggccaacagtgttaagtataatggacctgagagtcagtatactaagactgcccaggagattgtgaacgtctgttaccagacattgactgagtatgatgaacatttgactcaacttgagaaggatatttgtactgctaaagaagcagctttggaggaagcagaattagaaagcctggacccaatgaccccagggccctacacgcctcaggctaagcctcctgatttgtatgataccaacacatccctcagtatgtctcgagatgcctctgtatttcaagatgagagcaatatgtctgtcttggatattcccagtgccactccagaaaagcaggtaacacaggaaggtgaagatggagatggtgatcttgcagatgaagaggaaggaactgtacaacagcctcaagccagtgtcctgtatgaggatttgcttatgtctgaaggagaagatgatgaggaagatgctgggagtgatgaagaaggagacaatcctttctctgctatccagctgagtgaaagtggaagtgactctgatgtgggatctggtggaataagacccaaacaaccccgcatgcttcaggagaacacaaggatggacatggaaaatgaagaaagcatgatgtcctatgagggagacggtggggaggcttcccatggtttggaggatagcaacatcaggtaccaatgaacaagccattcagagatggatccacaaagatctctggagcaacgaccaggtcctgctctacccgattctcagctttggggatagaattcccagaaacatctgtgtccggagttggttccttccagtgggttcttggtcttgctgacttcaagaatgaagccgtggaccttcgcgcttcaggctgaagatagtgaaaatccgtgccagacttggattggaagaatgaaccaaggctttgagtctcttcgtctcatctccgttttgatacgtgtctccttagtttgtaagccaaggagaggactacagtgaggattgtggagggaagtggaccttattggtctttgagctctcacatctttaaagactgttggtgctgagagaaaaagtatcctcatctggcagaactcccatagggtgtgctccccttgctgttctgcttttgttttgcagaaagctgcctttttcaatgtactcattaggctttcattgttttttccttttttacctttttcatctttcactgttgatatcacaggtggccatatctttaccagtgcagctaccaaataagaaatcatcttttccacattcactagttagtgatggttgttgtactaccatgaaatcagtttcttctttacttttattcaggttacaagatttctggaaggttttaagatcaattttaattagtctttgtgactggttacttcatccaggggaccaatttctctctggaatattagtcccgcacccctggagagcctgtgcggctgcatctccctccggaggtggttctggagttggttccttttggtgggtt

SEQ ID NO: 188965 - DNA, 7629 bp, Homo sapiens
  Payload ID: 17320
  Gene Symbol: TAF1
  Gene Name: TAF1 RNA polymerase II, TATA box binding protein (TBP)-associated factor, 250kDa
  Uniprot ID: P21675
  ENST ID: ENST00000373790
  CDS Start-End: 52-5670
aagggagctcagtaagtcacttctgggcgactgttgttttatttccggtctatgggacccggctgcgatttgctgctgcggacagcagctaccatcactgctgccgccatcatgtcagacacggacagcgacgaagattccgctggaggcggcccattttctttagcgggtttccttttcggcaacatcaatggagccgggcagctggagggggaaagcgtcttggatgatgaatgtaagaagcacttggcaggcttgggggctttggggctgggcagcctgatcactgaactcacggcaaatgaagaattgaccgggactgacggtgccttggtaaatgatgaagggtgggttaggagtacagaagatgctgtggactattcagacatcaatgaggtggcagaagatgaaagccgaagataccagcagacgatggggagcttgcagcccctttgccactcagattatgatgaagatgactatgatgctgattgtgaagacattgattgcaagttgatgcctcctccacctccacccccgggaccaatgaagaaggataaggaccaggattctattactggtgagaaagtggacttcagtagttcctctgactcagaatctgagatgggacctcaggaagcaacacaggcagaatctgaagatggaaagctgacccttccattggctgggattatgcagcatgatgccaccaagctgttgccaagtgtcacagaactttttccagaatttcgacctggaaaggtgttacgttttctacgtctttttggaccagggaagaatgtcccatctgtttggcggagtgctcggagaaagaggaagaagaagcaccgtgagctgatacaggaagagcagatccaggaggtggagtgctcagtagaatcagaagtcagccagaagtctttgtggaactacgactacgctccaccaccacctccagagcagtgtctctctgatgatgaaatcacgatgatggctcctgtggagtccaaattttcccaatcaactggagatatagataaagtgacagataccaaaccaagagtggctgagtggcgttatgggcctgcccgactgtggtatgatatgctgggtgtccctgaagatggcagtgggtttgactatggcttcaaactgagaaagacagaacatgaacctgtgataaaatctagaatgatagaggaatttaggaaacttgaggaaaacaatggcactgatcttctggctgatgaaaacttcctgatggtgacacagctgcattgggaggatgatatcatctgggatggggaggatgtcaaacacaaagggacaaaacctcagcgtgcaagcctggcaggctggcttccttctagcatgactaggaatgcgatggcttacaatgttcagcaaggttttgcagccactcttgatgatgacaaaccttggtactccatttttcccattgacaatgaggatctggtatatggacgctgggaggacaatatcatttgggatgctcaggccatgccccggctgttggaacctcctgttttgacacttgatcccaatgatgagaacctcattttggaaattcctgatgagaaggaagaggccacctctaactccccctccaaggagagtaagaaggaatcatctctgaagaagagtcgaattctcttagggaaaacaggagtcatcaaggaggaaccacagcagaacatgtctcagccagaagtgaaagatccatggaatctctccaatgatgagtattattatcccaagcaacagggtcttcgaggcacctttggagggaatattatccagcattcaattcctgctgtggaattacggcagcccttctttcccacccacatggggcccatcaaactccggcagttccatcgcccacctctgaaaaagtactcatttggtgcactttctcagccaggtccccactcagtccaacctttgctaaagcacatcaaaaaaaaggccaagatgagagaacaagagaggcaagcttcaggtggtggagagatgttttttatgcgcacacctcaggacctcacaggcaaagatggtgatcttattcttgcagaatatagtgaggaaaatggacccttaatgatgcaggttggcatggcaaccaagataaagaactattataaacggaaacctggaaaagatcctggagcaccagattgtaaatatggggaaactgtttactgccatacatctcctttcctgggttctctccatcctggccaattgctgcaagcatttgagaacaacctttttcgtgctccaatttatcttcataagatgccagaaactgatttcttgatcattcggacaagacagggttactatattcgggaattagtggatatttttgtggttggccagcagtgtcccttgtttgaagttcctgggcctaactccaaaagggccaatacgcatattcgagactttctacaggtttttatttaccgccttttctggaaaagtaaagatcggccacggaggatacgaatggaagatataaaaaaagcctttccttcccattcagaaagcagcatccggaagaggctaaagctctgcgctgacttcaaacgcacagggatggactcaaactggtgggtgcttaagtctgattttcgtttaccaacggaagaagagatcagagctatggtgtcaccagagcagtgctgtgcttattatagcatgatagctgcagagcaacgactgaaggatgctggctatggtgagaaatccttttttgctccagaagaagaaaatgaggaagatttccagatgaagattgatgatgaagttcgcactgccccttggaacaccacaagggccttcattgctgccatgaagggcaagtgtctgctagaggtgactggggtggcagatcccacggggtgtggtgaaggattctcctatgtgaagattccaaacaaaccaacacagcagaaggatgataaagaaccgcagccagtgaagaagacagtgacaggaacagatgcagaccttcgtcgcctttccctgaaaaatgccaagcaacttctacgtaaatttggtgtgcctgaggaagagattaaaaagttgtcccgctgggaagtgattgatgtggtgcgcacaatgtcaacagaacaggctcgttctggagaggggcccatgagtaaatttgcccgtggatcaaggttttctgtggctgagcatcaagagcgttacaaagaggaatgtcagcgcatctttgacctacagaacaaggttctgtcatcaactgaagtcttatcaactgacacagacagcagctcagctgaagatagtgactttgaagaaatgggaaagaacattgagaacatgttgcagaacaagaaaaccagctctcagctttcacgtgaacgggaggaacaggagcggaaggaactacagcgaatgctactggcagcaggctcagcagcatccggaaacaatcacagagatgatgacacagcttccgtgactagccttaactcttctgccactggacgctgtctcaagatttatcgcacgtttcgagatgaagaggggaaagagtatgttcgctgtgagacagtccgaaaaccagctgtcattgatgcctatgtgcgcatacggactacaaaagatgaggaattcattcgaaaatttgccctttttgatgaacaacatcgggaagagatgcgaaaagaacggcggaggattcaagagcaactgaggcggcttaagaggaaccaggaaaaggagaagcttaagggtcctcctgagaagaagcccaagaaaatgaaggagcgtcctgacctaaaactgaaatgtggggcatgtggtgccattggacacatgaggactaacaaattctgccccctctattatcaaacaaatgcgccaccttccaaccctgttgccatgacagaagaacaggaggaggagttggaaaagacagtcattcataatgataatgaagaacttatcaaggttgaagggaccaaaattgtcttggggaaacagctaattgagagtgcggatgaggttcgcagaaaatctctggttctcaagtttcctaaacagcagcttcctccaaagaagaaacggcgagttggaaccactgttcactgtgactatttgaatagacctcataagtccatccaccggcgccgcacagaccctatggtgacgctgtcgtccatcttggagtctatcatcaatgacatgagagatcttccaaatacataccctttccacactccagtcaatgcaaaggttgtaaaggactactacaaaatcatcactcggccaatggacctacaaacactccgcgaaaacgtgcgtaaacgcctctacccatctcgggaagagttcagagagcatctggagctaattgtgaaaaatagtgcaacctacaatgggccaaaacactcattgactcagatctctcaatccatgctggatctctgtgatgaaaaactcaaagagaaagaagacaaattagctcgcttagagaaagctatcaaccccttgctggatgatgatgaccaagtggcgttttctttcattctggacaacattgtcacccagaaaatgatggcagttccagattcttggccatttcatcacccagttaataagaaatttgttccagattattacaaagtgattgtcaatccaatggatttagagaccatacgtaagaacatctccaagcacaagtatcagagtcgggagagctttctggatgatgtaaaccttattctggccaacagtgttaagtataatggacctgagagtcagtatactaagactgcccaggagattgtgaacgtctgttaccagacattgactgagtatgatgaacatttgactcaacttgagaaggatatttgtactgctaaagaagcagctttggaggaagcagaattagaaagcctggacccaatgaccccagggccctacacgcctcagcctcctgatttgtatgataccaacacatccctcagtatgtctcgagatgcctctgtatttcaagatgagagcaatatgtctgtcttggatattcccagtgccactccagaaaagcaggtaacacaggaaggtgaagatggagatggtgatcttgcagatgaagaggaaggaactgtacaacagcctcaagccagtgtcctgtatgaggatttgcttatgtctgaaggagaagatgatgaggaagatgctgggagtgatgaagaaggagacaatcctttctctgctatccagctgagtgaaagtggaagtgactctgatgtgggatctggtggaataagacccaaacaaccccgcatgcttcaggagaacacaaggatggacatggaaaatgaagaaagcatgatgtcctatgagggagacggtggggaggcttcccatggtttggaggatagcaacatcagttatgggagctatgaggagcctgatcccaagtcgaacacccaagacacaagcttcagcagcatcggtgggtatgaggtatcagaggaggaagaagatgaggaggaggaagagcagcgctctgggccgagcgtactaagccaggtccacctgtcagaggacgaggaggacagtgaggatttccactccattgctggggacagtgacttggactctgatgaatgaggcttcctttgggcctccttggtcagccttccctgttctccagcctaggtggttcacctttccccaatttgttcatatttgtacagtatctgatcctgaaatcatgaaattaactaacaccttagcctttttaaaagtagtaagtaaatgataataaatcacctctcctaatcttcctggggcaatgtcaccctttgatttaaaacaaagcaaccccctttcccctaccactacggaaaagagcaagctcatttttccgtgtcctcctttatttaactccatttattgcttttggtataatttttccctggggaaggaggggaaattatgaaagaactagtaactttatgtcctcttgatgtattaggaaatttccggccaggcgtggtggctcacacctgtaatctcagcactctgggaggccgaggcgggcagatcacctgaggtcagaagttcgagaccagcttggccaacatggcgaaaccgcatctctactaaaaatacaaaaattagccaggtgtggtggcgtatgcctgttaatcctagctactcgggaggctgaggcaggagaattacttgaacccgggaggcagaggttgcagtgagtggaggtcacgccactgcactccagcctgggcgaaagagtgagattcagtctcaaaaaaaaaaaaatttccaagcatggtatcatctcacttttctaatttacaggctggagcagatgagagccctcctgctgggacagagaattgggttctagtggactctgtgctacacttaaacctgtgagacaaaccgcccattattttattatttaattatgcaatgcctagttcctaaatggattggaggcaaattaccgtaaattttgaaacagcctatatgtcagaaatgataatgttgccacctaaatgttttctgtcccccccaccctccccaggggaaatggtaggaaaatggtaagtttcttagggcaaagactgtgtcttctgtttcttttcatgcttaggatatggttctgtgcatagtaggtactcagtaaatgttcctagaatcataaaatcctcaacagatatgttactgagcatctgcttttcatgataagcactctatcagatccttgggatgcaaaggtaaataagacaaatcccttttacccaaagagctcaccatcaagttgggggagggaaagtggaattcaaaacatgttaataaatcatcatagtactgtgagataagtgcaattaagaagctagttataaagtataggggaaatagaggagtaatcatgtctgaaaagtcaggaaagtcttcctagaggtaatttttaagctgattgttttagaattagtagaagcttgccagatggaaaagtccaggcaaagtgtaacatgaatgggaaaggccacagtctagaaatggcagagtgtgttcctagtttgtttgtttgtttgtttgtacctgccttgttccaggaaggatttaatgtggtttatattccagtcctttaatgctggaagggctgagatgagactgaaagatgggcaggaagtatatcatcacaagctttgtgtttgatgttaatgtgtatgatttttatattatgggaaataagctcttagaggagtgatataatcaggtttgtgttttagaaatctgtgtaatgaatgaatgaagaaagaaattgaagaatcatgtaacatatgtgatcgcatttttgtaaaagaaccatgtgtgtttatatgtgtttatatatatacttgtgtatgcaaaggtaaaagtctgaaaggatatatgctaactgttcacaatgataaccccccaggaatgggattggaggggagggggcttctgtgtttgttatgtatgctgggtgggatattgtgcttttatttctatattgtttgaatttttttacagtatgtattatttttgtaataaaaattttaaaaaattcca

SEQ ID NO: 188966 - DNA, 2295 bp, Homo sapiens
  Payload ID: 17320
  Gene Symbol: TAF1
  Gene Name: TAF1 RNA polymerase II, TATA box binding protein (TBP)-associated factor, 250kDa
  ENST ID: ENST00000437147
  CDS Start-End: 1-1472
ctaaacagcagcttcctccaaagaagaaacggcgagttggaaccactgttcactgtgactatttgaatagacctcataagtccatccaccggcgccgcacagaccctatggtgacgctgtcgtccatcttggagtctatcatcaatgacatgagagatcttccaaatacataccctttccacactccagtcaatgcaaaggttgtaaaggactactacaaaatcatcactcggccaatggacctacaaacactccgcgaaaacgtgcgtaaacgcctctacccatctcgggaagagttcagagagcatctggagctaattgtgaaaaatagtgcaacctacaatgggccaaaacactcattgactcagatctctcaatccatgctggatctctgtgatgaaaaactcaaagagaaagaagacaaattagctcgcttagagaaagctatcaaccccttgctggatgatgatgaccaagtggcgttttctttcattctggacaacattgtcacccagaaaatgatggcagttccagattcttggccatttcatcacccagttaataagaaatttgttccagattattacaaagtgattgtcaatccaatggatttagagaccatacgtaagaacatctccaagcacaagtatcagagtcgggagagctttctggatgatgtaaaccttattctggccaacagtgttaagtataatggacctgagagtcagtatactaagactgcccaggagattgtgaacgtctgttaccagacattgactgagtatgatgaacatttgactcaacttgagaaggatatttgtactgctaaagaagcagctttggaggaagcagaattagaaagcctggacccaatgaccccagggccctacacgcctcagcctcctgatttgtatgataccaacacatccctcagtatgtctcgagatgcctctgtatttcaagatgagagcaatatgtctgtcttggatattcccagtgccactccagaaaagcaggtaacacagatgcgccagggccgaggtaggctgggcgaggaagactctgatgtagatattgaagggtatgatgatgaggaggaggatgggaaacctaagactccagccccagaaggtgaagatggagatggtgatcttgcagatgaagaggaaggaactgtacaacagcctcaagccagtgtcctgtatgaggatttgcttatgtctgaaggagaagatgatgaggaagatgctgggagtgatgaagaaggagacaatcctttctctgctatccagctgagtgaaagtggaagtgactctgatgtgggatctggtggaataagacccaaacaaccccgcatgcttcaggagaacacaaggatggacatggaaaatgaagaaagcatgatgtcctatgagggagacggtggggaggcttcccatggtttggaggatagcaacatcaggtaccaatgaacaagccattcagagatggatccacaaagatctctggagcaacgaccaggtcctgctctacccgattctcagctttggggatagaattcccagaaacatctgtgtccggagttggttccttccagtgggttcttggtcttgctgacttcaagaatgaagccgtggaccttcgcgcttcaggctgaagatagtgaaaatccgtgccagacttggattggaagaatgaaccaaggctttgagtctcttcgtctcatctccgttttgatacgtgtctccttagtttgtaagccaaggagaggactacagtgaggattgtggagggaagtggaccttattggtctttgagctctcacatctttaaagactgttggtgctgagagaaaaagtatcctcatctggcagaactcccatagggtgtgctccccttgctgttctgcttttgttttgcagaaagctgcctttttcaatgtactcattaggctttcattgttttttccttttttacctttttcatctttcactgttgatatcacaggtggccatatctttaccagtgcagctaccaaataagaaatcatcttttccacattcactagttagtgatggttgttgtactaccatgaaatcagtttcttctttacttttattcaggttacaagatttctggaaggttttaagatcaattttaattagtctttgtgactggttacttcatccaggggaccaatttctctctggaatattagtcccgcacccctggagagcctgtgcggctgcatctccctccggaggtggttctggagttggttccttttggtgggtt

SEQ ID NO: 188967 - DNA, 7722 bp, Homo sapiens
  Payload ID: 17320
  Gene Symbol: TAF1
  Gene Name: TAF1 RNA polymerase II, TATA box binding protein (TBP)-associated factor, 250kDa
  Uniprot ID: P21675
  ENST ID: ENST00000423759
  CDS Start-End: 77-5764
agcttccggtagaggctggtagggtaagggagctcagtaagtcacttctgggcgactgttgttttatttccggtctatgggacccggctgcgatttgctgctgcggacagcagctaccatcactgctgccgccatcatgtcagacacggacagcgacgaagattccgctggaggcggcccattttctttagcgggtttccttttcggcaacatcaatggagccgggcagctggagggggaaagcgtcttggatgatgaatgtaagaagcacttggcaggcttgggggctttggggctgggcagcctgatcactgaactcacggcaaatgaagaattgaccgggactgacggtgccttggtaaatgatgaagggtgggttaggagtacagaagatgctgtggactattcagacatcaatgaggtggcagaagatgaaagccgaagataccagcagacgatggggagcttgcagcccctttgccactcagattatgatgaagatgactatgatgctgattgtgaagacattgattgcaagttgatgcctcctccacctccacccccgggaccaatgaagaaggataaggaccaggattctattactggtgtgtctgaaaatggagaaggcatcatcttgccctccatcattgccccttcctctttggcctcagagaaagtggacttcagtagttcctctgactcagaatctgagatgggacctcaggaagcaacacaggcagaatctgaagatggaaagctgacccttccattggctgggattatgcagcatgatgccaccaagctgttgccaagtgtcacagaactttttccagaatttcgacctggaaaggtgttacgttttctacgtctttttggaccagggaagaatgtcccatctgtttggcggagtgctcggagaaagaggaagaagaagcaccgtgagctgatacaggaagagcagatccaggaggtggagtgctcagtagaatcagaagtcagccagaagtctttgtggaactacgactacgctccaccaccacctccagagcagtgtctctctgatgatgaaatcacgatgatggctcctgtggagtccaaattttcccaatcaactggagatatagataaagtgacagataccaaaccaagagtggctgagtggcgttatgggcctgcccgactgtggtatgatatgctgggtgtccctgaagatggcagtgggtttgactatggcttcaaactgagaaagacagaacatgaacctgtgataaaatctagaatgatagaggaatttaggaaacttgaggaaaacaatggcactgatcttctggctgatgaaaacttcctgatggtgacacagctgcattgggaggatgatatcatctgggatggggaggatgtcaaacacaaagggacaaaacctcagcgtgcaagcctggcaggctggcttccttctagcatgactaggaatgcgatggcttacaatgttcagcaaggttttgcagccactcttgatgatgacaaaccttggtactccatttttcccattgacaatgaggatctggtatatggacgctgggaggacaatatcatttgggatgctcaggccatgccccggctgttggaacctcctgttttgacacttgatcccaatgatgagaacctcattttggaaattcctgatgagaaggaagaggccacctctaactccccctccaaggagagtaagaaggaatcatctctgaagaagagtcgaattctcttagggaaaacaggagtcatcaaggaggaaccacagcagaacatgtctcagccagaagtgaaagatccatggaatctctccaatgatgagtattattatcccaagcaacagggtcttcgaggcacctttggagggaatattatccagcattcaattcctgctgtggaattacggcagcccttctttcccacccacatggggcccatcaaactccggcagttccatcgcccacctctgaaaaagtactcatttggtgcactttctcagccaggtccccactcagtccaacctttgctaaagcacatcaaaaaaaaggccaagatgagagaacaagagaggcaagcttcaggtggtggagagatgttttttatgcgcacacctcaggacctcacaggcaaagatggtgatcttattcttgcagaatatagtgaggaaaatggacccttaatgatgcaggttggcatggcaaccaagataaagaactattataaacggaaacctggaaaagatcctggagcaccagattgtaaatatggggaaactgtttactgccatacatctcctttcctgggttctctccatcctggccaattgctgcaagcatttgagaacaacctttttcgtgctccaatttatcttcataagatgccagaaactgatttcttgatcattcggacaagacagggttactatattcgggaattagtggatatttttgtggttggccagcagtgtcccttgtttgaagttcctgggcctaactccaaaagggccaatacgcatattcgagactttctacaggtttttatttaccgccttttctggaaaagtaaagatcggccacggaggatacgaatggaagatataaaaaaagcctttccttcccattcagaaagcagcatccggaagaggctaaagctctgcgctgacttcaaacgcacagggatggactcaaactggtgggtgcttaagtctgattttcgtttaccaacggaagaagagatcagagctatggtgtcaccagagcagtgctgtgcttattatagcatgatagctgcagagcaacgactgaaggatgctggctatggtgagaaatccttttttgctccagaagaagaaaatgaggaagatttccagatgaagattgatgatgaagttcgcactgccccttggaacaccacaagggccttcattgctgccatgaagggcaagtgtctgctagaggtgactggggtggcagatcccacggggtgtggtgaaggattctcctatgtgaagattccaaacaaaccaacacagcagaaggatgataaagaaccgcagccagtgaagaagacagtgacaggaacagatgcagaccttcgtcgcctttccctgaaaaatgccaagcaacttctacgtaaatttggtgtgcctgaggaagagattaaaaagttgtcccgctgggaagtgattgatgtggtgcgcacaatgtcaacagaacaggctcgttctggagaggggcccatgagtaaatttgcccgtggatcaaggttttctgtggctgagcatcaagagcgttacaaagaggaatgtcagcgcatctttgacctacagaacaaggttctgtcatcaactgaagtcttatcaactgacacagacagcagctcagctgaagatagtgactttgaagaaatgggaaagaacattgagaacatgttgcagaacaagaaaaccagctctcagctttcacgtgaacgggaggaacaggagcggaaggaactacagcgaatgctactggcagcaggctcagcagcatccggaaacaatcacagagatgatgacacagcttccgtgactagccttaactcttctgccactggacgctgtctcaagatttatcgcacgtttcgagatgaagaggggaaagagtatgttcgctgtgagacagtccgaaaaccagctgtcattgatgcctatgtgcgcatacggactacaaaagatgaggaattcattcgaaaatttgccctttttgatgaacaacatcgggaagagatgcgaaaagaacggcggaggattcaagagcaactgaggcggcttaagaggaaccaggaaaaggagaagcttaagggtcctcctgagaagaagcccaagaaaatgaaggagcgtcctgacctaaaactgaaatgtggggcatgtggtgccattggacacatgaggactaacaaattctgccccctctattatcaaacaaatgcgccaccttccaaccctgttgccatgacagaagaacaggaggaggagttggaaaagacagtcattcataatgataatgaagaacttatcaaggttgaagggaccaaaattgtcttggggaaacagctaattgagagtgcggatgaggttcgcagaaaatctctggttctcaagtttcctaaacagcagcttcctccaaagaagaaacggcgagttggaaccactgttcactgtgactatttgaatagacctcataagtccatccaccggcgccgcacagaccctatggtgacgctgtcgtccatcttggagtctatcatcaatgacatgagagatcttccaaatacataccctttccacactccagtcaatgcaaaggttgtaaaggactactacaaaatcatcactcggccaatggacctacaaacactccgcgaaaacgtgcgtaaacgcctctacccatctcgggaagagttcagagagcatctggagctaattgtgaaaaatagtgcaacctacaatgggccaaaacactcattgactcagatctctcaatccatgctggatctctgtgatgaaaaactcaaagagaaagaagacaaattagctcgcttagagaaagctatcaaccccttgctggatgatgatgaccaagtggcgttttctttcattctggacaacattgtcacccagaaaatgatggcagttccagattcttggccatttcatcacccagttaataagaaatttgttccagattattacaaagtgattgtcaatccaatggatttagagaccatacgtaagaacatctccaagcacaagtatcagagtcgggagagctttctggatgatgtaaaccttattctggccaacagtgttaagtataatggacctgagagtcagtatactaagactgcccaggagattgtgaacgtctgttaccagacattgactgagtatgatgaacatttgactcaacttgagaaggatatttgtactgctaaagaagcagctttggaggaagcagaattagaaagcctggacccaatgaccccagggccctacacgcctcaggctaagcctcctgatttgtatgataccaacacatccctcagtatgtctcgagatgcctctgtatttcaagatgagagcaatatgtctgtcttggatattcccagtgccactccagaaaagcaggtaacacaggaaggtgaagatggagatggtgatcttgcagatgaagaggaaggaactgtacaacagcctcaagccagtgtcctgtatgaggatttgcttatgtctgaaggagaagatgatgaggaagatgctgggagtgatgaagaaggagacaatcctttctctgctatccagctgagtgaaagtggaagtgactctgatgtgggatctggtggaataagacccaaacaaccccgcatgcttcaggagaacacaaggatggacatggaaaatgaagaaagcatgatgtcctatgagggagacggtggggaggcttcccatggtttggaggatagcaacatcagttatgggagctatgaggagcctgatcccaagtcgaacacccaagacacaagcttcagcagcatcggtgggtatgaggtatcagaggaggaagaagatgaggaggaggaagagcagcgctctgggccgagcgtactaagccaggtccacctgtcagaggacgaggaggacagtgaggatttccactccattgctggggacagtgacttggactctgatgaatgaggcttcctttgggcctccttggtcagccttccctgttctccagcctaggtggttcacctttccccaatttgttcatatttgtacagtatctgatcctgaaatcatgaaattaactaacaccttagcctttttaaaagtagtaagtaaatgataataaatcacctctcctaatcttcctggggcaatgtcaccctttgatttaaaacaaagcaaccccctttcccctaccactacggaaaagagcaagctcatttttccgtgtcctcctttatttaactccatttattgcttttggtataatttttccctggggaaggaggggaaattatgaaagaactagtaactttatgtcctcttgatgtattaggaaatttccggccaggcgtggtggctcacacctgtaatctcagcactctgggaggccgaggcgggcagatcacctgaggtcagaagttcgagaccagcttggccaacatggcgaaaccgcatctctactaaaaatacaaaaattagccaggtgtggtggcgtatgcctgttaatcctagctactcgggaggctgaggcaggagaattacttgaacccgggaggcagaggttgcagtgagtggaggtcacgccactgcactccagcctgggcgaaagagtgagattcagtctcaaaaaaaaaaaaatttccaagcatggtatcatctcacttttctaatttacaggctggagcagatgagagccctcctgctgggacagagaattgggttctagtggactctgtgctacacttaaacctgtgagacaaaccgcccattattttattatttaattatgcaatgcctagttcctaaatggattggaggcaaattaccgtaaattttgaaacagcctatatgtcagaaatgataatgttgccacctaaatgttttctgtcccccccaccctccccaggggaaatggtaggaaaatggtaagtttcttagggcaaagactgtgtcttctgtttcttttcatgcttaggatatggttctgtgcatagtaggtactcagtaaatgttcctagaatcataaaatcctcaacagatatgttactgagcatctgcttttcatgataagcactctatcagatccttgggatgcaaaggtaaataagacaaatcccttttacccaaagagctcaccatcaagttgggggagggaaagtggaattcaaaacatgttaataaatcatcatagtactgtgagataagtgcaattaagaagctagttataaagtataggggaaatagaggagtaatcatgtctgaaaagtcaggaaagtcttcctagaggtaatttttaagctgattgttttagaattagtagaagcttgccagatggaaaagtccaggcaaagtgtaacatgaatgggaaaggccacagtctagaaatggcagagtgtgttcctagtttgtttgtttgtttgtttgtacctgccttgttccaggaaggatttaatgtggtttatattccagtcctttaatgctggaagggctgagatgagactgaaagatgggcaggaagtatatcatcacaagctttgtgtttgatgttaatgtgtatgatttttatattatgggaaataagctcttagaggagtgatataatcaggtttgtgttttagaaatctgtgtaatgaatgaatgaagaaagaaattgaagaatcatgtaacatatgtgatcgcatttttgtaaaagaaccatgtgtgtttatatgtgtttatatatatacttgtgtatgcaaaggtaaaagtctgaaaggatatatgctaactgttcacaatgataaccccccaggaatgggattggaggggagggggcttctgtgtttgttatgtatgctgggtgggatattgtgcttttatttctatattgtttgaatttttttacagtatgtattatttttgtaataaaaattttaaaaaattcc

SEQ ID NO: 188968 - DNA, 498 bp, Homo sapiens
  Payload ID: 17320
  Gene Symbol: TAF1
  Gene Name: TAF1 RNA polymerase II, TATA box binding protein (TBP)-associated factor, 250kDa
  ENST ID: ENST00000463163
  CDS Start-End: 1-452
aggttcgcagaaaatctctggttctcaagtttcctaaacagcagcttcctccaaagaagaaacggcgagttggaaccactgttcactgtgactatttgaatagacctcataagtccatccaccggcgccgcacagaccctatggtgacgctgtcgtccatcttggagtctatcatcaatgacatgagagatcttccaaatacataccctttccacactccagtcaatgcaaaggttgtaaaggactactacaaaatcatcactcggccaatggacctacaaacactccgcgaaaacgtgcgtaaacgcctctacccatctcgggaagagttcagagagcatctggagctaattgtgaaaaatagtgcaacctacaatggaataggcataaggatcaaacacacaaggtcgatagaaaaggggcacagtcatcaccaccttcctcgagaatagccttctttgactttcctgatctggataaatgtatttcccctctgaa

SEQ ID NO: 188969 - DNA, 836 bp, Homo sapiens
  Payload ID: 17320
  Gene Symbol: TAF1
  Gene Name: TAF1 RNA polymerase II, TATA box binding protein (TBP)-associated factor, 250kDa
  ENST ID: ENST00000483985
  CDS Start-End: 1-836
gcagctcagctgaagatagtgactttgaagaaatgggaaagaacattgagaacatgttgcagaacaagaaaaccagctctcagctttcacgtgaacgggaggaacaggagcggaaggaactacagcgaatgctactggcaggctcagcagcatccggaaacaatcacagagatgatgacacagcttccgtgactagccttaactcttctgccactggacgctgtctcaagatttatcgcacgtttcgagatgaagaggggaaagagtatgttcgctgtgagacagtccgaaaaccagctgtcattgatgcctatgtgcgcatacggactacaaaagatgaggaattcattcgaaaatttgccctttttgatgaacaacatcgggaagagatgcgaaaagaacggcggaggattcaagagcaactgaggcggcttaagaggaaccaggaaaaggagaagcttaagggtcctcctgagaagaagcccaagaaaatgaaggagcgtcctgacctaaaactgaaatgtggggcatgtggtgccattggacacatgaggactaacaaattctgccccctctattatcaaacaaatgcgccaccttccaaccctgttgccatgacagaagaacaggaggaggagttggaaaagacagtcattcataatgataatgaagaacttatcaaggttgaagggaccaaaattgtcttggggaaacagctaattgagagtgcggatgaggttcgcagaaaatctctggttctcaagtttcctaaacagcagcttcctccaaagaagaaacggcgagttggaaccactgttcactgtgactatttgaat

SEQ ID NO: 188970 - DNA, 1215 bp, Homo sapiens
  Payload ID: 17321
  Gene Symbol: TAF10
  Gene Name: TAF10 RNA polymerase II, TATA box binding protein (TBP)-associated factor, 30kDa
  Uniprot ID: Q12962
  ENST ID: ENST00000299424
  CDS Start-End: 479-1135
ccccacctctcggggcagctggcggagaagagagggggctttccaaatccactatgaatccttaaaaggctgaataagggaacttgaaacgatgcagacaggcaggcaacccgtagtcgagggacatagggccataaacgtcgaagccaggtcttgagcgtcagacagaatgaggtgtcccagagcggcggaggagagccagacgcacgctggttccggtctggacggaatcgccgcggagcacggcagaggctagggcggaatggctacggcagcgcagttcgccaaggctcggtctccgccctgcagcctatttcctctaacccgcagatccactatgggaggaggcggggagcgggctggagagcactaacagagacaggcggggcgagtcgtgggcgcgtgacgtcaccccggggtgtgcgcggcgcgagcggaagcggaagcggctctgttcgccgcctctcccaccggcccgatgagctgcagcggctccggcgcggaccccgaggcggcgccggcctccgccgcctcggccccgggccccgcgcccccggtctcggctcccgccgcgctgccctccagcaccgccgcggagaacaaggccagccccgcggggacagcggggggacctggggctggagcagctgctgggggcacgggacccttggcggcgcgggccggggagccagctgagcggcgtggggcggctccggtgtcggcgggtggcgcggcgcccccggagggggccatatctaacggggtttacgtactgccgagcgcggccaacggagacgtgaagcccgtggtgtccagcacgcctttggtggacttcttgatgcagctggaagattacacgcctacgatcccagatgcagtgactggttactacctgaaccgtgctggctttgaggcctcagacccacgcataattcggctcatctccttagctgcccagaaattcatctcagatattgccaatgatgccctacagcactgcaaaatgaagggcacggcctccggcagctcccggagcaagagcaaggaccgcaagtacactctaaccatggaggacttgacccctgccctcagcgagtatggcatcaatgtgaagaagccgcactacttcacctgagccacccaacctaaatgtacttatctgtccccatgtccccacaccagcctgttttcataataaactttattgtgacaggc

SEQ ID NO: 188971 - DNA, 425 bp, Homo sapiens
  Payload ID: 17321
  Gene Symbol: TAF10
  Gene Name: TAF10 RNA polymerase II, TATA box binding protein (TBP)-associated factor, 30kDa
  ENST ID: ENST00000527248
  CDS Start-End: 1-348
gccgcctcggccccgggccccgcgcccccggtctcggctcccgccgcgctgccctccagcaccgccgcggagaacaagatcccagatgcagtgactggttactacctgaaccgtgctggctttgaggcctcagacccacgcataattcggctcatctccttagctgcccagaaattcatctcagatattgccaatgatgccctacagcactgcaaaatgaagggcacggcctccggcagctcccggagcaagagcaaggaccgcaagtacactctaaccatggaggacttgacccctgccctcagcgagtatggcatcaatgtgaagaagccgcactacttcacctgagccacccaacctaaatgtacttatctgtccccatgtccccacaccagcctgttttcataataaactttattgtgaca

SEQ ID NO: 188972 - DNA, 1580 bp, Homo sapiens
  Payload ID: 17322
  Gene Symbol: TAF11
  Gene Name: TAF11 RNA polymerase II, TATA box binding protein (TBP)-associated factor, 28kDa
  Uniprot ID: Q15544
  ENST ID: ENST00000361288
  CDS Start-End: 133-768
caggagagcggtaggggtgatgtcatcgctgcgcgacgacaggaagtaagatcctggcctgtgcagctcgggtttccgagcttctgcctcaggcatctccgcgatctcctctcccctccaatcctatccgtgatggacgatgcccacgagtcgccctccgacaaaggtggagagacaggggagtcggatgagacggccgctgtgcccggggacccgggggctaccgacaccgatggaatcccagaggaaactgacggagacgcagatgtggacttgaaagaagctgcagcggaggaaggcgagctcgagagtcaggatgtctcagatttaacaacagttgaaagggaagactcatcattacttaatcctgcagccaaaaaactgaaaatagataccaaagaaaagaaagagaaaaagcagaaagtagatgaagatgagattcagaagatgcaaatcctggtttcttctttttctgaggagcagctgaaccgttatgaaatgtatcgccgctcagctttccctaaggcagccatcaaaaggctgatccagtccatcactggcacctctgtgtctcagaatgttgttattgctatgtctggtatttccaaggttttcgtcggggaggtggtagaagaagcactggatgtgtgtgagaagtggggagaaatgccaccactacaacccaaacatatgagggaagccgttagaaggttaaagtcaaaaggacagatccctaactcgaagcacaaaaaaatcatcttcttctagaccaaagtctagaaaggcctatgttactgacggaagaagtattggttccagacttcctataagactgtctgcattggtgctttagtatctcaggcctccaaggattccatgatgattttaatgtctttctcaaaactctgatatttgtcacacctagaaagtatgtagcctgattgatacttgccttgactaaattttgggacctcttggggcattttgaagtatttaactgtcttgaccagttggaagaagatacgtgggccataagcatcttctggacaggggaactgctttcagagagaaaacctttccaagagagttttgttttgttttggtttcgttttgtttgagatagggtcttgctctatcacctaggctggagtgcagcggcatgactgcagccttgaactcctgggcttaagtgaccctcccacctcagtctcctgagtagctaggactacaggcacacactactgtgcccagctaacttatttttattttttatggagatggggtcttgctttgttgcccaggctggtcgtgaactcctggcttcaagcagtcctcctgcctcagcctcctaaagtgctgagggctttaatggtttcacattgaagcctgaagttgctaagacttaggttgtttcttatatctggttttaagtagatgaaacaaccagaaacttttacttgtgatactctaccatgaaggatgcggtaatggcaggaatagcagaataattggtgcttgtaaacatttaagattctcctgtggattttggtgagtgatcattaaactgttttccaacttgc

SEQ ID NO: 188973 - DNA, 1465 bp, Homo sapiens
  Payload ID: 17322
  Gene Symbol: TAF11
  Gene Name: TAF11 RNA polymerase II, TATA box binding protein (TBP)-associated factor, 28kDa
  Uniprot ID: Q15544
  ENST ID: ENST00000420584
  CDS Start-End: 115-579
gatgtcatcgctgcgcgacgacaggaagtaagatcctggcctgtgcagctcgggtttccgagcttctgcctcaggcatctccgcgatctcctctcccctccaatcctatccgtgatggacgatgcccacgagtcgccctccgacaaaggtggagagacaggggagtcggatgagacggccgctgtgcccggggacccgggggctaccgacaccgatggaatcccagaggaaactgacggagacgcagatgtggacttgaaagaagctgcagcggaggaaggcgagctcgagagtcaggatgtctcagatttaacaacagttgaaagggaagactcatcattacttaatcctgcagccaaaaaactgaaaatagataccaaagaaaagaaagagaaaaagcagaaagtagatgaagatgagattcagaagatgcaaatcctggtttcttctttttctgaggagcagctgaaccgttatgaaatgtatcgccgctcagctttccctaaggcagccatcaaaaggcactggatgtgtgtgagaagtggggagaaatgccaccactacaacccaaacatatgagggaagccgttagaaggttaaagtcaaaaggacagatccctaactcgaagcacaaaaaaatcatcttcttctagaccaaagtctagaaaggcctatgttactgacggaagaagtattggttccagacttcctataagactgtctgcattggtgctttagtatctcaggcctccaaggattccatgatgattttaatgtctttctcaaaactctgatatttgtcacacctagaaagtatgtagcctgattgatacttgccttgactaaattttgggacctcttggggcattttgaagtatttaactgtcttgaccagttggaagaagatacgtgggccataagcatcttctggacaggggaactgctttcagagagaaaacctttccaagagagttttgttttgttttggtttcgttttgtttgagatagggtcttgctctatcacctaggctggagtgcagcggcatgactgcagccttgaactcctgggcttaagtgaccctcccacctcagtctcctgagtagctaggactacaggcacacactactgtgcccagctaacttatttttattttttatggagatggggtcttgctttgttgcccaggctggtcgtgaactcctggcttcaagcagtcctcctgcctcagcctcctaaagtgctgagggctttaatggtttcacattgaagcctgaagttgctaagacttaggttgtttcttatatctggttttaagtagatgaaacaaccagaaacttttacttgtgatactctaccatgaaggatgcggtaatggcaggaatagcagaataattggtgcttgtaaacatttaagattctcctgtggattttggtgagtgatcattaaactgttttccaacttgc

SEQ ID NO: 188974 - DNA, 1359 bp, Homo sapiens
  Payload ID: 17323
  Gene Symbol: TAF12
  Gene Name: TAF12 RNA polymerase II, TATA box binding protein (TBP)-associated factor, 20kDa
  Uniprot ID: Q16514
  ENST ID: ENST00000263974
  CDS Start-End: 436-921
agacgctgctgcctgtgagtcttgggccctggcagttgaggaacaagagcgggaggagggagtcaggacccagacctacagtgggtcagtgttcgaaggaccaggttgtggacgagacggggctgtgaggattcaggctcttgggaagggactgactgagaggatcaggctcggagaagacgcggctgtggggacccgggctctaagacgggacttagggaacggggacggatgcgagttctccggcatctgagggaaagtggtctgagaggagcaggattatgaggacccgcactcctacgaggaaagggtcagaaaggaacggggcgtgaagacacaggctccggagagttaattggccttggtcctcacagctccaaaaagaaacaggatctcgataagctctatgagctgaagtccaaagctcggcagattatgaaccagtttggcccctcagccctaatcaacctctccaatttctcatccataaaaccggaaccagccagcacccctccacaaggctccatggccaatagtactgcagtggtaaagataccaggcactcctggggcaggaggtcgtcttagccctgaaaacaatcaggtattgaccaagaagaaattacaggacttagtaagagaagtggatcctaatgagcagttggatgaagatgtggaggagatgctgctgcagattgctgatgattttatcgagagtgtggtgacagcagcctgtcagcttgcgcggcatcgcaagtctagcaccctggaggtgaaagatgtccagctgcatttagagcgccagtggaacatgtggatcccaggatttggctctgaagaaatccgaccctacaaaaaagcttgcaccacagaagctcacaaacagagaatggcattgatccggaaaacaaccaagaaataacacacggaaaggtcagggaatggacagcaatgtatttggagatacttgagctgagaactcagccatctcatccttggatttttttttttaatgctttacagagaagcatatattttttattaacagtgcagcaatatctataatgactgagaggatctgccaaaagaataaagcctcctaccccaacttccggtcccttttccctgccatctcaaagaggagcaatgtatcttccagagaagattttatttgtggtttattatataagtgactgaatatgggacaaagcattatggtctttttgggtaagacagtattagcaggatttgtaaagggttttgtttccttctcccttccccttttccctgtactttgtaatgtcagtgtttatatgaatatgactttcatttgcttttccagaataaagaagttattaat

SEQ ID NO: 188975 - DNA, 1334 bp, Homo sapiens
  Payload ID: 17323
  Gene Symbol: TAF12
  Gene Name: TAF12 RNA polymerase II, TATA box binding protein (TBP)-associated factor, 20kDa
  Uniprot ID: Q16514
  ENST ID: ENST00000373824
  CDS Start-End: 160-645
gtcggaccggctgctgagacgaacgcttcactggggcagtctctgcatatcatggggagatagacgctgctgcctttaattggccttggtcctcacagctccaaaaagaaacaggatctcgataagctctatgagctgaagtccaaagctcggcagattatgaaccagtttggcccctcagccctaatcaacctctccaatttctcatccataaaaccggaaccagccagcacccctccacaaggctccatggccaatagtactgcagtggtaaagataccaggcactcctggggcaggaggtcgtcttagccctgaaaacaatcaggtattgaccaagaagaaattacaggacttagtaagagaagtggatcctaatgagcagttggatgaagatgtggaggagatgctgctgcagattgctgatgattttatcgagagtgtggtgacagcagcctgtcagcttgcgcggcatcgcaagtctagcaccctggaggtgaaagatgtccagctgcatttagagcgccagtggaacatgtggatcccaggatttggctctgaagaaatccgaccctacaaaaaagcttgcaccacagaagctcacaaacagagaatggcattgatccggaaaacaaccaagaaataacacacggaaaggtcagggaatggacagcaatgtatttggagatacttgagctgagaactcagccatctcatccttggatttttttttttaatgctttacagagaagcatatattttttattaacagtgcagcaatatctataatgactgagaggatctgccaaaagaataaagcctcctaccccaacttccggtcccttttccctgccatctcaaagaggagcaatgtatcttccagagaagattttatttgtggtttattatataagtgactgaatatgggacaaagcattatggtctttttgggtaagacagtattagcaggatttgtaaagggttttgtttccttctcccttccccttttccctgtactttgtaatgtcagtgtttatatgaatatgactttcatttgcttttccagaataaagaagttattaatcgaaagacagggtacctttgaaatcccagagggagtcaggacaagcaagcctggattgtagctctctagtcagcaggtggcagcatcgttattcattttggtgtttgagaaaaactcagggattttccatcattttaccccaagggaggccataacatcagcaggagtttgagtccagcttctcggccataagaattgagtagggtgaccttctctcacggccctcaactgaagaggcatccttgttttgg

SEQ ID NO: 188976 - DNA, 813 bp, Homo sapiens
  Payload ID: 17324
  Gene Symbol: TAF13
  Gene Name: TAF13 RNA polymerase II, TATA box binding protein (TBP)-associated factor, 18kDa
  Uniprot ID: Q15543
  ENST ID: ENST00000338366
  CDS Start-End: 56-430
gtgtaaccagctgggagccagccggcaggacgctgtgagttggcgtgctagtgggatggcagatgaggaagaagaccccacgtttgaggaagaaaatgaagaaattggaggaggtgcagaaggtggacagggtaaaagaaagagacttttttctaaagaattgcgatgtatgatgtatggctttggggatgaccagaatccttatactgagtcagtggatattcttgaagatcttgtcatagagtttatcactgaaatgactcacaaggcaatgtcaattggaagacaaggtcgagtacaagttgaagatatcgtcttcttgattcgaaaggacccaaggaagtttgccagggttaaagacttgcttactatgaatgaagaattgaaacgagctagaaaagcatttgatgaagcaaattatggatcttgacactttttgtagtttccgaaaattaccatctggggaaaccatatataataattgtatattttctaaagtaagattctgatatctagccatgtaaatgaaagatggagaaacacaaagttttcagcctttatttttatgcctttgattttagggtgatattggtgcatgtaattgcctgcctttatattaccatacttgaattacttactgggttttaatgaccacacataagtcaaagtaccttgcaaaccatgccgttgttctgacttttgactatttaaaggataaagtagtatttaatgtgttaggtatgtttatgcccttgtaagctatactgtagctttttttttttttttttttttttttgagatggagtctcacta

SEQ ID NO: 188977 - DNA, 1076 bp, Homo sapiens
  Payload ID: 17324
  Gene Symbol: TAF13
  Gene Name: TAF13 RNA polymerase II, TATA box binding protein (TBP)-associated factor, 18kDa
  Uniprot ID: Q15543
  ENST ID: ENST00000461096
  CDS Start-End: 25-399
gctgtgagttggcgtgctagtgggatggcagatgaggaagaagaccccacgtttgaggaagaaaatgaagaaattggaggaggtgcagaaggtggacagggtaaaagaaagagacttttttctaaagaattgcgatgtatgatgtatggctttggggatgaccagaatccttatactgagtcagtggatattcttgaagatcttgtcatagagtttatcactgaaatgactcacaaggcaatgtcaattggaagacaaggtcgagtacaagttgaagatatcgtcttcttgattcgaaaggacccaaggaagtttgccagggttaaagacttgcttactatgaatgaagaattgaaacgagctagaaaagcatttgatgaagcaaattatggatcttgacactttttgtagtttccgaaaattaccatctggggaaaccatatataataattgtatattttctaaagtaagattctgatatctagccatatcgcaccactgcactccagcctgggcgacagagcgagactccgtctcaaaaaaaaaaaaaagaaagcaagtttcacatgaataatgctgtgttggaaggctttttgatttaaaatcttttcggatttataacatcctgttaagttttaggagaacccgttttcccagagcagattcaagcttctaaaaataaatgctttcagtagcaggaatggcattgtttaaaaagctgatggcagggtaagcatttgggttagtgttttattaacatatttgtaagtacttgttcattgtggaaatgtgtccttgactaaaaccatacgtggctatggaaaccatgtttgtagttctgaatacacaggttttgtgtgtatttactctatgtattaaattattattgcccttagtttaaagtaaggattacaattggatttaagtagatcactgaatgttattgtttatgaaacttaactttttgtatgctgcttataaacatgatctataaatcagtgcttgggaaaattttactttcttaatctactgatacaggaataaaatatgaacaattaaacaggttgatccttgaa

SEQ ID NO: 188978 - DNA, 656 bp, Homo sapiens
  Payload ID: 17325
  Gene Symbol: TAF15
  Gene Name: TAF15 RNA polymerase II, TATA box binding protein (TBP)-associated factor, 68kDa
  ENST ID: ENST00000603967
  CDS Start-End: 1-309
agtggaggctatggaggagacaggagtggtggcggctatggaggagaccgaggtgggggctacggaggagaccgaggtggctatggaggcaaaatgggaggaagatccagctgctcttcgaagaggccaaggacatgggatgggtcatgctgcacagtggtggctgtgtccttactggatctgacccgccatcctagcaccccggggagcctcgtctgtgcccacatgccacacatctcagaccctgtttccttctttcctgaactccagcagttctcagactcaccacctgctgtagtgcctccatgacaaacttgtcactgatgcgtaagcatcccagagcctgcaggaagagggatggaggaaagagaaggaaacttggacatcatccccaggagttaccattctctggatacagctggagtttgtgcttggaataccatccccacaaccaccatcacgtcaagcagctttttactttccagcttggccaactcctggctgtaaccaccctcctctatccttgcctcttctcacctgtgctgcatagaactgctcatcctctctgggagattccaggctttttgtgagttcctgcccatccaaggcagccagtggaaaggaagacagagaaaaataaagaatttcaaactaaa

SEQ ID NO: 188979 - DNA, 2191 bp, Homo sapiens
  Payload ID: 17325
  Gene Symbol: TAF15
  Gene Name: TAF15 RNA polymerase II, TATA box binding protein (TBP)-associated factor, 68kDa
  Uniprot ID: Q92804
  ENST ID: ENST00000605844
  CDS Start-End: 116-1894
agtccgcctcagcccgccgcgccgccctcagtacagctccggccgccgcgccgcctggctttcgtattcgttgttctcggcgggctgtggggcctccgcgccgcggccgttagtcatgtcggattctggaagttacggtcagtctgggggtgagcagcaaagttattctacctatggaaatccaggcagccaaggctatggacaagcatcacaaagctattctggctatgggcaaacgactgattcctcttatggacagaactacagcggttactccagttatggacaaagtcagtcaggttattcacagtcctatggtggttatgagaatcaaaagcagagctcatatagccagcaaccatataataaccagggacagcagcaaaacatggaatcatcaggaagccaaggtggaagagcaccttcctatgaccagccagactatggtcaacaagattcatatgaccagcagtcaggctatgatcaacatcaaggctcatatgatgagcagtcaaattatgatcagcagcatgattcctatagtcaaaaccagcagtcctatcattcacaaagggaaaactacagccaccacacacaagatgaccgtcgtgatgtgagtaggtatggagaagataatagaggatatggcgggtcacagggaggaggtagagggcgtgggggatatgacaaggatggaagaggtcctatgacaggatcaagtggtggtgaccgcggtggcttcaaaaattttggtggtcacagggattatggacccagaacagatgctgattcagaatctgataattcagataacaacacaatctttgtgcaaggacttggggagggtgtgtctacagatcaagttggggagttctttaaacaaataggaattatcaagacaaataagaagaccggaaaaccaatgataaatctttatacagacaaggacacaggaaagccaaagggggaggcaacagtgtcatttgatgaccctccttcagctaaggcagccattgactggtttgatggaaaagaattccatggcaacatcattaaagtgtcctttgccactagaagacctgaattcatgagaggaggtggaagtggaggtgggcggcgaggccgtggaggatatagaggtcgtggaggctttcaagggagaggtggagaccccaaaagtggggattgggtttgccctaatccgtcatgcggaaatatgaactttgctcgaaggaattcctgcaatcagtgcaatgagcctagaccagaggactctcgtccctcaggaggagatttccgggggagaggctacggtggagagaggggctacagaggtcgtgggggcagaggtggagaccgaggcggctatggtggagacagaagtgggggtggctatggtggagacagaagcagcggtggtggctacagcggagatagaagtgggggcggctatggtggagacagaagtgggggtggctatggtggggacagaggcggcggctatggtggggacagaggaggcggctatggaggagaccgaggaggtggctatggaggagatcgaggtggctatggaggagaccgaggtggaggctatggtggagaccgaggaggctatggaggagatcgaggaggttacggaggagatcgaggaggttatggaggagatcgaggaggctatggaggagacagaagccgggggggctatggaggagaccgtggtggtggcagtggctacggtggagaccgaagtggaggctatggaggagacaggagtggtggcggctatggaggagaccgaggtgggggctacggaggagaccgaggtggctatggaggcaaaatgggaggaagaaacgactacagaaatgatcagcgcaaccgaccatactgatgactgttttgaatgttcctttgtctctgacatgatccatagtgaaattgccagagttttgcctgctgctttcctcgtggcctcttcttgggtagtgaaattaagtgacatttggatttttatttgggtgggagggctgggacagtttttcttctagaaatgtctgttgagatttccccctttagtttccaaccttctccccaacccttggagctaaatgcgttgtaaaatattgccaaaatgaaaagtgttttgtaatactgcaataaaggctgcttgtttttgtggacttttgta

SEQ ID NO: 188980 - DNA, 547 bp, Homo sapiens
  Payload ID: 17325
  Gene Symbol: TAF15
  Gene Name: TAF15 RNA polymerase II, TATA box binding protein (TBP)-associated factor, 68kDa
  ENST ID: ENST00000603427
  CDS Start-End: 452-547
agtacagctccggccgccgcgccgcctggctttcgtattcgttgttctcggcgggctgtggggcctccgcgccgcggccgttagtcatgtcggcgaggcctcgggccagtcatctcgccgcctcgtacctcagttttcccatcctcgaagtggagctgggcctgcctgactcacccattcatcagattctggaagttacggtcagtctgggggtgagcagcaaagttattctacctatggaaatccaggcagccaaggctatggacaagcatcacaaagctattctggctatgggcaaacgactgattcctcttatggacagaactacagcggttactccagttatggacaaagtcagtcaggttattcacagtcctatggtggttatgagaatcaaaagcagagctcatatagccagcaaccatataataaccagggacagcagcaaaacatggaatcatcaggaagccaaggtggaagagcaccttcctatgaccagccagactatggtcaacaagattcatatgaccagcagtcaggctatgat

SEQ ID NO: 188981 - DNA, 2011 bp, Homo sapiens
  Payload ID: 17325
  Gene Symbol: TAF15
  Gene Name: TAF15 RNA polymerase II, TATA box binding protein (TBP)-associated factor, 68kDa
  ENST ID: ENST00000603777
  CDS Start-End: 530-1879
agtacagctccggccgccgcgccgcctggctttcgtattcgttgttctcggcgggctgtggggcctccgcgccgcggccgttagtcatgtcggcgaggcctcgggccagtcatctcgccgcctcgtacctcagttttcccatcctcgaagtggagctgggcctgcctgactcacccattcatcagcaagtctttggaaatatttttgttggtgctgacagccaaagcagtccaatacagaggaatggtgtatatcttggggtgattctggaagttacggtcagtctgggggtgagcagcaaagttattctacctatggaaatccaggcagccaaggctatggacaagcatcacaaagctattctggctatgggcaaacgactgattcctcttatggacagaactacagcggttactccagttatggacaaagtcagtcaggttattcacagtcctatggtggttatgagaatcaaaagcagagctcatatagccagcaaccatataataaccagggacagcagcaaaacatggaatcatcaggaagccaaggtggaagagcaccttcctatgaccagccagactatggtcaacaagattcatatgaccagcagtcaggctatgatcaacatcaaggctcatatgatgagcagtcaaattatgatcagcagcatgattcctatagtcaaaaccagcagtcctatcattcacaaagggaaaactacagccaccacacacaagatgaccgtcgtgatgtgagtaggtatggagaagataatagaggatatggcgggtcacagggaggaggtagagggcgtgggggatatgacaaggatggaagaggtcctatgacaggatcaagtggtggtgaccgcggtggcttcaaaaattttggtggtcacagggattatggacccagaacagatgctgattcagaatctgataattcagataacaacacaatctttgtgcaaggacttggggagggtgtgtctacagatcaagttggggagttctttaaacaaataggaattatcaagacaaataagaagaccggaaaaccaatgataaatctttatacagacaaggacacaggaaagccaaagggggaggcaacagtgtcatttgatgaccctccttcagctaaggcagccattgactggtttgatggaaaagaattccatggcaacatcattaaagtgtcctttgccactagaagacctgaattcatgagaggaggtggaagtggaggtgggcggcgaggccgtggaggatatagaggtcgtggaggctttcaagggagaggtggagaccccaaaagtggggattgggtttgccctaatccgtcatgcggaaatatgaactttgctcgaaggaattcctgcaatcagtgcaatgagcctagaccagaggactctcgtccctcaggaggagatttccgggggagaggctacggtggagagaggggctacagaggtcgtgggggcagaggtggagaccgaggcggctatggtggagacagaaccgggggggctatggaggagaccgtggtggtggcagtggctacggtggagaccgaagtggaggctatggaggagacaggagtggtggcggctatggaggagaccgaggtgggggctacggaggagaccgaggtggctatggaggcaaaatgggaggaagaaacgactacagaaatgatcagcgcaaccgaccatactgatgactgttttgaatgttcctttgtctctgacatgatccatagtgaaattgccagagttttgcctgctgctttcctcgtggcctcttcttgggtagtgaaattaagtgacatttggatttttatttgggtgggagggctgggacagtttttcttctagaaatgtctgttgagatttccccctttagtttccaaccttctccccaacccttggagctaaatgcgttgtaaaatattgccaaaatgaaaagtgttttgtaatactgcaataaaggctgcttgtttttgtgga

SEQ ID NO: 188982 - DNA, 2140 bp, Homo sapiens
  Payload ID: 17325
  Gene Symbol: TAF15
  Gene Name: TAF15 RNA polymerase II, TATA box binding protein (TBP)-associated factor, 68kDa
  Uniprot ID: Q92804
  ENST ID: ENST00000604841
  CDS Start-End: 82-1851
agctccggccgccgcgccgcctggctttcgtattcgttgttctcggcgggctgtggggcctccgcgccgcggccgttagtcatgtcggattctggaagttacggtcagtctgggggtgagcagcaaagttattctacctatggaaatccaggcagccaaggctatggacaagcatcacaaagctattctggctatgggcaaacgactgattcctcttatggacagaactacagcggttactccagttatggacaaagttattcacagtcctatggtggttatgagaatcaaaagcagagctcatatagccagcaaccatataataaccagggacagcagcaaaacatggaatcatcaggaagccaaggtggaagagcaccttcctatgaccagccagactatggtcaacaagattcatatgaccagcagtcaggctatgatcaacatcaaggctcatatgatgagcagtcaaattatgatcagcagcatgattcctatagtcaaaaccagcagtcctatcattcacaaagggaaaactacagccaccacacacaagatgaccgtcgtgatgtgagtaggtatggagaagataatagaggatatggcgggtcacagggaggaggtagagggcgtgggggatatgacaaggatggaagaggtcctatgacaggatcaagtggtggtgaccgcggtggcttcaaaaattttggtggtcacagggattatggacccagaacagatgctgattcagaatctgataattcagataacaacacaatctttgtgcaaggacttggggagggtgtgtctacagatcaagttggggagttctttaaacaaataggaattatcaagacaaataagaagaccggaaaaccaatgataaatctttatacagacaaggacacaggaaagccaaagggggaggcaacagtgtcatttgatgaccctccttcagctaaggcagccattgactggtttgatggaaaagaattccatggcaacatcattaaagtgtcctttgccactagaagacctgaattcatgagaggaggtggaagtggaggtgggcggcgaggccgtggaggatatagaggtcgtggaggctttcaagggagaggtggagaccccaaaagtggggattgggtttgccctaatccgtcatgcggaaatatgaactttgctcgaaggaattcctgcaatcagtgcaatgagcctagaccagaggactctcgtccctcaggaggagatttccgggggagaggctacggtggagagaggggctacagaggtcgtgggggcagaggtggagaccgaggcggctatggtggagacagaagtgggggtggctatggtggagacagaagcagcggtggtggctacagcggagatagaagtgggggcggctatggtggagacagaagtgggggtggctatggtggggacagaggcggcggctatggtggggacagaggaggcggctatggaggagaccgaggaggtggctatggaggagatcgaggtggctatggaggagaccgaggtggaggctatggtggagaccgaggaggctatggaggagatcgaggaggttacggaggagatcgaggaggttatggaggagatcgaggaggctatggaggagacagaagccgggggggctatggaggagaccgtggtggtggcagtggctacggtggagaccgaagtggaggctatggaggagacaggagtggtggcggctatggaggagaccgaggtgggggctacggaggagaccgaggtggctatggaggcaaaatgggaggaagaaacgactacagaaatgatcagcgcaaccgaccatactgatgactgttttgaatgttcctttgtctctgacatgatccatagtgaaattgccagagttttgcctgctgctttcctcgtggcctcttcttgggtagtgaaattaagtgacatttggatttttatttgggtgggagggctgggacagtttttcttctagaaatgtctgttgagatttccccctttagtttccaaccttctccccaacccttggagctaaatgcgttgtaaaatattgccaaaatgaaaagtgttttgtaatactgcaataaaggctgcttgtttttgtgga

SEQ ID NO: 188983 - DNA, 1214 bp, Homo sapiens
  Payload ID: 17325
  Gene Symbol: TAF15
  Gene Name: TAF15 RNA polymerase II, TATA box binding protein (TBP)-associated factor, 68kDa
  ENST ID: ENST00000603393
  CDS Start-End: 400-765
agtacagctccggccgccgcgccgcctggctttcgtattcgttgttctcggcgggctgtggggcctccgcgccgcggccgttagtcatgtcgggtaggtgacttcttcagcgagcagcggcagcgacgagaagattctggaagttacggtcagtctgggggtgagcagcaaagttattctacctatggaaatccaggcagccaaggctatggacaagcatcacaaagctattctggctatgggcaaacgactgattcctcttatggacagaactacagcggttactccagttatggacaaagtcagtcaggttattcacagtcctatggtggttatgagaatcaaaagcagagctcatatagccagcaaccatataataaccagggacagcagcaaaacatggaatcatcaggaagccaaggtggaagagcaccttcctatgaccagccagactatggtcaacaagattcatatgaccagcagtcaggctatgatcaacatcaaggctcatatgatgagcagtcaaattatgatcagcagcatgattcctatagtcaaaaccagcagtcctatcattcacaaagggaaaactacagccaccacacacaagatgaccgtcgtgatgtgagtaggtatggagaagataatagaggatatggcgggtcacagggaggaggtagagggcgtgggggatatgacaaggatggaagaggtcctatgacaggatcaaggtcacagggattatggacccagaacagatgctgattcagaatctgataattcagataacaacacaatctttgtgcaaggacttggggagggtgtgtctacagatcaagttggggagttctttaaacaaataggaattatcaagacaaataagaagaccggaaaaccaatgataaatctttatacagacaaggacacaggaaagccaaagggggaggcaacagtgtcatttgatgaccctccttcagctaaggcagccattgactggtttgatggaaaagaattccatggcaacatcattaaagtgtcctttgccactagaagacctgaattcatgagaggaggtggaagtggaggtgggcggcgaggccgtggaggatatagaggtcgtggaggctttcaagggagaggtggagaccccaaaagtggggattgggtttgccctaatccgtcatgcggaaatatgaactttgctcgaaggaatt

SEQ ID NO: 188984 - DNA, 808 bp, Homo sapiens
  Payload ID: 17325
  Gene Symbol: TAF15
  Gene Name: TAF15 RNA polymerase II, TATA box binding protein (TBP)-associated factor, 68kDa
  ENST ID: ENST00000604879
  CDS Start-End: 90-808
ctcagtacagctccggccgccgcgccgcctggctttcgtattcgttgttctcggcgggctgtggggcctccgcgccgcggccgttagtcatgtcggattctggaagttacggtcagtctgggggtgagcagcaaagttattctacctatggaaatccaggcagccaaggctatggacaagcatcacaaagctattctggctatgggcaaacgactgattcctcttatggacagaactacagcggttactccagttatggacaaagttattcacagtcctatggtggttatgagaatcaaaagcagagctcatatagccagcaaccatataataaccagggacagcagcaaaacatggaatcatcaggaagccaaggtggaagagcaccttcctatgaccagccagactatggtcaacaagattcatatgaccagcagtcaggctatgatcaacatcaaggctcatatgatgagcagtcaaattatgatcagcagcatgattcctatagtcaaaaccagcagtcctatcattcacaaagggaaaactacagccaccacacacaagatgaccgtcgtgatgtgagtaggtatggagaagataatagaggatatggcgggtcacagggaggaggtagagggcgtgggggatatgacaaggatggaagaggtcctatgacaggatcaagtggtggtgaccgcggtggcttcaaaaattttggtggtcacagggattatggacccagaacagatgctgattcagaatctgataattcagataacaacacaatctttgtgcaaggacttgggga

SEQ ID NO: 188985 - DNA, 891 bp, Homo sapiens
  Payload ID: 17325
  Gene Symbol: TAF15
  Gene Name: TAF15 RNA polymerase II, TATA box binding protein (TBP)-associated factor, 68kDa
  ENST ID: ENST00000604694
  CDS Start-End: 1-644
gccgtggaggatatagaggtcgtggaggctttcaagggagaggtggagaccccaaaagtggggattgggtttgccctaatccgtcatgcggaaatatgaactttgctcgaaggaattcctgcaatcagtgcaatgagcctagaccagaggactctcgtccctcaggaggagatttccgggggagaggctacggtggagagaggggctacagaggtcgtgggggcagaggtggagaccgaggcggctatggtggagacagaagtgggggtggctatggtggagacagaagcagcggtggtggctacagcggagatagaagtgggggcggctatggtggagacagaagtgggggtggctatggtggggacagaggcggcggctatggtggggacagaggaggcggctatggaggagaccgaggaggaggctatggaggagacagaagccgggggggctatggaggagaccgtggtggtggcagtggctacggtggagaccgaagtggaggctatggaggagacaggagtggtggcggctatggaggagaccgaggtgggggctacggaggagaccgaggtggctatggaggcaaaatgggaggaagaaacgactacagaaatgatcagcgcaaccgaccatactgatgactgttttgaatgttcctttgtctctgacatgatccatagtgaaattgccagagttttgcctgctgctttcctcgtggcctcttcttgggtagtgaaattaagtgacatttggatttttatttgggtgggagggctgggacagtttttcttctagaaatgtctgttgagatttccccctttagtttccaaccttctccccaacccttggagctaaatgcgttgtaaaatattgccaaaatgaaaa

SEQ ID NO: 188986 - DNA, 2191 bp, Homo sapiens; identical to SEQ ID NO: 188979
  Payload ID: 17325
  Gene Symbol: TAF15
  Gene Name: TAF15 RNA polymerase II, TATA box binding protein (TBP)-associated factor, 68kDa
  Uniprot ID: Q92804
  ENST ID: ENST00000617382
  CDS Start-End: 116-1894

SEQ ID NO: 188987 - DNA, 547 bp, Homo sapiens; identical to SEQ ID NO: 188980
  Payload ID: 17325
  Gene Symbol: TAF15
  Gene Name: TAF15 RNA polymerase II, TATA box binding protein (TBP)-associated factor, 68kDa
  ENST ID: ENST00000631553
  CDS Start-End: 452-547

SEQ ID NO: 188988 - DNA, 1214 bp, Homo sapiens; identical to SEQ ID NO: 188983
  Payload ID: 17325
  Gene Symbol: TAF15
  Gene Name: TAF15 RNA polymerase II, TATA box binding protein (TBP)-associated factor, 68kDa
  ENST ID: ENST00000631846
  CDS Start-End: 400-765

SEQ ID NO: 188989 - DNA, 656 bp, Homo sapiens; identical to SEQ ID NO: 188978
  Payload ID: 17325
  Gene Symbol: TAF15
  Gene Name: TAF15 RNA polymerase II, TATA box binding protein (TBP)-associated factor, 68kDa
  ENST ID: ENST00000633893
  CDS Start-End: 1-309

SEQ ID NO: 188990 - DNA, 891 bp, Homo sapiens; identical to SEQ ID NO: 188985
  Payload ID: 17325
  Gene Symbol: TAF15
  Gene Name: TAF15 RNA polymerase II, TATA box binding protein (TBP)-associated factor, 68kDa
  ENST ID: ENST00000633762
  CDS Start-End: 1-644

SEQ ID NO: 188991 - DNA, 808 bp, Homo sapiens; identical to SEQ ID NO: 188984
  Payload ID: 17325
  Gene Symbol: TAF15
  Gene Name: TAF15 RNA polymerase II, TATA box binding protein (TBP)-associated factor, 68kDa
  ENST ID: ENST00000631959
  CDS Start-End: 90-808

SEQ ID NO: 188992 - DNA, 2140 bp, Homo sapiens; identical to SEQ ID NO: 188982
  Payload ID: 17325
  Gene Symbol: TAF15
  Gene Name: TAF15 RNA polymerase II, TATA box binding protein (TBP)-associated factor, 68kDa
  Uniprot ID: Q92804
  ENST ID: ENST00000631482
  CDS Start-End: 82-1851

SEQ ID NO: 188993 - DNA, 2011 bp, Homo sapiens; identical to SEQ ID NO: 188981
  Payload ID: 17325
  Gene Symbol: TAF15
  Gene Name: TAF15 RNA polymerase II, TATA box binding protein (TBP)-associated factor, 68kDa
  ENST ID: ENST00000633578
  CDS Start-End: 530-1879

SEQ ID NO: 188994 - DNA, 5048 bp, Homo sapiens
  Payload ID: 17326
  Gene Symbol: TAF2
  Gene Name: TAF2 RNA polymerase II, TATA box binding protein (TBP)-associated factor, 150kDa
  Uniprot ID: Q6P1X5
  ENST ID: ENST00000378164
  CDS Start-End: 300-3899
acttccgctgacgtcggaggtcagaggttacagacaagatgtcggcggatggtagcttcgagcccttgcggagaggagcatctctgtgacagaagcttgtcgacggcggcttctaggagctagtcgaaggagcgaggttgaggcgggcagcgacccgtcaggtcgctcacctgggcaccggccagctgcgagacgtgacttggggaccgcaggggagtggagagtgtgaggtgccaaagactagtaatgccccgtatccccctaggaagccgggaagccaagctccgcgggaccgcttcatgccgctgactggtgtagagcccgccagaatgaacaggaagaaaggagacaagggctttgaaagcccaaggccatataaattaacccatcaggtcgtctgcatcaacaacataaatttccagagaaaatctgttgtgggatttgtggaactgactatatttcccacagttgcaaacttgaatagaatcaagttgaacagcaaacagtgtagaatataccgagtaaggatcaatgatttagaggctgcttttatttataatgacccaaccttggaagtttgtcacagtgaatcaaaacagagaaacctcaattatttttccaatgcttatgcagctgcagttagtgctgtggaccctgatgcaggaaatggagaactttgcattaaggttccatcagagctatggaaacacgttgatgagttaaaggtcctgaagatacacatcaatttttctttggatcagcccaaaggaggtcttcattttgtggtacccagtgtagagggaagtatggcagagagaggtgctcatgttttctcttgtgggtatcaaaattctacaagattttggttcccttgtgttgattcatactctgaattgtgtacatggaaattagaatttacagtagatgctgcaatggttgctgtttctaatggcgatttggtggagacagtgtatactcatgatatgaggaagaaaactttccattatatgcttaccattcctacagcagcgtcaaatatctccttggccattggaccatttgaaatactggtagatccatacatgcatgaggttactcatttttgtttgccccaacttcttccattgctgaaacataccacatcataccttcatgaagtctttgaattttatgaagaaattcttacatgtcgttacccatactcctgttttaagactgtcttcattgatgaggcttatgttgaagtggctgcttatgcttccatgagcatttttagcacaaatcttttacacagtgccatgattatagatgagacacctttgactagaaggtgtttagcccaatccttggcccagcagttttttggttgtttcatatctagaatgtcttggtctgatgaatgggtgctgaagggaatttcaggctatatctatggactttggatgaaaaaaacttttggtgttaatgagtaccgccattggattaaagaggagctagacaaaatagtggcatatgaactaaaaactggtggggttttactacatcccatatttggtggaggaaaagagaaggataatccggcttcccatctacacttttcaataaagcatccacatacactgtcctgggaatactacagtatgtttcagtgtaaagcccaccttgtgatgagattgattgaaaataggatcagtatggaatttatgctacaagttttcaataaactgctaagtctggctagtactgcttcatctcagaagttccagtcacatatgtggagtcagatgttggtttccacatctgggtttttgaaatccatttcaaatgtctctggcaaagatattcagccgttaataaagcagtgggtagatcagagtggagtggtaaaattttatggaagttttgcatttaatagaaaacgaaatgtcttggaactggaaataaaacaggactatacatctcctggaactcagaaatacgtgggaccacttaaagtgacagtgcaggagttagatggatccttcaatcatacactgcaaattgaagaaaacagccttaaacatgatataccctgccattccaaaagtagaaggaataaaaagaaaaaaatcccactgatgaatggagaagaagttgatatggatctttctgcaatggatgctgattcccctttgctgtggataaggatagacccagatatgtcagtattgaggaaggtagaatttgagcaagctgattttatgtggcagtatcagctccgctatgagagagatgttgttgcacagcaggaatccattttggctttggaaaaattccctactccagcatctcggcttgcactcactgatatattagaacaagagcagtgtttctacagagtaagaatgtcagcttgcttctgtcttgcaaagattgcaaattcaatggtgagcacatggacaggaccaccagccatgaagtcactcttcactaggatgttttgttgtaaaagttgtccaaacattgtgaaaacaaacaactttatgagctttcaaagctattttctacagaagactatgccagttgcaatggctttattaagagatgttcataatctttgtcctaaagaagtcttaacatttattttagacttaatcaagtacaatgacaacaggaaaaataagttttcagataactattatcgtgcagaaatgattgatgccctggccaactctgttacacctgcagtcagtgtgaataatgaagttagaactttggataacttaaatcctgatgtgcgactcattcttgaagaaatcaccagatttttgaatatggaaaaacttcttccgagttacaggcataccatcactgtcagttgtttgagagccatacgggtacttcagaagaacggacatgtgccaagtgatccagctctttttaaatcttatgctgaatatggccactttgtggacattaggatagcagctttggaagcagttgttgattatactaaagtggacagaagttatgaagaactgcaatggctacttaatatgattcagaatgaccctgtaccctatgtaaggcataagattctcaacatgttgactaagaacccaccatttactaagaacatggagtctcccttatgcaatgaagccctggtagatcaactttggaaacttatgaattctggtacttcacatgactggaggttacggtgtggtgctgtggacttgtacttcacactttttggcctcagtagaccttcctgtttacccttgccagagcttgggttggttcttaatctaaaggagaaaaaagctgtcttgaatcctaccataattccagagtcagtagcaggcaaccaagaagctgcaaataatccaagcagtcacccacagctagttggatttcagaaccctttttccagttctcaagatgaggaggagattgatatggatactgttcatgatagccaggccttcatttcccatcatttaaacatgcttgaaaggccgtcaactccagggctctcgaaatatcggccagctagctcccgatctgctttaataccccagcactcagcaggctgtgacagcacacccaccacaaaaccccagtggagtttggaacttgcacggaagggaacaggtaaagaacaagcacctttggagatgagtatgcatccagcggcaagcgctccactctcagtctttactaaggaatctacagcctccaaacacagtgaccaccatcaccaccatcaccatgagcacaagaaaaagaagaagaagcataaacataagcacaaacacaagcataagcatgacagtaaagaaaaggacaaggagcctttcactttctccagccctgccagtggcaggtctattcgttctccttccctttcagactgagaaggggacaaaaagacctttcctttcatgtccagaagaatgtatgtaactaaagctttgtcctctgtgaagaattataaaagggaggggggaaaggattcgcctctcctacagaaattctgaattcatttaagttctaagcatttgatttatgttatttatacagttgggatctaattaggaaaatgtgttttgtagttctggataaactatttcatccgctgtttcctccccaaaacacacacacagagcaaactccctttcataaaagccctcatatccactggcagtccccgttcgcatcatggtctccatgtgtaccgccaaagtcaattatgtttgaaagcctttggtggatgttatggggcaaagttatgatttacacagaagcaactgccaaatctgtggtgcaaccactatctccagtgaaatattgtataacaccatttggaactactgaaaagacagtggcttttctacagtactcttccttattgcaccatttttgtattaacgtagaaactaagcatcagaatttatgaacaaagaatatgttatttttccttttgctctaaaatactgagatttggggaagcaattcttttttaaaaaaattttgaataactatcttttgataacacattcggcggttacgatgttggaatttagcagaactatcaaatccaaaattattttcaaatcaagatgtttaaattataagtttttttgttttgttttccagtaagtataaatgaaaatattcatatgtaaaatatgttttgcttaatgtggacaatttacacacccaacacatactgtttccaaaattatttctatatgacacaaagtatgatacctttaaaaaggtgagcttatatattgtttattaacctggaaatagacaatttggctctcataccataagcatttaaaaacatatgaaatattttgatttctttatatggtggtgtgtttttatttctgaattttccatgtgctttaatatttgtttaagaatattttttatatctgttcaatttttatcattccccttatcattagaaagtttgacaaaaatacttgaatcttggacctctaaatatacttttagttgtgtttaacttgtttaataaataactttttaagttg

SEQ ID NO: 188995 - DNA, 586 bp, Homo sapiens
  Payload ID: 17326
  Gene Symbol: TAF2
  Gene Name: TAF2 RNA polymerase II, TATA box binding protein (TBP)-associated factor, 150kDa
  ENST ID: ENST00000521007
  CDS Start-End: 271-453
acagacaagatgtcggcggatggtagcttcgagcccttgcggagaggagcatctctgtgacagaagcttgtcgacggcggcttctaggagctagtcgaaggagcgaggttgaggcgggcagcgacccgtcaggtcgctcacctgggcaccggccagctgcgagacgtgacttggggaccgcaggggagtggagagtgtgaggtgccaaagactagtaatgccccgtatccccctaggaagccgggaagccaagctccgcgggaccgcttcatgccgctgactggtgtagagcccgccagaatgaacaggaagaaaggagacaagggctttgaaagcccaaggccatataaattaacccatcaggtcgtctgcatcaacaacataaatttccagagaaaatctgttgtggagaaacctcaattatttttccaatgcttatgcagctgcagttagtgctgtggaccctgatgcaggaaatggagaactttgcattaaggttccatcagagctatggaaacacgttgatgagttaaaggtcctgaagatacacatcaatttttctttggatcagcccaaaggaggtctt

SEQ ID NO: 188996 - DNA, 569 bp, Homo sapiens
  Payload ID: 17326
  Gene Symbol: TAF2
  Gene Name: TAF2 RNA polymerase II, TATA box binding protein (TBP)-associated factor, 150kDa
  ENST ID: ENST00000523098
  CDS Start-End: 1-202
taatgaagttagaactttggataacttaaatcctgatgtgcgactcattcttgaagaaatcaccagatttttgaatatggaaaaacttcttccgagttacaggcataccatcactgtcaggctggagtgcagtggcgcaatcttggctcaccacaacctccacctcctgggttccagtgattctcctgcctcagcctcctgaatagctgggattacaggcatgcaccaccatgcctggctatttttgtattttcagtagagacggggtttcaccatgttagtcagttgtttgagagccatacgggtacttcagaagaacggacatgtgccaagtgatccagctctttttaaatcttatgctgaatatggccactttgtggacattaggatagcagctttggaagcagttgttgattatactaaaggtaatactttagaaatacgtgctcatatcattttagaaagaactatttactttttaaagccagtgttgttggggttttcgtaatatgtataacacagatattttaattttaaattcttgacttagtgatttagaaatcatcttt

SEQ ID NO: 188997 - DNA, 855 bp, Homo sapiens
  Payload ID: 17326
  Gene Symbol: TAF2
  Gene Name: TAF2 RNA polymerase II, TATA box binding protein (TBP)-associated factor, 150kDa
  ENST ID: ENST00000523904
  CDS Start-End: 1-855
tgccccaacttcttccattgctgaaacataccacatcataccttcatgaagtctttgaattttatgaagaaattcttacatgtcgttacccatactcctgttttaagactgtcttcattgatgaggcttatgttgaagtggctgcttatgcttccatgagcatttttaggtctgatgaatgggtgctgaagggaatttcaggctatatctatggactttggatgaaaaaaacttttggtgttaatgagtaccgccattggattaaagaggagctagacaaaatagtggcatatgaactaaaaactggtggggttttactacatcccatatttggtggaggaaaagagaaggataatccggcttcccatctacacttttcaataaagcatccacatacactgtcctgggaatactacagtatgtttcagtgtaaagcccaccttgtgatgagattgattgaaaataggatcagtatggaatttatgctacaagttttcaataaactgctaagtctggctagtactgcttcatctcagaagttccagtcacatatgtggagtcagatgttggtttccacatctgggtttttgaaatccatttcaaatgtctctggcaaagatattcagccgttaataaagcagtgggtagatcagagtggagtggtaaaattttatggaagttttgcatttaatagaaaacgaaatgtcttggaactggaaataaaacaggactatacatctcctggaactcagaaatacgtgggaccacttaaagtgacagtgcaggagttagatggatccttcaatcatacactgcaaattgaagaaaacagccttaaacatgatataccctgcc

SEQ ID NO: 188998 - DNA, 1237 bp, Homo sapiens
  Payload ID: 17326
  Gene Symbol: TAF2
  Gene Name: TAF2 RNA polymerase II, TATA box binding protein (TBP)-associated factor, 150kDa
  ENST ID: ENST00000529653
  CDS Start-End: 1-1128
tatgctgaatatggccactttgtggacattaggatagcagctttggaagcagttgttgattatactaaagtggacagaagttatgaagaactgcaatggctacttaatatgattcagaatgaccctgtaccctatgtaaggcataagattctcaacatgttgactaagaacccaccatttactaagaacatggagtctcccttatgcaatgaagccctggtagatcaactttggaaacttatgaattctggtacttcacatgactggaggttacggtgtggtgctgtggacttgtacttcacactttttggcctcagtagaccttcctgtttacccttgccagagcttgggttggttcttaatctaaaggagaaaaaagctgtcttgaatcctaccataattccagagtcagtagcaggcaaccaagaagctgcaaataatccaagcagtcacccacagctagttggatttcagaaccctgaagatgatcaccttgccaaggaagcatcatgtaatatatcagctcatcagcagggagtgaagaggaagtctgatacaccactggggtccccactagaacctggtcaaatactggagaagaatgaggatagcagtaaagtcaaactcaaaatcagattttccagttctcaagatgaggaggagattgatatggatactgttcatgatagccaggccttcatttcccatcatttaaacatgcttgaaaggccgtcaactccagggctctcgaaatatcggccagctagctcccgatctgctttaataccccagcactcagcaggctgtgacagcacacccaccacaaaaccccagtggagtttggaacttgcacggaagggaacaggtaaagaacaagcacctttggagatgagtatgcatccagcggcaagcgctccactctcagtctttactaaggaatctacagcctccaaacacagtgaccaccatcaccaccatcaccatgagcacaagaaaaagaagaagaagcataaacataagcacaaacacaagcataagcatgacagtaaagaaaaggacaaggagcctttcactttctccagccctgccagtggcaggtctattcgttctccttccctttcagactgagaaggggacaaaaagacctttcctttcatgtccagaagaatgtatgtaactaaagctttgtcctctgtgaagaattataaaagggaggggggaaaggattcgcctctcc

SEQ ID NO: 188999 - DNA, 4872 bp, Homo sapiens
  Payload ID: 17327
  Gene Symbol: TAF3
  Gene Name: TAF3 RNA polymerase II, TATA box binding protein (TBP)-associated factor, 140kDa
  Uniprot ID: Q5VWG9
  ENST ID: ENST00000344293
  CDS Start-End: 207-2996
cagcgggaggcggagcgagtccaaaatggcggctctcaggctggcgcgctccgtgctgctggggctttgaggtggtcgccgggggtccgggggaccctttccccgccgcggaagccctagaggatgaatcggggaccctgctaaggtctggcggcggggctggagagcagtggcagcaagggctgcggtggcgtccacgcagcgggatgtgcgagagttactccaggtcgttgttgagggtctcggtggcgcagatctgccaggcgctgggctgggactcggtgcagctcagcgcctgccacctcctcacggacgtgctgcagcgctatctgcagcagctgggccggggctgccatcggtactctgagctctatggccgaacagacccaattttggatgatgttggtgaagctttccagctgatgggggttagtctacatgaactagaagactatattcacaacattgagcctgtcaccttcccacaccaaattccgtcatttcctgttagcaagaacaatgtacttcagtttcctcaacctggaagtaaagatgcagaggaaagaaaagaatacattcctgattacctgccacccattgtgtcttctcaagaagaagaagaagaagagcaggtgcccactgatggaggcacatcagcagaagccatgcaggttcccttggaagaagatgatgaattggaggaggaagaaattattaatgatgagaatttcctgggcaagagaccactggatagtcctgaagctgaagaactgccagccatgaagcggcctcggctattaagcactaaaggggacacgctagatgttgtgttattggaagctcgagagccactcagctcaataaatactcaaaagatcccaccaatgctttctccagtccatgtacaggacagtacagacttggcacctccctcacccgagccgccaatgttggctccagttgcaaaatcacaaatgccaactgcaaaaccattagaaacaaagtcatttacacctaaaacaaagactaaaactagctctccaggacagaagactaaatcacctaaaaccgcccagtcaccagcaatggtcggaagtcctattcgatcaccaaaaactgtatccaaagaaaagaaatcacctggacgttccaagagccccaagagtcccaagagccccaaggtcacgactcacattccccaaacacctgtgagacctgaaacgcccaacaggactccttcagctacactcagtgaaaaaatcagtaaagagactatccaggtaaaacaaatacagacaccccctgatgctgggaaactgaacagtgagaatcagccgaaaaaggctgtggtagcagataaaacgattgaggcctctatcgatgctgtgattgcacgagcctgtgctgagcgagagccagatcctttcgaattttcttctggatcggaatctgaaggagacatttttactagccctaagagaatttcaggcccggagtgtactactcccaaagcttccacttccgcgaacaatttcacaaagtcaggatccactcctctgcctctttccggtggaacctcaagttccgataactcatggacaatggatgcctccattgatgaggttgtacgtaaagcaaaactgggaacaccttcaaatatgccccccaactttccttatatctcttctccgtcagtgtctcctcccactcccgaacctctccacaaggtgtatgaggagaaaaccaagctgccttcctccgtggaggtaaagaagaagttgaaaaaggaactaaagactaaaatgaaaaagaaagaaaagcagagagatagggagagggaaaaagacaagaacaaggacaaaagtaaggagaaggataaagtgaaagagaaagagaaagacaaggaaactggcagggaaacaaagtatccctggaaggaatttcttaaagaggaagaggcagatccctacaagtttaaaatcaaagaatttgaagatgttgatcccaaagtgaaattgaaagatggacttgtgaggaaggagaaagagaagcataaagataagaagaaagatagagagaaaggcaagaaagataaagataagagagagaaagaaaaagtgaaagataaaggcagagaagataagatgaaagccccagcacccccactggtgttgcccccaaaagagttggccctgcccttgttcagccctgccacagcctccagggtcccagccatgctgccatctttgttgccagtgcttccggaaaaactgtttgaggagaaagagaaggtgaaggagaaagaaaagaaaaaggacaaaaaggagaagaagaaaaagaaggaaaaagagaaggagaagaaggagaaggaaagagagaaagagaagagagagcgagagaagagagaaaaagagaaggagaaacacaagcatgaaaaaataaaagtggaaccagtcgctctggccccgagtccagttatccccagattaactctccgagtcggtgctggccaagacaagattgtcatcagcaaggtggtccctgcccccgaggccaagccggcgccctcgcagaacaggccgaagaccccaccgccggcccccgcgcccgcccccggccccatgctcgtcagccctgcgcccgtgccgctgccgctgctcgcccaggccgccgcgggccctgccctgctgccctccccgggtcccgccgcctccggggccagtgccaaagcccccgtgcgcagcgtggtgactgagacggtcagcacctacgtgatccgagatgagtggggcaatcagatctggatctgccctgggtgtaacaagcctgacgatgggagtcccatgattgggtgtgacgactgcgatgactggtaccactggccctgtgttggaatcatgactgcacccccagaagagatgcagtggttctgccccaagtgtgcgaacaagaagaaggacaaaaagcacaagaagaggaagcatcgagcccactgacgactcccgaggggctggaccaagcggggtcagcccgggcttcttccctggcgcctctggaagggagctggtgcaagtctgccgtcacatccacccccagatgcctgtggataaagaacccaggaggactgaggctggaacacaccgcgcacctggattgttcactcccgagccgccttggcctgtggctccgtggcagtgcgacagaaggaaactcaagcagaggcgtggcctgggggctgcccctcctccacttctctaataccagtgacaagtattattaataaagagcgtacatcttcccttttgatttcctttattctctccagggccttttcattgaggtattagatgagaagataatgtacaaactgcctcaactgtaatttaaggatgatagagtctgtatacagttttcagcccctttccctctatagtaagataatcagaataacataaaagaaaactccagttggagtaccggtaaatatttttgtgataagaatatatgaagcttccctccttcccccgtttttagtactaacatgtaaaatgttcaggcttttgtgaaataccttatattttttaagaaaaaggtttctatcatgtcctgtttgcttttgtgcaaattatttttgtttaatgtattttatatcttcgttgcattctaattttgcccttctttaaactgctggagtctcttctcactgcttgtacatttcatcaacttgtataaaaactcttcagactaaaagattgcccctaatgtaaataataaatatttatgaagtagttattttttaaatttttatcgtgtttaattctggctttctctgaaatccactgtgatttcagccaggtctgtaatgacgctggacagaaacaaggctagagaaaaagccatcgttcaaagaaatttcccttgagctcagcctgcgcagtgcccggaaacatggtggggaaagggcccgagcagttggaaggaaaacaaggcaatttaaatttagagtttatgacttgaagttgttttgtttgttgtctattttgtttttgtaaatttctttgacagacttttactaaaaggacatgtagtttccatgaaagtaaaaaaaaaaaacaacaaaaaacccacatatactgtagcattttgtctttatattgttttatttctacaaatctgttcattaatattgtgctttaaggctgaaatgaagtatattatgaatttttttaagaaaactcatcaaatttcagggtatcacaaaactttattatattattatactgcccactatttattatatgttatagatgtctgagaggtaaaccaaatattttatttttaatgttaaaaaaacatcaaatttaactttattagcatattttagcaactttgggataaatacggacttttacttgattttgaaataatcccagtgtaggcccatgtgctggatctgttggatgctagaatatgggctttgaacctaatacaaatatattactagaaaatgtgatttttttaaatgccaagtaaattgatattagtgtatgaattagtcatattttaaaacattatgtggttagagaaatgcggttttctgccatgaatgttaagttgcaaatcagtggaaatggagtcgacctcttcggagcacagggtgtcattgccctcgttgttcaagaggccagaatttttctatccccgctaagaaacaaagcatctatgttgagatatgtgtttttttgtttgattaatttgagatcattctaaatactttatacaatattttcacatgcacaaaaatgcgcgttagtggtttttggagaggggtgaggggtgggggaagtgcaaaataaagattattggctattt

SEQ ID NO: 189000 - DNA, 4628 bp, Homo sapiens
  Payload ID: 17328
  Gene Symbol: TAF4
  Gene Name: TAF4 RNA polymerase II, TATA box binding protein (TBP)-associated factor, 135kDa
  Uniprot ID: O00268
  ENST ID: ENST00000252996
  CDS Start-End: 1-3258
atggcggcgggctcggatctgctggacgaggtcttcttcaacagcgaggtggacgagaaagtggtgagcgacctggtgggctcgctggagtcgcagctggcggccagcgcggcccaccaccaccacctcgcgccgcgcacgcccgaggtgcgggccgcggccgccggcgcgctcgggaaccatgttgtgagcggcagcccggccggagccgcgggcgcagggccggccgcccccgccgagggcgcgcccggagcggcgccggagccgccccccgcaggtagagcgcggccggggggcggggggccgcagcgcccgggccccccctcaccgcgccgcccccttgtccccgcagggcccgcgccgcccgccgcgaagctgaggccgccgcccgagggcagcgcggggtcctgcgccccggtgcccgccgccgccgccgtcgccgcggggcccgagcccgcccccgccggccccgccaagcccgccggccccgccgcgctggccgcccgcgccggccccggccccgggcccggccccggccccggccccggccctggccctggcaagcccgccggccccggcgccgcgcaaactttgaatgggagcgccgcgctgctgaactcgcaccacgccgccgcacctgctgtcagcctggtcaacaacgggcccgccgcgctgctgccgctgcccaagcccgccgcccccggcactgtcatccagacgccccccttcgtgggcgccgccgcgccccccgcgcccgccgcgccctcgccccccgccgcccccgcgcccgccgcccccgccgccgccccgcccccgccaccccccgcgcccgccactctggcccggccgcccggccaccccgccggacccccgaccgccgcgcccgccgtgccgccccccgccgccgcccagaacgggggcagcgccggggcagcccccgcccccgccccggccgccgggggccccgcgggggtcagcggccaacccgggcccggcgcggcggctgcggcgccggcgccgggggtcaaggccgagtcgcccaagagggtggtgcaggcggcgcccccggcggcgcagaccctggcggccagcggcccggccagcacggcggccagcatggtcatcgggccaactatgcaaggggcgctgcccagcccggccgccgtcccgccgcccgcccccgggacccccaccgggctgcccaaaggcgcggccggcgcagtgacccagagcctgtcccggacgcccacggccaccaccagcgggattcgggccaccctgacgcccaccgtgctggccccccgcttgccgcagccgcctcagaacccgaccaacatccagaacttccagctgcccccaggaatggtcctcgtccgaagtgagaatgggcagttgttaatgattcctcagcaggccttggcccagatgcaggcgcaggcccatgcccagcctcagaccaccatggcgcctcgccctgccacccccacaagtgcccctcccgtccagatctccaccgtacaggcacctggaacacctatcattgcacggcaggtgaccccaactaccataattaagcaagtgtctcaggcccagacaacggtgcagcccagtgcaaccctgcagcgctcgcccggcgtccagcctcagctcgttctgggtggcgctgcccagacggcttcacttgggacggcgacggctgttcagacggggactcctcagcgcacggtaccaggggcgaccaccacttcctcagctgccacggaaactatggaaaacgtgaagaaatgtaaaaatttcctatctacgttaataaaactggcttcatctggcaagcagtctacagagacagcagctaatgtgaaagagctcgtgcagaatttactggatggaaaaatagaagcagaagatttcacaagcaggttataccgagaacttaattcttcacctcaaccttaccttgtgcctttcctgaagaggagcttacccgccttgagacagctgacccccgactccgcggccttcatccagcagagccagcagcagccgccaccgcccacctcgcaggccaccactgcgctcacggccgtggtgctgagtagctcggtccagcgcacggccgggaagacggcggccaccgtgaccagtgccctccagccccctgtgctcagcctcacgcagcccacgcaggtcggcgtcggcaagcaggggcaacccacaccgctggtcatccagcagcctccgaagccaggagccctgatccggcccccgcaggtgacgttgacgcagacacccatggtcgccctgcggcagcctcacaaccggatcatgctcaccacgcctcagcagatccagctgaacccactgcagccagtccctgtggtgaaacccgccgtgttacctggaaccaaagccctttctgctgtctcggcacaagcagctgctgcacagaaaaataaactcaaggagcctgggggaggttcgtttcgggacgatgatgacattaatgatgttgcatcgatggctggagtaaacttgtcagaagaaagtgcaagaatattagccacgaactctgaattggtgggcacgctaacgcggtcctgtaaagatgaaaccttcctcctccaagcgcctttgcagagaagaatattagaaataggtaaaaaacatggtataacggaattacatccagatgtagtaagttatgtatcacatgccacgcaacaaaggctacagaatcttgtagagaaaatatcagaaacagctcagcagaagaacttttcttacaaggatgacgacagatatgagcaggcgagtgacgtccgggcacagctcaagttttttgaacagcttgatcaaatcgaaaagcagaggaaggatgagcaggagcgggagatcctgatgagggcagcaaagtctcggtcaagacaagaagatccagaacagttaaggctgaaacagaaggcaaaggagatgcagcaacaggaactggcacaaatgagacagcgggacgccaacctcacagcactagcagcgatcgggcccaggaaaaagaggaaagtggactgtccggggccgggctcaggagcagaggggtcgggccccggctcagtggtcccaggcagctcgggtgtcggaacccccagacagttcacgcgacaaagaatcacgcgggtcaacctcagggacctcatattttgtttagaaaatgaacgtgagacaagccattcactgctgctctacaaagcattccttaagtgacacaggaggacgcctggggactttttatatatttgcagattacgcctttttgtaacgagcaaatgggatattgtttaaaaaacagccacctctttacaatggaacagttttatattcctgtttctaaatcagctcttcagtgtgaaagaaaacacgtttctgtaacagagagaacacaaaggcctgtggatactcttaaaggacaattaaatcttaactcatcttgattgagtggccttcctgccaaacaagccatatataaagactgatggaatcgttagcaaataattagctgccctctgtcaactcatagcagtttctgcattatttgtgcattttggtttagttctacctaacttactatgtaggtgtatgtctacagccgatgacctcatttcgtttattttatttttgtaatagtcagttggcaaagcaaactgattttttagactatttatcttccttcccttcccctcccaccccgctctcctctctgccccctgccctcccctcccctcccttcccctccactccgctgagaatcctggaggaatacacaattcatcgttgcacccccacctcagagtgtaatcgcatttctgcttggtagaggccgagcccagcaaaggtggctccttctgaatgtgtggtcagcatctgtacaaatgcattttatttgctatagtttgtaaagctgtaaagttaaaagagatgaaaaccttttcagcataaatatattttacttgcactgtgttttttagctaaaagtgaaaacctagattaaataaaatcaaagttgagaagaatcatcaaaagactgtttctcggtgtgaatcaagtgttgaaaaatggttggtgtattttgtcagtaattgtacataacttttggcacatgacatagaaatggctatgtaaactataattattttgctaagagactgtatgcaagccttgggccgactttacagacgtccagagcaaagccccttctttgtacctatttttttattacaaatatactaattggttctttctattttcagaggttattgtatgaaattgtctattgatagtacttttatgactgtaaatactctggctttctccgtgtgaattctcacattagactttaattcgagcgcgtgtgaactgaacgctgatcagtattttttatcaacacctgagaactgttacaccttttattttgtcttttaggaaatccctgtctttccattttttcatgtaaattttgcacagttacttgttcatatgtaaatattttactttcagaaatgaagtttttaattgctattgttttatataggattgaaagaaaattaactcctttattaaaaacaaatttatctgta

SEQ ID NO: 189001 - DNA, 532 bp, Homo sapiens
  Payload ID: 17328
  Gene Symbol: TAF4
  Gene Name: TAF4 RNA polymerase II, TATA box binding protein (TBP)-associated factor, 135kDa
  ENST ID: ENST00000474089
  CDS Start-End: 1-238
gtcaagacaagaagatccagaacagttaaggctgaaacagaaggcaaaggagatgcagcaacaggaactggcacaaatgagacagcgggacgccaacctcacagcactagcagcgatcgggcccaggaaaaagaggaaagtggactgtccggggccgggctcaggagcagaggcctccgtggcactcagtaagcagcgggctcagggagagcgtcctggatggtcaccatgcaggtaagatgaggaggacacttggaaccaggcattggatgcgagccccaccccatgggagggggacggggggatgctgggcaccagggggacctgtgggccagctggccctgggcttgtgcttggggagtgaatgatgggttctgacccccatgcacccctgtgggcccctggcatcactggccccatccttcacccctgccaaccacgcttgccctgtgcctctgaagctcccccactaagggggtggagtctaattccctgccccttgactgtgggttcagccatgtgacttgctttg

SEQ ID NO: 189002 - DNA, 645 bp, Homo sapiens
  Payload ID: 17328
  Gene Symbol: TAF4
  Gene Name: TAF4 RNA polymerase II, TATA box binding protein (TBP)-associated factor, 135kDa
  ENST ID: ENST00000488539
  CDS Start-End: 1-645
gtgcctttcctgaagaggagcttacccgccttgagacagctgacccccgactccgcggccttcatccagcagagccagcagcagccgccaccgcccacctcgcaggccaccactgcgctcacggccgtggtgctgagtagctcggtccagcgcacggccgggaagacggcggccaccgtgaccagtgccctccagccccctgtgctcagcctcacgcagcccacgcaggtcatccagcagcctccgaagccaggagccctgatccggcccccgcaggtgacgttgacgcagacacccatggtcgccctgcggcagcctcacaaccggatcatgctcaccacgcctcagcagatccagctgaacccactgcagccagtccctgtggtgaaacccgccgtgttacctggaaccaaagccctttctgctgtctcggcacaagcagctgctgcacagaaaaataaactcaaggagcctgggggaggttcgtttcgggacgatgatgacattaatgatgttgcatcgatggctggagtaaacttgtcagaagaaagtgcaagaatattagccacgaactctgaattggtgggcacgctaacgcggtcctgtaaagatgaaaccttcctcctccaagcgcctttgcagaga

SEQ ID NO: 189003 - DNA, 645 bp, Homo sapiens; identical to SEQ ID NO: 189002
  Payload ID: 17328
  Gene Symbol: TAF4
  Gene Name: TAF4 RNA polymerase II, TATA box binding protein (TBP)-associated factor, 135kDa
  ENST ID: ENST00000626682
  CDS Start-End: 1-645

SEQ ID NO: 189004 - DNA, 532 bp, Homo sapiens; identical to SEQ ID NO: 189001
  Payload ID: 17328
  Gene Symbol: TAF4
  Gene Name: TAF4 RNA polymerase II, TATA box binding protein (TBP)-associated factor, 135kDa
  ENST ID: ENST00000628525
  CDS Start-End: 1-238

SEQ ID NO: 189005 - DNA, 2744 bp, Homo sapiens
  Payload ID: 17328
  Gene Symbol: TAF4
  Gene Name: TAF4 RNA polymerase II, TATA box binding protein (TBP)-associated factor, 135kDa
  ENST ID: ENST00000627770
  CDS Start-End: 1-1374
gatggaaaaatagaagcagaagatttcacaagcaggttataccgagaacttaattcttcacctcaaccttaccttgtgcctttcctgaagaggagcttacccgccttgagacagctgacccccgactccgcggccttcatccagcagagccagcagcagccgccaccgcccacctcgcaggccaccactgcgctcacggccgtggtgctgagtagctcggtccagcgcacggccgggaagacggcggccaccgtgaccagtgccctccagccccctgtgctcagcctcacgcagcccacgcaggtcggcgtcggcaagcaggggcaacccacaccgctggtcatccagcagcctccgaagccaggagccctgatccggcccccgcaggtgacgttgacgcagacacccatggtcgccctgcggcagcctcacaaccggatcatgctcaccacgcctcagcagatccagctgaacccactgcagccagtccctgtggtgaaacccgccgtgttacctggaaccaaagccctttctgctgtctcggcacaagcagctgctgcacagaaaaataaactcaaggagcctgggggaggttcgtttcgggacgatgatgacattaatgatgttgcatcgatggctggagtaaacttgtcagaagaaagtgcaagaatattagccacgaactctgaattggtgggcacgctaacgcggtcctgtaaagatgaaaccttcctcctccaagcgcctttgcagagaagaatattagaaataggtaaaaaacatggtataacggaattacatccagatgtagtaagttatgtatcacatgccacgcaacaaaggctacagaatcttgtagagaaaatatcagaaacagctcagcagaagaacttttcttacaaggatgacgacagatatgagcaggcgagtgacgtccgggcacagctcaagttttttgaacagcttgatcaaatcgaaaagcagaggaaggatgagcaggagcgggagatcctgatgagggcagcaaagtctcggtcaagacaagaagatccagaacagttaaggctgaaacagaaggcaaaggagatgcagcaacaggaactggcacaaatgagacagcgggacgccaacctcacagcactagcagcgatcgggcccaggaaaaagaggaaagtggactgtccggggccgggctcaggagcagaggggtcgggccccggctcagtggtcccaggcagctcgggtgtcggaacccccagacagttcacgcgacaaagaatcacgcgggtcaacctcagggacctcatattttgtttagaaaatgaacgtgagacaagccattcactgctgctctacaaagcattccttaagtgacacaggaggacgcctggggactttttatatatttgcagattacgcctttttgtaacgagcaaatgggatattgtttaaaaaacagccacctctttacaatggaacagttttatattcctgtttctaaatcagctcttcagtgtgaaagaaaacacgtttctgtaacagagagaacacaaaggcctgtggatactcttaaaggacaattaaatcttaactcatcttgattgagtggccttcctgccaaacaagccatatataaagactgatggaatcgttagcaaataattagctgccctctgtcaactcatagcagtttctgcattatttgtgcattttggtttagttctacctaacttactatgtaggtgtatgtctacagccgatgacctcatttcgtttattttatttttgtaatagtcagttggcaaagcaaactgattttttagactatttatcttccttcccttcccctcccaccccgctctcctctctgccccctgccctcccctcccctcccttcccctccactccgctgagaatcctggaggaatacacaattcatcgttgcacccccacctcagagtgtaatcgcatttctgcttggtagaggccgagcccagcaaaggtggctccttctgaatgtgtggtcagcatctgtacaaatgcattttatttgctatagtttgtaaagctgtaaagttaaaagagatgaaaaccttttcagcataaatatattttacttgcactgtgttttttagctaaaagtgaaaacctagattaaataaaatcaaagttgagaagaatcatcaaaagactgtttctcggtgtgaatcaagtgttgaaaaatggttggtgtattttgtcagtaattgtacataacttttggcacatgacatagaaatggctatgtaaactataattattttgctaagagactgtatgcaagccttgggccgactttacagacgtccagagcaaagccccttctttgtacctatttttttattacaaatatactaattggttctttctattttcagaggttattgtatgaaattgtctattgatagtacttttatgactgtaaatactctggctttctccgtgtgaattctcacattagactttaattcgagcgcgtgtgaactgaacgctgatcagtattttttatcaacacctgagaactgttacaccttttattttgtcttttaggaaatccctgtctttccattttttcatgtaaattttgcacagttacttgttcatatgtaaatattttactttcagaaatgaagtttttaattgctattgttttatataggattgaaagaaaattaactcctttattaaaaacaaatttatctgta

SEQ ID NO: 189006 - DNA, 5260 bp, Homo sapiens
  Payload ID: 17329
  Gene Symbol: TAF4B
  Gene Name: TAF4b RNA polymerase II, TATA box binding protein (TBP)-associated factor, 105kDa
  Uniprot ID: Q92750
  ENST ID: ENST00000269142
  CDS Start-End: 999-3587
aagattttaggcagtttaactctaaaatatgaaaataggcacatctcacagactataaaactatacgccattttaatttttacaatgtcaattctaactgcgaattttagcaacgcttcagtgtgaagacagcagagaaaaacactgaaaatgcgtgattgaattcttattgagtcactcttctcggaaatcagtcctccccattttctccttaaaaaatagaatcctggagatagtctagtgctggcttttcgaggaacacactacaggggacacaaggagaggaacacggatgccgcagttttccaagtgcagcttgcccctcccacgtgataggtttctggcatcgcccctccttgctggcgattctggggaagattttaacgctccctggagccgtccccagtgacgtcacgggcgcggctccgctccttggccaatcacgcggccggatcccggggaaacccggggcggtggcggcggcctgggcgcgtgcgcgaggtctccgcgtggctatataaacatggctggcgtggccgcgcggcggggccgtgccaatcgcgcgtagggggctgtgggcactcggggttcgtagttttgaaatttctggcgggggagcagctgcgcagttaggctcgaggtgtgagcgacgaccttccgggagccgcaagtccaggctcccccgcagcgggacccgagcctgaggcgcagggctgaggcagcgcacgtgtgagcgccgctgaggaagctgcgagaggtcgggcgggtgtcgctccgggggcagcccaggctcgcgcggacgagaggaaggtccgggacgcgcgtgtcctgccgtgcagcgggcgcccgtcactgacttcgctgctgcggcccccgcgcctctccccagcgatgctgtggaacccgaaccgcaccggagtcggctgccgcgcgccaagcctcccctcacctctgctcccggaaccgcagcgccaaagctgccgctgagcccctgggggatgcccgccggcctcaccgaacccgccggcgccgctcccccggctgctgtgagcgcctcggggaccgtgaccatggccccggccggggcgctgccggtgcgggtggagagcactccggtggccctgggcgccgtgactaaggctcctgtcagcgtctgcgtggagcccacggcgtcccagcccctgcggtcccccgtggggaccctggtgaccaaagtggctccggtcagcgcccctcctaaagtcagcagcggccctaggctgcctgctcctcagatagtcgccgtgaaagcccccaacaccacgacaatccagtttcctgctaatttgcagcttcctccaggaaccgttttgattaaaagtaacagtggtccgttgatgttggtatctcctcagcaaactgtaacaagagccgagaccacaagtaacataacctcaaggccagcagtaccagcgaatcctcaaacagtcaaaatctgtacagtgccgaactctagctcacaattaatcaagaaagtggcagtgacacctgttaaaaaattggcacaaataggaactactgtggtaaccactgttccgaagccttcctcagtacaatctgtggctgtgccaaccagtgtcgtcacagttactcctggaaagccattgaatactgtaactaccctgaagccttcaagtttgggagcatcatccactccttcaaatgagcccaatcttaaagcagagaactcagcagctgttcagattaatctttctccgacaatgctagaaaatgtgaagaaatgcaagaacttccttgcaatgttaataaaactagcatgtagtggatcacagtccccagaaatggggcaaaatgtgaagaagctggtggaacaacttttggatgcaaaaatcgaagcagaagaatttactaggaaactgtatgttgaactcaagtcttcacctcagcctcacctggttccttttcttaagaaaagcgtggttgccttacgacaacttctgcctaactcccagagcttcatccagcaatgtgttcagcagacttctagtgacatggtcattgctacctgtactacaacagtaacaacttctcctgtggtgacaactacagtgtcctcaagccagtctgaaaagtcaattattgtttctggagcaacagcacccagaactgtgtcagtgcaaactttgaacccacttgctggtccagtgggagcaaaagctggagttgtgacacttcattctgtgggcccaactgctgcaacaggaggaacaacagctggaactggtttgcttcagacttcaaaaccacttgtgacatctgtggcaaacacagtgaccacggtctcactgcaacctgaaaagccagttgtctctggaacagcagtaacactgtcccttccagcagtaacttttggagaaacttcaggtgcagctatttgtcttccatctgtgaaacctgttgtttcttctgctgggaccacatctgacaagcctgttattgggactccagttcaaatcaaacttgcccagccgggccctgtcctttcacaaccagctgggattccacaggcagttcaagtcaagcaactagtagttcagcagccttcaggaggcaatgaaaaacaagtgaccacaatttcacattcctcaacattgaccattcagaaatgtggacagaagacgatgccagtgaacaccataatacctactagtcagtttcctccagcttccattctaaagcaaattactctgcctggaaataaaattctgtcacttcaagcatctcctactcagaaaaatagaataaaagagaatgtaacatcatgcttccgagatgaggatgacatcaatgatgtgacttctatggcaggggtcaaccttaatgaagaaaatgcctgcatcttagcaacaaactctgaattggttggcacactcattcagtcatgtaaagatgaaccatttctttttattggagctctacaaaagagaattttagacattggtaaaaagcatgacattacagaacttaactctgatgctgtgaacttgatctcccaagcaacacaggaacgactacgaggccttctagaaaaactgactgcaattgctcagcatcgaatgactacttacaaggcaagtgaaaattacatcctgtgtagtgataccaggtcacagctcaaatttcttgaaaagctggatcaattggagaagcagagaaaggatttggaagaaagagaaatgttacttaaggcagccaagagtcgttctaataaagaagatccagaacagctgagattaaagcagaaagccaaagagttacagcaattggaacttgcacagatacagcatagagacgctaatctcacagctcttgcagctattggaccaaggaagaagagaccactagaatctggaattgagggcttaaaagacaaccttcttgcttctgggacatccagcctgacagccaccaaacagttgcatcgtccaagaatcacgagaatctgcctcagggacttgatattttgtatggaacaggaacgggagatgaagtattctcgagctctatacctggcccttctgaagtgaccactccactcttccatccagatccttgctatttactgccaaagaagacacaaagcattgttgcactgtcctgaaatttcaatttctggaaaataatcaccaacatgaaagagcattgtttacagttagaaactttattaactcttacctatccatctcatgggactcttacagactcagattcatctttgtcttctgaaaatcagttatgaaatacactttgcacagaattaggcatctgcctatctgtgcattaaattaaagcaagttaaggccctatttgttactacctgcctcatttgccaaattgtagcaggtgaggtgtccttccctaatacagcatgcattgagatgcaggagaaaggaagaggcataagaaaatacaagaatgactatttcattctatattgaacctgtcccaaagtggtaggttttctgggctggaatcagaagttgcttagctaactatgacagtcaccctctgtacgtgacaggccactgtggtgactttggtcggctgagttccagtgttgtcaaaacaagacaaatggggatagattgtgcctggggttgctaattctctgcttcatatcaccatatgccgtttctggtaccaagtgaggggacatgcttgtcagggaaaccttaaaattgaatctactgatatatcttgttgaaaaaatggaaaaggtgcaaagtattagaaggaacgttagggcgttgctttcaaactgatgaggggaatgtgaaaatggtatcataaaacaggaaatgtgcttcatatgcccaagaggggaagaggtggaatcggaactccaaaacaactggtacatgttttgttgatgggcaaaaaaaatcacagcacaaccagaaaggagaatgtaccagatgttttcaaattagagtatttcaaaaggaaaatgttattttttgttttgtattgttttaaatcccaaggatagtttttatagttccttctgtcataatatattttagttatcctaatttttaagcatgttggcacatttaaaaaatcctaattgatgatgagaaatttttaacaataggactttatgttggattctgtacttaaaaggtactgtcaatatctcactcttggggatatgagctctaaatatgagaagcaagttatatgtgttcacctgaggaagaagctgacggacaaagcaaaccctctttaaaaaaaaaaaaaagaaaattccacgtgtgtggaatacagccggtgaaaaataatcactgtagttagaatcacatacagaaaaaaaatgattgaatcctccaagaaggtatttcaaaaatgggaaatgctatacttataagaattgaaggaaaaaaaaaaaaacacctcacgtatgttattcttcatcctgttcttcccattgggactgttatggccatattctacagtatagtaaattttaaattggccacatttttttttgtttcagcaagttatgtaaaatgctataaattatgtgtatgttaaaggagtactttaagaagagatctttatccaaagttgtttttgtatatttaaatgcttacctttattttttgtaaagtgcagcatactcatttgtgtataatcttactgatcagatgtttaaaattattccaaatacttcattaaaataattattttattataagaa

SEQ ID NO: 189007 - DNA, 4753 bp, Homo sapiens
  Payload ID: 17329
  Gene Symbol: TAF4B
  Gene Name: TAF4b RNA polymerase II, TATA box binding protein (TBP)-associated factor, 105kDa
  ENST ID: ENST00000400466
  CDS Start-End: 490-3087
gtggctatataaacatggctggcgtggccgcgcggcggggccgtgccaatcgcgcgtagggggctgtgggcactcggggttcgtagttttgaaatttctggcgggggagcagctgcgcagttaggctcgaggtgtgagcgacgaccttccgggagccgcaagtccaggctcccccgcagcgggacccgagcctgaggcgcagggctgaggcagcgcacgtgtgagcgccgctgaggaagctgcgagaggtcgggcgggtgtcgctccgggggcagcccaggctcgcgcggacgagaggaaggtccgggacgcgcgtgtcctgccgtgcagcgggcgcccgtcactgacttcgctgctgcggcccccgcgcctctccccagcgatgctgtggaacccgaaccgcaccggagtcggctgccgcgcgccaagcctcccctcacctctgctcccggaaccgcagcgccaaagctgccgctgagcccctgggggatgcccgccggcctcaccgaacccgccggcgccgctcccccggctgctgtgagcgcctcggggaccgtgaccatggccccggccggggcgctgccggtgcgggtggagagcactccggtggccctgggcgccgtgactaaggctcctgtcagcgtctgcgtggagcccacggcgtcccagcccctgcggtcccccgtggggaccctggtgaccaaagtggctccggtcagcgcccctcctaaagtcagcagcggccctaggctgcctgctcctcagatagtcgccgtgaaagcccccaacaccacgacaatccagtttcctgctaatttgcagcttcctccaggaaccgttttgattaaaagtaacagtggtccgttgatgttggtatctcctcagcaaactgtaacaagagccgagaccacaagtaacataacctcaaggccagcagtaccagcgaatcctcaaacagtcaaaatctgtacagtgccgaactctagctcacaattaatcaagaaagtggcagtgacacctgttaaaaaattggcacaaataggaactactgtggtaaccactgttccgaagccttcctcagtacaatctgtggctgtgccaaccagtgtcgtcacagttactcctggaaagccattgaatactgtaactaccctgaagccttcaagtttgggagcatcatccactccttcaaatgagcccaatcttaaagcagagaactcagcagctgttcagattaatctttctccgacaatgctagaaaatgtgaagaaatgcaagaacttccttgcaatgttaataaaactagcatgtagtggatcacagtccccagaaatggggcaaaatgtgaagaagctggtggaacaacttttggatgcaaaaatcgaagcagaagaatttactaggaaactgtatgttgaactcaagtcttcacctcagcctcacctggttccttttcttaagaaaagcgtggttgccttacgacaacttctgcctaactcccagagcttcatccagcaatgtgttcagcagacttctagtgacatggtcattgctacctgtactacaacagtaacaacttctcctgtggtgacaactacagtgtcctcaagccagtctgaaaagtcaattattgtttctggagcaacagcacccagaactgtgtcagtgcaaactttgaacccacttgctggtccagtgggagcaaaagctggagttgtgacacttcattctgtgggcccaactgctgcaacaggaggaacaacagctggaactggtttgcttcagacttcaaaaccacttgtgacatctgtggcaaacacagtgaccacggtctcactgcaacctgaaaagccagttgtctctggaacagcagtaacactgtcccttccagcagtaacttttggagaaacttcaggtgcagctatttgtcttccatctgtgaaacctgttgttttctgctgggaccacatcaagcctgttattgggactccagttcaaatcaaacttgcccagccgggccctgtcctttcacaaccagctgggattccacaggcagttcaagtcaagcaactattctcattgtttcaggtagttcagcagccttcaggaggcaatgaaaaacaagtgaccacaatttcacattcctcaacattgaccattcagaaatgtggacagaagacgatgccagtgaacaccataatacctactagtcagtttcctccagcttccattctaaagcaaattactctgcctggaaataaaattctgtcacttcaagcatctcctactcagaaaaatagaataaaagagaatgtaacatcatgcttccgagatgaggatgacatcaatgatgtgacttctatggcaggggtcaaccttaatgaagaaaatgcctgcatcttagcaacaaactctgaattggttggcacactcattcagtcatgtaaagatgaaccatttctttttattggagctctacaaaagagaattttagacattggtaaaaagcatgacattacagaacttaactctgatgctgtgaacttgatctcccaagcaacacaggaacgactacgaggccttctagaaaaactgactgcaattgctcagcatcgaatgactacttacaaggcaagtgaaaattacatcctgtgtagtgataccaggtcacagctcaaatttcttgaaaagctggatcaattggagaagcagagaaaggatttggaagaaagagaaatgttacttaaggcagccaagagtcgttctaataaagaagatccagaacagctgagattaaagcagaaagccaaagagttacagcaattggaacttgcacagatacagcatagagacgctaatctcacagctcttgcagctattggaccaaggaagaagagaccactagaatctggaattgagggcttaaaagacaaccttcttgcttctgggacatccagcctgacagccaccaaacagttgcatcgtccaagaatcacgagaatctgcctcagggacttgatattttgtatggaacaggaacgggagatgaagtattctcgagctctatacctggcccttctgaagtgaccactccactcttccatccagatccttgctatttactgccaaagaagacacaaagcattgttgcactgtcctgaaatttcaatttctggaaaataatcaccaacatgaaagagcattgtttacagttagaaactttattaactcttacctatccatctcatgggactcttacagactcagattcatctttgtcttctgaaaatcagttatgaaatacactttgcacagaattaggcatctgcctatctgtgcattaaattaaagcaagttaaggccctatttgttactacctgcctcatttgccaaattgtagcaggtgaggtgtccttccctaatacagcatgcattgagatgcaggagaaaggaagaggcataagaaaatacaagaatgactatttcattctatattgaacctgtcccaaagtggtaggttttctgggctggaatcagaagttgcttagctaactatgacagtcaccctctgtacgtgacaggccactgtggtgactttggtcggctgagttccagtgttgtcaaaacaagacaaatggggatagattgtgcctggggttgctaattctctgcttcatatcaccatatgccgtttctggtaccaagtgaggggacatgcttgtcagggaaaccttaaaattgaatctactgatatatcttgttgaaaaaatggaaaaggtgcaaagtattagaaggaacgttagggcgttgctttcaaactgatgaggggaatgtgaaaatggtatcataaaacaggaaatgtgcttcatatgcccaagaggggaagaggtggaatcggaactccaaaacaactggtacatgttttgttgatgggcaaaaaaaatcacagcacaaccagaaaggagaatgtaccagatgttttcaaattagagtatttcaaaaggaaaatgttattttttgttttgtattgttttaaatcccaaggatagtttttatagttccttctgtcataatatattttagttatcctaatttttaagcatgttggcacatttaaaaaatcctaattgatgatgagaaatttttaacaataggactttatgttggattctgtacttaaaaggtactgtcaatatctcactcttggggatatgagctctaaatatgagaagcaagttatatgtgttcacctgaggaagaagctgacggacaaagcaaaccctctttaaaaaaaaaaaaaagaaaattccacgtgtgtggaatacagccggtgaaaaataatcactgtagttagaatcacatacagaaaaaaaatgattgaatcctccaagaaggtatttcaaaaatgggaaatgctatacttataagaattgaaggaaaaaaaaaaaaacacctcacgtatgttattcttcatcctgttcttcccattgggactgttatggccatattctacagtatagtaaattttaaattggccacatttttttttgtttcagcaagttatgtaaaatgctataaattatgtgtatgttaaaggagtactttaagaagagatctttatccaaagttgtttttgtatatttaaatgcttacctttattttttgtaaagtgcagcatactcatttgtgtataatcttactgatcagatgtttaaaattattccaaatacttcattaaaataattattttatt

SEQ ID NO: 189008 - DNA, 4431 bp, Homo sapiens
  Payload ID: 17329
  Gene Symbol: TAF4B
  Gene Name: TAF4b RNA polymerase II, TATA box binding protein (TBP)-associated factor, 105kDa
  Uniprot ID: Q92750
  ENST ID: ENST00000418698
  CDS Start-End: 52-1908
acctctgctcccggaaccgcagcgccaaagctgccgctgagcccctgggggatgcccgccggcctcaccgaacccgccggcgccgctcccccggctgctgtgagcgcctcggggaccgtgaccatggccccggccggggcgctgccggtgcgggtggagagcactccggtggccctgggcgccgtgactaaggctcctgtcagcgtctgcgtggagcccacggcgtcccagcccctgcggtcccccgtggggaccctggtgaccaaagtggctccggtcagcgcccctcctaaagtcagcagcggccctaggctgcctgctcctcagatagtcgccgtgaaagcccccaacaccacgacaatccagtttcctgctaatttgcagcttcctccaggaaccgttttgattaaaagtaacagtggtccgttgatgttggtatctcctcagcaaactgtaacaagagccgagaccacaagtaacataacctcaaggccagcagtaccagcgaatcctcaaacagtcaaaatctgtacagtgccgaactctagctcacaattaatcaagaaagtggcagtgacacctgttaaaaaattggcacaaataggaactactgtggtaaccactgttccgaagccttcctcagtacaatctgtggctgtgccaaccagtgtcgtcacagttactcctggaaagccattgaatactgtaactaccctgaagccttcaagtttgggagcatcatccactccttcaaatgagcccaatcttaaagcagagaactcagcagctgttcagattaatctttctccgacaatgctagaaaatgtgaagaaatgcaagaacttccttgcaatgttaataaaactagcatgtagtggatcacagtccccagaaatggggcaaaatgtgaagaagctggtggaacaacttttggatgcaaaaatcgaagcagaagaatttactaggaaactgtatgttgaactcaagtcttcacctcagcctcacctggttccttttcttaagaaaagcgtggttgccttacgacaacttctgcctaactcccagagcttcatccagcaatgtgttcagcagacttctagtgacatggtcattgctacctgtactacaacagtaacaacttctcctgtggtgacaactacagtgtcctcaagccagtctgaaaagtcaattattgtttctggagcaacagcacccagaactgtgtcagtgcaaactttgaacccacttgctggtccagtgggagcaaaagctggagttgtgacacttcattctgtgggcccaactgctgcaacaggaggaacaacagctggaactggtttgcttcagacttcaaaaccacttgtgacatctgtggcaaacacagtgaccacggtctcactgcaacctgaaaagccagttgtctctggaacagcagtaacactgtcccttccagcagtaacttttggagaaacttcaggtgcagctatttgtcttccatctgtgaaacctgttgtttcttctgctgggaccacatctgacaagcctgttattgggactccagttcaaatcaaacttgcccagccgggccctgtcctttcacaaccagctgggattccacaggcagttcaagtcaagcaactagtagttcagcagccttcaggaggcaatgaaaaacaagtgaccacaatttcacattcctcaacattgaccattcagaaatgtggacagaagacgatgccagtgaacaccataatacctactagtcagtttcctccagcttccattctaaagcaaattactctgcctggaaataaaattctgtcacttcaagcatctcctactcagaaaaatagaataaaagagaatgtaacatcatgcttccggtctacttttatatgcgtatattaaaatgttcaccatcggtctttttttctgtcgtgttctgtcatctcttggttggatgaagttcatctgctggtaaattcctcaggaaaggctcacagagatgaggatgacatcaatgatgtgacttctatggcaggggtcaaccttaatgaagaaaatgcctgcatcttagcaacaaactctgaattggttggcacactcattcagtcatgtaaagatgaaccatttctttttattggagctctacaaaagagaattttagacattggtaaaaagcatgacattacagaacttaactctgatgctgtgaacttgatctcccaagcaacacaggaacgactacgaggccttctagaaaaactgactgcaattgctcagcatcgaatgactacttacaaggcaagtgaaaattacatcctgtgtagtgataccaggtcacagctcaaatttcttgaaaagctggatcaattggagaagcagagaaaggatttggaagaaagagaaatgttacttaaggcagccaagagtcgttctaataaagaagatccagaacagctgagattaaagcagaaagccaaagagttacagcaattggaacttgcacagatacagcatagagacgctaatctcacagctcttgcagctattggaccaaggaagaagagaccactagaatctggaattgagggcttaaaagacaaccttcttgcttctgggacatccagcctgacagccaccaaacagttgcatcgtccaagaatcacgagaatctgcctcagggacttgatattttgtatggaacaggaacgggagatgaagtattctcgagctctatacctggcccttctgaagtgaccactccactcttccatccagatccttgctatttactgccaaagaagacacaaagcattgttgcactgtcctgaaatttcaatttctggaaaataatcaccaacatgaaagagcattgtttacagttagaaactttattaactcttacctatccatctcatgggactcttacagactcagattcatctttgtcttctgaaaatcagttatgaaatacactttgcacagaattaggcatctgcctatctgtgcattaaattaaagcaagttaaggccctatttgttactacctgcctcatttgccaaattgtagcaggtgaggtgtccttccctaatacagcatgcattgagatgcaggagaaaggaagaggcataagaaaatacaagaatgactatttcattctatattgaacctgtcccaaagtggtaggttttctgggctggaatcagaagttgcttagctaactatgacagtcaccctctgtacgtgacaggccactgtggtgactttggtcggctgagttccagtgttgtcaaaacaagacaaatggggatagattgtgcctggggttgctaattctctgcttcatatcaccatatgccgtttctggtaccaagtgaggggacatgcttgtcagggaaaccttaaaattgaatctactgatatatcttgttgaaaaaatggaaaaggtgcaaagtattagaaggaacgttagggcgttgctttcaaactgatgaggggaatgtgaaaatggtatcataaaacaggaaatgtgcttcatatgcccaagaggggaagaggtggaatcggaactccaaaacaactggtacatgttttgttgatgggcaaaaaaaatcacagcacaaccagaaaggagaatgtaccagatgttttcaaattagagtatttcaaaaggaaaatgttattttttgttttgtattgttttaaatcccaaggatagtttttatagttccttctgtcataatatattttagttatcctaatttttaagcatgttggcacatttaaaaaatcctaattgatgatgagaaatttttaacaataggactttatgttggattctgtacttaaaaggtactgtcaatatctcactcttggggatatgagctctaaatatgagaagcaagttatatgtgttcacctgaggaagaagctgacggacaaagcaaaccctctttaaaaaaaaaaaaaagaaaattccacgtgtgtggaatacagccggtgaaaaataatcactgtagttagaatcacatacagaaaaaaaatgattgaatcctccaagaaggtatttcaaaaatgggaaatgctatacttataagaattgaaggaaaaaaaaaaaaacacctcacgtatgttattcttcatcctgttcttcccattgggactgttatggccatattctacagtatagtaaattttaaattggccacatttttttttgtttcagcaagttatgtaaaatgctataaattatgtgtatgttaaaggagtactttaagaagagatctttatccaaagttgtttttgtatatttaaatgcttacctttattttttgtaaagtgcagcatactcatttgtgtataatcttactgatcagatgtttaaaattattccaaatacttcattaaaataattattttattataag

SEQ ID NO: 189009 - DNA, 3204 bp, Homo sapiens
  Payload ID: 17329
  Gene Symbol: TAF4B
  Gene Name: TAF4b RNA polymerase II, TATA box binding protein (TBP)-associated factor, 105kDa
  ENST ID: ENST00000578121
  CDS Start-End: 449-3052
cgtgccaatcgcgcgtagggggctgtgggcactcggggttcgtagttttgaaatttctggcgggggagcagctgcgcagttaggctcgaggtgtgagcgacgaccttccgggagccgcaagtccaggctcccccgcagcgggacccgagcctgaggcgcagggctgaggcagcgcacgtgtgagcgccgctgaggaagctgcgagaggtcgggcgggtgtcgctccgggggcagcccaggctcgcgcggacgagaggaaggtccgggacgcgcgtgtcctgccgtgcagcgggcgcccgtcactgacttcgctgctgcggcccccgcgcctctccccagcgatgctgtggaacccgaaccgcaccggagtcggctgccgcgcgccaagcctcccctcacctctgctcccggaaccgcagcgccaaagctgccgctgagcccctgggggatgcccgccggcctcaccgaacccgccggcgccgctcccccggctgctgtgagcgcctcggggaccgtgaccatggccccggccggggcgctgccggtgcgggtggagagcactccggtggccctgggcgccgtgactaaggctcctgtcagcgtctgcgtggagcccacggcgtcccagcccctgcggtcccccgtggggaccctggtgaccaaagtggctccggtcagcgcccctcctaaagtcagcagcggccctaggctgcctgctcctcagatagtcgccgtgaaagcccccaacaccacgacaatccagtttcctgctaatttgcagcttcctccaggaaccgttttgattaaaagtaacagtggtccgttgatgttggtatctcctcagcaaactgtaacaagagccgagaccacaagtaacataacctcaaggccagcagtaccagcgaatcctcaaacagtcaaaatctgtacagtgccgaactctagctcacaattaatcaagaaagtggcagtgacacctgttaaaaaattggcacaaataggaactactgtggtaaccactgttccgaagccttcctcagtacaatctgtggctgtgccaaccagtgtcgtcacagttactcctggaaagccattgaatactgtaactaccctgaagccttcaagtttgggagcatcatccactccttcaaatgagcccaatcttaaagcagagaactcagcagctgttcagattaatctttctccgacaatgctagaaaatgtgaagaaatgcaagaacttccttgcaatgttaataaaactagcatgtagtggatcacagtccccagaaatggggcaaaatgtgaagaagctggtggaacaacttttggatgcaaaaatcgaagcagaagaatttactaggaaactgtatgttgaactcaagtcttcacctcagcctcacctggttccttttcttaagaaaagcgtggttgccttacgacaacttctgcctaactcccagagcttcatccagcaatgtgttcagcagacttctagtgacatggtcattgctacctgtactacaacagtaacaacttctcctgtggtgacaactacagtgtcctcaagccagtctgaaaagtcaattattgtttctggagcaacagcacccagaactgtgtcagtgcaaactttgaacccacttgctggtccagtgggagcaaaagctggagttgtgacacttcattctgtgggcccaactgctgcaacaggaggaacaacagctggaactggtttgcttcagacttcaaaaccacttgtgacatctgtggcaaacacagtgaccacggtctcactgcaacctgaaaagccagttgtctctggaacagcagtaacactgtcccttccagcagtaacttttggagaaacttcaggtgcagctatttgtcttccatctgtgaaacctgttgtttcttctgctgggaccacatctgacaagcctgttattgggactccagttcaaatcaaacttgcccagccgggccctgtcctttcacaaccagctgggattccacaggcagttcaagtcaagcaactattctcattgtttcaggtagttcagcagccttcaggaggcaatgaaaaacaagtgaccacaatttcacattcctcaacattgaccattcagaaatgtggacagaagacgatgccagtgaacaccataatacctactagtcagtttcctccagcttccattctaaagcaaattactctgcctggaaataaaattctgtcacttcaagcatctcctactcagaaaaatagaataaaagagaatgtaacatcatgcttccgagatgaggatgacatcaatgatgtgacttctatggcaggggtcaaccttaatgaagaaaatgcctgcatcttagcaacaaactctgaattggttggcacactcattcagtcatgtaaagatgaaccatttctttttattggagctctacaaaagagaattttagacattggtaaaaagcatgacattacagaacttaactctgatgctgtgaacttgatctcccaagcaacacaggaacgactacgaggccttctagaaaaactgactgcaattgctcagcatcgaatgactacttacaaggcaagtgaaaattacatcctgtgtagtgataccaggtcacagctcaaatttcttgaaaagctggatcaattggagaagcagagaaaggatttggaagaaagagaaatgttacttaaggcagccaagagtcgttctaataaagaagatccagaacagctgagattaaagcagaaagccaaagagttacagcaattggaacttgcacagatacagcatagagacgctaatctcacagctcttgcagctattggaccaaggaagaagagaccactagaatctggaattgagggcttaaaagacaaccttcttgcttctgggacatccagcctgacagccaccaaacagttgcatcgtccaagaatcacgagaatctgcctcagggacttgatattttgtatggaacaggaacgggagatgaagtattctcgagctctatacctggcccttctgaagtgaccactccactcttccatccagatccttgctatttactgccaaagaagacacaaagcattgttgcactgtcctgaaatttcaatttctggaaaataatcaccaacatgaaagagcattgtttacagttagaaactttattaactcttacctat

SEQ ID NO: 189010 - DNA, 3268 bp, Homo sapiens
  Payload ID: 17330
  Gene Symbol: TAF5
  Gene Name: TAF5 RNA polymerase II, TATA box binding protein (TBP)-associated factor, 100kDa
  Uniprot ID: Q15542
  ENST ID: ENST00000369839
  CDS Start-End: 24-2426
gcgcgaggtggctcagccgcaagatggcggcgctggcggaggagcagacggaggtggcggtcaagctagagcctgagggaccgccaacgctgctacctccgcaggcgggggacggcgcaggcgagggtagcggcggcactaccaacaacggccccaacggcggcggcgggaacgttgcggcgtcgtcgtccactggcggggatggcgggacccccaagcccacggtggctgtctccgccgctgccccggcgggggcggccccggtgcccgccgctgctccggacgccggcgctccgcatgaccgacagactctactggccgtgctgcagttcctacggcagagcaaactccgcgaggccgaagaggcgctgcgccgtgaggccgggctgctggaggaggcagtggcgggctccggagccccgggagaggtggacagcgccggcgctgaggtgaccagcgcgcttctcagccgggtgaccgcctcggcccctggccctgcggcccccgaccctccgggcactggcgcttcgggggccacggtcgtctcaggttcagcctcaggtcctgcggctccgggtaaagttggaagtgttgctgtggaagaccagccagatgtcagtgccgtgttgtcagcctacaaccaacaaggagatcccacaatgtatgaagaatactatagtggactgaaacacttcattgaatgttccctggactgccatcgggcagagttgtcccaacttttttatcctctgtttgtgcacatgtacttggagctagtctacaatcaacatgagaatgaagcaaagtcattctttgagaagttccatggagatcaggaatgttattaccaggatgacctacgagtattatctagtcttaccaaaaaggaacacatgaaagggaatgagaccatgttggattttcgaacaagtaaatttgttctgcgtatttcccgtgactcgtaccaactcttgaagaggcatcttcaggagaaacagaacaatcagatatggaacatagttcaggagcacctctacattgacatctttgatgggatgccgcgtagtaagcaacagatagatgcgatggtgggaagtttggcaggagaggctaaacgagaggcaaacaaatcaaaggtattttttggtttattaaaagaaccagaaattgaggtacctttggatgacgaggatgaagagggagaaaatgaagaaggaaaacctaaaaagaagaagcctaaaaaagatagtattggatccaaaagcaaaaaacaagatcccaatgctccacctcagaacagaatccctcttcctgagttgaaagattcagataagttggataagataatgaatatgaaagaaaccaccaaacgagtgcgccttgggccggactgcttaccctccatttgtttctatacatttctcaatgcttaccagggtctcactgcagtggatgtcactgatgattctagtctgattgctggaggttttgcagattcaactgtcagagtgtggtcggtaacacccaaaaagcttcgtagtgtcaaacaagcatcagatcttagtcttatagacaaagaatcagatgatgtcttagaaagaatcatggatgagaaaacagcaagtgagttgaagattttgtatggtcacagtgggcctgtctacggagccagcttcagtccggataggaactatctgctttcctcttcagaggacggaactgttagattgtggagccttcaaacatttacttgtttggtgggatataaaggacacaactatccagtatgggacacacaattttctccatatggatattattttgtgtcagggggccatgaccgagtagctcggctctgggctacagaccactatcagcctttaagaatatttgccggccatcttgctgatgtgaattgtaccagattccatccaaattctaattatgttgctacgggctctgcagacagaactgtgcggctctgggacgtcctgaatggtaactgtgtaaggatcttcactggacacaagggaccaattcattccttgacattttctcccaatgggagattcctggctacaggagcaacagatggcagagtgcttctttgggatattggacatggtttgatggttggagaattaaaaggccacactgatacagtctgttcacttaggtttagtagagatggtgaaattttggcatcaggttcaatggataatacagttcgattatgggatgctatcaaagcctttgaagatttagagaccgatgactttactacagccactgggcatataaatttacctgagaattcacaggagttattgttgggaacatatatgaccaaatcaacaccagttgtacaccttcattttactcgaagaaacctggttctagctgcaggagcttatagtccacaataaaccatcggtattaaagaccttttggaagctactgtttttaaaaagggagactaaaagcaaatacctcagtgattaatatttaagctacagagaatgtttttgtctatatggatctggaagtatgctgcttggaaaaatctgaacaggacagttccacgtttctatagcaaccacatttgactaatttccgttagttgaataagaggtattatgatcatggaggggacatttatggtgctttggattgtgtggaaactatgcattttctgttcaaatgctattttaatttattacatttagaaaaaaagttgatttcaataattcatcctgcttcaagattcaaattcagaaatatactatcatcttgaattttagctgaagaatcctatgagcatgtatgtttctgctgtaaaaacgtagttactgtatggcactcaaaaactatgttaaatgatccactaactttttttttcttggcccatgattaatggaatgtatgtaactaggtagggttcctttcttagatctagaggaagtacagccacccactgacatctgaatttatatacctgttgagttttgagtgcacccaaacactcgataaaccaggtgaagaaatttagcttccatgttctacttcagctaaaacagctacatacaacctagtacacttgaagtcagacagacatttcagttgcttacctccagtactgagccttgctttgggaaactaaaagatttagaccaagtcactgccagtttttgcctttgttgcattttgtacagtttttatatttttgatatcttgtaaataaagacaaccagcttttccaggttcataa

SEQ ID NO: 189011 - DNA, 3112 bp, Homo sapiens
  Payload ID: 17331
  Gene Symbol: TAF5L
  Gene Name: TAF5-like RNA polymerase II, p300/CBP-associated factor (PCAF)-associated factor, 65kDa
  Uniprot ID: O75529
  ENST ID: ENST00000258281
  CDS Start-End: 167-1936
gcggccgcccagagcggcggcgggggcggcggggcgcggggcgcgggggcccagctgagccggccgtcggagtgagaccctgcggcagagacgacggaggcggaagcaacccgatcccggaggcggcggcggcggggggagccggagccgcctgggatgttcagtcatgaaacgagtgcgtaccgagcagattcagatggcagtgtcctgctacctcaaacgccggcagtacgtggactcagatggtcccctgaagcaaggactgcggctgtcacagactgctgaagagatggcggccaatctaacagtgcaatcagaatctggttgtgccaacatagtgtctgcagccccttgccaggcagaaccccagcaatatgaagtacagtttggacgactgcggaattttctcactgattctgattcccagcatagccacgaagtgatgcctctcctctatcctctctttgtctacctccatctcaacctggtccaaaacagtccgaagagcacagtggaaagtttttacagccgcttccatggaatgtttctgcagaatgctagccagaaggatgtcattgagcagctacagaccactcaaaccatccaggacatcctatctaacttcaagcttcgagcattcctagataacaagtacgtggtccgtctccaagaagacagctacaactaccttatccgctacctccaaagtgacaacaatactgccctgtgcaaagtcctcaccttacatattcatcttgacgtgcagcctgccaagagaacagactatcagctgtatgccagtggcagctcctcccgcagtgagaacaacggtttggagccccccgacatgcccagccctattctgcagaacgaggctgccctagaggtcttacaggagagcattaagcgagtcaaggatgggcctccctccctcactaccatctgcttctatgccttctataacacagagcagctgttgaacactgcagaaatctcccccgatagcaagctgcttgctgctgggtttgacaactcctgtataaaactttggagtttacgatccaagaagttaaaatcagagccccaccaagtagacgtgtcccgcatccatttggcttgtgatattctggaggaggaggatgatgaggatgataatgcaggcacggagatgaagatactgcggggccactgcggaccagtgtacagcacgaggttcctcgcggacagctcagggttgctctcttgttctgaagacatgtccatcagatactgggatctggggagtttcaccaacactgtgttgtaccaaggacatgcctatcctgtgtgggatctggacatcagtccatatagcctgtacttcgccagcgggtcccacgaccgcaccgccaggctgtggtcatttgatcggacgtacccgctgaggatatatgcaggacacctggcagatgtggactgtgtcaaattccaccctaattcaaactacttggccacgggctcaaccgacaagaccgtccggctgtggagcgctcagcaggggaactcggtgaggcttttcacaggccaccgtggccccgtgctttctctcgccttttctcccaacggtaagtacttggcgtctgctggcgaggaccagcggttgaagctgtgggacttggcctctgggaccctttataaagagttgagaggccacacagacaatatcaccagcctcaccttcagtccagacagcggcttgattgcctctgcctccatggacaactcggtgcgcgtctgggacatcaggaacacttactgcagtgcacctgccgacggctcctccagcgagctcgtgggcgtgtacaccgggcagatgagcaacgtcctgagcgtgcagttcatggcctgtaaccttcttctggtgactggaattacacaagaaaatcaggaacattaattttttaactttgttggaacggactggggtaacagtggaaagcctccagttgcaatccttcaatgagctgagattgaatcattgactgtgaaagagccccctcctcccctctctcctgggccctcattccgggcaggtcccccttcactcagccccccagtgtcgaaggccaaggttggggaggggaacaggagagaggcaatgatgagtgatcaagaattagagtgccctggaggtcactcacaagtcctcatggagactctgccgtgacctcgcgcatgcgagcaccttcctgtctctcattttcaccatctgactggggctaggtttggttagagggcggctgtagagcaccctcaggagaagtggcgccgcaggggtcacgcatggtccagccctcaggtgggagggaagtccttgttggcagagggatgtggggcgggaatgaggaaaggggagggcatgatcctggcaaatagtctttccttttccgtaattacagagaaccaggattttttttaattattgttattataattataattattattattattgacatgaggaaacctagcactggcagagggcaccttctctgcttttaatctttcaggtttgactcctggcactggttttgatacttggaattttgaggttcagggaattcagagaatttggtagcacagtgtattgggagaaagggaaatttcgggtgacagattgatcaccctggctgacatgtttctggaagtgggtgggtgggtttgattgagaacactttgggctcctgcagtgatggtgggaaagaaaaattctttccaaagctgcacttctcttaataattctctcccctcaaaagaaagattatgataaagaataatttggagtaataagtaacaagatagaattagaaaaatgttgaatttctgaatgaccattcagaggtgtggctttttccacgtctttttctcctgcaatgaactgctcccacgtcctgcactgcaataccagtctaatgaacactttgtgaaacaaatcgtaagtatgtacgcacgcatatcaaactatgctctgaggataaagcaagttctaatttgtggaaaaaggattaaatatttctgttttctgaaaagagttattttgtattttgttttctattaaaatgtatttagtttc

SEQ ID NO: 189012 - DNA, 492 bp, Homo sapiens
  Payload ID: 17331
  Gene Symbol: TAF5L
  Gene Name: TAF5-like RNA polymerase II, p300/CBP-associated factor (PCAF)-associated factor, 65kDa
  ENST ID: ENST00000366674
  CDS Start-End: 167-421
gcggccgcccagagcggcggcgggggcggcggggcgcggggcgcgggggcccagctgagccggccgtcggagtgagaccctgcggcagagacgacggaggcggaagcaacccgatcccggaggcggcggcggcggggggagccggagccgcctgggatgttcagtcatgaaacgagtgcgtaccgagcagattcagatggcagtgtcctgctacctcaaacgccggcagtacgtggactcagatggtcccctgaagcaaggactgcggctgtcacagactgctgaagagatggcggccaatctaacaggtaatggtgggggctcgtctggtggggtgagcctggagcaggagaactcacgtcaatatccatgtggaattacttctcctcttctcaagacagtgccagagagagcagactgaccaaaaacctcagtgagctacgttaagtgaatgatgttggcctcagagaccctgtctgtcatttagagcgg

SEQ ID NO: 189013 - DNA, 4062 bp, Homo sapiens
  Payload ID: 17331
  Gene Symbol: TAF5L
  Gene Name: TAF5-like RNA polymerase II, p300/CBP-associated factor (PCAF)-associated factor, 65kDa
  Uniprot ID: O75529
  ENST ID: ENST00000366675
  CDS Start-End: 90-1067
ccctgcggcagagacgacggaggcggaagcaacccgatcccggaggcggcggcggcggggggagccggagccgcctgggatgttcagtcatgaaacgagtgcgtaccgagcagattcagatggcagtgtcctgctacctcaaacgccggcagtacgtggactcagatggtcccctgaagcaaggactgcggctgtcacagactgctgaagagatggcggccaatctaacagtgcaatcagaatctggttgtgccaacatagtgtctgcagccccttgccaggcagaaccccagcaatatgaagtacagtttggacgactgcggaattttctcactgattctgattcccagcatagccacgaagtgatgcctctcctctatcctctctttgtctacctccatctcaacctggtccaaaacagtccgaagagcacagtggaaagtttttacagccgcttccatggaatgtttctgcagaatgctagccagaaggatgtcattgagcagctacagaccactcaaaccatccaggacatcctatctaacttcaagcttcgagcattcctagataacaagtacgtggtccgtctccaagaagacagctacaactaccttatccgctacctccaaagtgacaacaatactgccctgtgcaaagtcctcaccttacatattcatcttgacgtgcagcctgccaagagaacagactatcagctgtatgccagtggcagctcctcccgcagtgagaacaacggtttggagccccccgacatgcccagccctattctgcagaacgaggctgccctagaggtcttacaggagagcattaagcgagtcaaggatgggcctccctccctcactaccatctgcttctatgccttctataacacagagcagctgttgaacactgcagaaatctcccccgatagcaagctgcttgctgctgggtttgacaactcctgtataaaactttggagtttacgatccaagaagttaaaatcagagccccaccaagtagacgtgtcccgcatccatttggcttgtgatattctggaggaggaggtatgaataccatttttttcttccctgcacccgccttcctaatttccttagaatgtccttaccaaacacgacatatcttagaatggacttcctagtttccctcatcatatagctaaagccagactaatgacatgttacctgtagccattgaattcctgcacatgcctaacctaagatgcaaaaacaatttttagcagcattaacttcttattaatgaatggtcagtatttatactatgtgaaatgtggatagcaacactaagcctaatgaaagacctttagctaatattgactttagctgagatttgcagtaaatatacacttatgtgtgtgcacatttgctcaggtacaaataatcggtagtaggataactgagtcgaagggcctccattgtcaactgtaatgaatattattttccccacagaaggttgtgccatttcacagtctcagcaacagtagtaagaatactggcatccctgcaccctcaccacactggatggatggtattggctttctgaggccagtgcatatcctgtggctccatgtaccccggggtgttcccagaccccacttggagaagtaacacaggaagtagagttgccagctcccctccccccgtcagtcagtgttcaatcttgtttggcttgtaaccgtttaggacagtcattgaaaagggcaggcgcagcttgggtttcaggtcaccaaaaatcactaccttagaaaaaatgtgggccaaggaagatagaaattaaacttcacagcattaacttttctttagagtggtcctgaaaaagctgtgggccaaagtatttttgtcttatcaccactgaaattcaggtagctctgcctcacattactttggatggaaaattctttacacaatgttgaataattaaggagcaaaaaaatcactctaattaaattacagttaatgataaggatgtcaagaatattgggtgccctaaattaaaccattgttttcctgttcctgttttctgagtccacttccagttaggatggcctttgaatttttgattcttgcaaccgagacagtataattgaaggatttccttgtgatgagtgaagagtctagattcccatgtagaagctttaatttctagaattttatagtactctccaaaatattttttattacatttgtatttgaattttcaaacatctcttttccttggagacagttccctttttgggagttcttctgataaaactgaggaatactgcctgcatttgctttcgattttctgtaaatacaaaaaaaaattacactgaccttattagctttgatgatacagagtttggagattattctgtgcattaaaaattaatattaaagaagatagcattatgacatctgataacagtagaccaaaataaaacattttaagactctggccactactggtaactagctctgtggcttgtcctatgtttatttccgggtatcagaagtgtatctgaagactcagaagtgaggaaccgcatgcggaattccaggaactgaaagaaattaagtatggctggagttaggagaggggccaagacaggaagtgatgtagtgacactgtcttatatgagcaattatggcggccaaactagggtagtggcagtggcaaaggagacatggatggactagagaagagctcggttattcaattactgtaggggataagggagagcaagcatcaagggtgacgtttgtgtttcaggcttaaacagttggatgtccatcaagaagaaagcaaaagacgtcattggaatggtggttttgtttaagcatttctggctttccatcatggttcatactgaaagtactgtagatgctagctaacctctgccctttttaagaataaaccttttttttaaacttaagaactaaagctgagattctcctattctgttgttgaggggcttcctgcatgcccgcccattttatcacagcaatttgagaagttttctttttggtttctgacaacaagcatttggggagaaagccaggcataaattagttacgatagttggtgtttaatgtttctccagtgaaaatttggacttttctttttcccttatagaatgcataattaaaacagactattattttgaaatgaaatattgaatattaaaaaaaataaaatagagactcttaatacaggagccacaaactcacatacctagagaaaccaaacaggtaaaagcaagtggtgaagccacatggattaatgagatgatagaaagtacaaaatcactatgtaagtcagattaaaaagccagcttgcactctctgctttcatctttttgaagcaataactattacataaatcagtgaatacagtatttctacagtatttgaaacggtgttcacacccagcaattccacttctagacatatatccaagagaatggaaaacatgtgcacacaggcacttgtacatgaatatttatggaagcattattcacaatagccaaaaagtggaaacagtccaaatggccatcaagatgaatgaataaataaaatgtagtgtgtgcatgcagtggaatattatttgcccataaaaagaaatgaagcactgatgcaggctgcaacatggatgaacttgaaagctttatgctacgtgaaagaagccagtcataaaaggtcacctactgttattcctttcataggaaatatccagataggcaagtccatagagacagagaggagaggagtggttgccaggggctgggcaaggagaatgagagtgaccgctaatgggtgtggcatttctttgtgaggtaatgaaaatgttctgtattagatagtggtgatcattgcacaactctgtgaatgtactaaaaatcattgaattgtacactttgaaagaattatatagtatgtaattatatctcagtttaaaaaaaaaaacaggataacagtaaccaaaatcttctatgtaagcttaaaattttctctgttaattatgccaaataaaactgaattcacagca

SEQ ID NO: 189014 - DNA, 2956 bp, Homo sapiens
  Payload ID: 17331
  Gene Symbol: TAF5L
  Gene Name: TAF5-like RNA polymerase II, p300/CBP-associated factor (PCAF)-associated factor, 65kDa
  Uniprot ID: O75529
  ENST ID: ENST00000366676
  CDS Start-End: 1-1770
atgaaacgagtgcgtaccgagcagattcagatggcagtgtcctgctacctcaaacgccggcagtacgtggactcagatggtcccctgaagcaaggactgcggctgtcacagactgctgaagagatggcggccaatctaacagtgcaatcagaatctggttgtgccaacatagtgtctgcagccccttgccaggcagaaccccagcaatatgaagtacagtttggacgactgcggaattttctcactgattctgattcccagcatagccacgaagtgatgcctctcctctatcctctctttgtctacctccatctcaacctggtccaaaacagtccgaagagcacagtggaaagtttttacagccgcttccatggaatgtttctgcagaatgctagccagaaggatgtcattgagcagctacagaccactcaaaccatccaggacatcctatctaacttcaagcttcgagcattcctagataacaagtacgtggtccgtctccaagaagacagctacaactaccttatccgctacctccaaagtgacaacaatactgccctgtgcaaagtcctcaccttacatattcatcttgacgtgcagcctgccaagagaacagactatcagctgtatgccagtggcagctcctcccgcagtgagaacaacggtttggagccccccgacatgcccagccctattctgcagaacgaggctgccctagaggtcttacaggagagcattaagcgagtcaaggatgggcctccctccctcactaccatctgcttctatgccttctataacacagagcagctgttgaacactgcagaaatctcccccgatagcaagctgcttgctgctgggtttgacaactcctgtataaaactttggagtttacgatccaagaagttaaaatcagagccccaccaagtagacgtgtcccgcatccatttggcttgtgatattctggaggaggaggatgatgaggatgataatgcaggcacggagatgaagatactgcggggccactgcggaccagtgtacagcacgaggttcctcgcggacagctcagggttgctctcttgttctgaagacatgtccatcagatactgggatctggggagtttcaccaacactgtgttgtaccaaggacatgcctatcctgtgtgggatctggacatcagtccatatagcctgtacttcgccagcgggtcccacgaccgcaccgccaggctgtggtcatttgatcggacgtacccgctgaggatatatgcaggacacctggcagatgtggactgtgtcaaattccaccctaattcaaactacttggccacgggctcaaccgacaagaccgtccggctgtggagcgctcagcaggggaactcggtgaggcttttcacaggccaccgtggccccgtgctttctctcgccttttctcccaacggtaagtacttggcgtctgctggcgaggaccagcggttgaagctgtgggacttggcctctgggaccctttataaagagttgagaggccacacagacaatatcaccagcctcaccttcagtccagacagcggcttgattgcctctgcctccatggacaactcggtgcgcgtctgggacatcaggaacacttactgcagtgcacctgccgacggctcctccagcgagctcgtgggcgtgtacaccgggcagatgagcaacgtcctgagcgtgcagttcatggcctgtaaccttcttctggtgactggaattacacaagaaaatcaggaacattaattttttaactttgttggaacggactggggtaacagtggaaagcctccagttgcaatccttcaatgagctgagattgaatcattgactgtgaaagagccccctcctcccctctctcctgggccctcattccgggcaggtcccccttcactcagccccccagtgtcgaaggccaaggttggggaggggaacaggagagaggcaatgatgagtgatcaagaattagagtgccctggaggtcactcacaagtcctcatggagactctgccgtgacctcgcgcatgcgagcaccttcctgtctctcattttcaccatctgactggggctaggtttggttagagggcggctgtagagcaccctcaggagaagtggcgccgcaggggtcacgcatggtccagccctcaggtgggagggaagtccttgttggcagagggatgtggggcgggaatgaggaaaggggagggcatgatcctggcaaatagtctttccttttccgtaattacagagaaccaggattttttttaattattgttattataattataattattattattattgacatgaggaaacctagcactggcagagggcaccttctctgcttttaatctttcaggtttgactcctggcactggttttgatacttggaattttgaggttcagggaattcagagaatttggtagcacagtgtattgggagaaagggaaatttcgggtgacagattgatcaccctggctgacatgtttctggaagtgggtgggtgggtttgattgagaacactttgggctcctgcagtgatggtgggaaagaaaaattctttccaaagctgcacttctcttaataattctctcccctcaaaagaaagattatgataaagaataatttggagtaataagtaacaagatagaattagaaaaatgttgaatttctgaatgaccattcagaggtgtggctttttccacgtctttttctcctgcaatgaactgctcccacgtcctgcactgcaataccagtctaatgaacactttgtgaaacaaatcgtaagtatgtacgcacgcatatcaaactatgctctgaggataaagcaagttctaatttgtggaaaaaggattaaatatttctgttttctgaaaagagttattttgtattttgttttctattaaaatgtatttagtttcaaaaaaaaaa

SEQ ID NO: 189015 - DNA, 2727 bp, Homo sapiens
  Payload ID: 17332
  Gene Symbol: TAF6
  Gene Name: TAF6 RNA polymerase II, TATA box binding protein (TBP)-associated factor, 80kDa
  Uniprot ID: P49848
  ENST ID: ENST00000344095
  CDS Start-End: 527-2560
gatggcgccgagcgccgggtgagcagcgtctcggctgccgctagagttttcctgctccccgcgctcgggtggcgggggcgggtctgagtggtaccccggaggagaccctttgaaggtcccttgtggggactggaaagaggacggttggttgtgtgtctgtgctcgtggggaccccgtgtgtgtgcctgcattggagagatgttgcaggagatggggtgggctctctgaacctcctttcgcgctgcccggggatcttcgacctgcttctctgctgggatctcgcttaagttaacccttccctgggacgccttcctgccgcctccactgatctgaggagatcctgtgactgtagcgtgttttatgagcctttactggcagagggtaccgccgggtattgaaggattcgtaggagttcgccagggaagtgggacacgaccccctcttgtaaacccggcgccaggcacagaggtctccgtctctccaccgggggcttcatccttccagggaggagaagagggactccagaatggctgaggagaagaagctgaagcttagcaacactgtgctgccctcggagtccatgaaggtggtggctgaatccatgggcatcgcccagattcaggaggagacctgccagctgctaacggatgaggtcagctaccgcatcaaagagatcgcacaggatgccttgaagttcatgcacatggggaagcggcagaagctcaccaccagtgacattgactacgccttgaagctaaagaatgtcgagccactctatggcttccacgcccaggagttcattcctttccgcttcgcctctggtgggggccgggagctttacttctatgaggagaaggaggttgatctgagcgacatcatcaatacccctctgccccgggtgcccctggacgtctgcctcaaagctcattggctgagcatcgagggctgccagccagctatccccgagaacccgcccccagctcccaaagagcaacagaaggctgaagccacagaacccctgaagtcagccaagccaggccaggaggaagacggacccctgaagggcaaaggtcaaggggccaccacagccgacggcaaagggaaagagaagaaggcgccgcccttgctggagggggcccccttgcgactgaagccccggagcatccacgagttgtctgtggagcagcagctctactacaaggagatcaccgaggcctgcgtgggctcctgcgaggccaagagggcggaagccctgcaaagcattgccacggaccctggactgtatcagatgctgccacggttcagtacctttatctcggagggggtccgtgtgaacgtggttcagaacaacctggccctactcatctacctgatgcgtatggtgaaagcgctgatggacaaccccacgctctatctagaaaaatacgtccatgagctgattccagctgtgatgacctgcatcgtgagcagacagttgtgcctgcgaccagatgtggacaatcactgggcactccgagactttgctgcccgcctggtggcccagatctgcaagcattttagcacaaccactaacaacatccagtcccggatcaccaagaccttcaccaagagctgggtggacgagaagacgccctggacgactcgttatggctccatcgcaggcttggctgagctgggacacgatgttatcaagactctgattctgccccggctgcagcaggaaggggagcggatccgcagtgtgctggacggccctgtgctgagcaacattgaccggattggagcagaccatgtgcagagcctcctgctgaaacactgtgctcctgttctggcaaagctgcgcccaccgcctgacaatcaggacgcctatcgggcagaattcgggtcccttgggcccctcctctgctcccaggtggtcaaggctcgggcccaggctgctctgcaggctcagcaggtcaacaggaccactctgaccatcacgcagccccggcccacgctgaccctctcgcaggccccacagcctggccctcgcacccctggcttgctgaaggttcctggctccatcgcacttcctgtccagacactggtgtctgcacgagcggctgccccaccacagccttcccctcctccaaccaagtttattgtaatgtcatcgtcctccagcgccccatccacccagcaggtcctgtccctcagcacctcggcccccggctcaggttccaccaccacttcgcccgtcaccaccaccgtccccagcgtgcagcccatcgtcaagttggtctccaccgccaccaccgcaccccccagcactgctccctctggtcctgggagtgtccagaagtacatcgtggtctcacttcccccaacaggggagggcaaaggaggccccacctcccatccttctccagttcctcccccggcatcgtccccgtccccactcagcggcagtgccctttgtggggggaagcaggaggctggggacagtccccctccagctccagggactccaaaagccaatggctcccagcccaactccggctcccctcagcctgctccgtgatgctccacctgccagcccccggattcccacacatgcagacatgtacacacgtgcacgtacacacatgcatgctcgctaagcggaaggaagttgtagattgcttccttcatgtcactttctttttagatattgtacagccagtttctcagaataaaagtttggtttgt

SEQ ID NO: 189016 - DNA, 2464 bp, Homo sapiens
  Payload ID: 17332
  Gene Symbol: TAF6
  Gene Name: TAF6 RNA polymerase II, TATA box binding protein (TBP)-associated factor, 80kDa
  Uniprot ID: P49848
  ENST ID: ENST00000453269
  CDS Start-End: 255-2288
gacttgctcttaggctctgccaggacctgctcccacgagggggcggggccaagatggcgccgagcgccgggtgagcagcgtctcggctgccgctagagttttcctgctccccgcgctcgggtggcgggggcgggtctgagtggtaccccggaggagaccctttgaaggtcccttgtggggactggaaagaggacgggtctccgtctctccaccgggggcttcatccttccagggaggagaagagggactccagaatggctgaggagaagaagctgaagcttagcaacactgtgctgccctcggagtccatgaaggtggtggctgaatccatgggcatcgcccagattcaggaggagacctgccagctgctaacggatgaggtcagctaccgcatcaaagagatcgcacaggatgccttgaagttcatgcacatggggaagcggcagaagctcaccaccagtgacattgactacgccttgaagctaaagaatgtcgagccactctatggcttccacgcccaggagttcattcctttccgcttcgcctctggtgggggccgggagctttacttctatgaggagaaggaggttgatctgagcgacatcatcaatacccctctgccccgggtgcccctggacgtctgcctcaaagctcattggctgagcatcgagggctgccagccagctatccccgagaacccgcccccagctcccaaagagcaacagaaggctgaagccacagaacccctgaagtcagccaagccaggccaggaggaagacggacccctgaagggcaaaggtcaaggggccaccacagccgacggcaaagggaaagagaagaaggcgccgcccttgctggagggggcccccttgcgactgaagccccggagcatccacgagttgtctgtggagcagcagctctactacaaggagatcaccgaggcctgcgtgggctcctgcgaggccaagagggcggaagccctgcaaagcattgccacggaccctggactgtatcagatgctgccacggttcagtacctttatctcggagggggtccgtgtgaacgtggttcagaacaacctggccctactcatctacctgatgcgtatggtgaaagcgctgatggacaaccccacgctctatctagaaaaatacgtccatgagctgattccagctgtgatgacctgcatcgtgagcagacagttgtgcctgcgaccagatgtggacaatcactgggcactccgagactttgctgcccgcctggtggcccagatctgcaagcattttagcacaaccactaacaacatccagtcccggatcaccaagaccttcaccaagagctgggtggacgagaagacgccctggacgactcgttatggctccatcgcaggcttggctgagctgggacacgatgttatcaagactctgattctgccccggctgcagcaggaaggggagcggatccgcagtgtgctggacggccctgtgctgagcaacattgaccggattggagcagaccatgtgcagagcctcctgctgaaacactgtgctcctgttctggcaaagctgcgcccaccgcctgacaatcaggacgcctatcgggcagaattcgggtcccttgggcccctcctctgctcccaggtggtcaaggctcgggcccaggctgctctgcaggctcagcaggtcaacaggaccactctgaccatcacgcagccccggcccacgctgaccctctcgcaggccccacagcctggccctcgcacccctggcttgctgaaggttcctggctccatcgcacttcctgtccagacactggtgtctgcacgagcggctgccccaccacagccttcccctcctccaaccaagtttattgtaatgtcatcgtcctccagcgccccatccacccagcaggtcctgtccctcagcacctcggcccccggctcaggttccaccaccacttcgcccgtcaccaccaccgtccccagcgtgcagcccatcgtcaagttggtctccaccgccaccaccgcaccccccagcactgctccctctggtcctgggagtgtccagaagtacatcgtggtctcacttcccccaacaggggagggcaaaggaggccccacctcccatccttctccagttcctcccccggcatcgtccccgtccccactcagcggcagtgccctttgtggggggaagcaggaggctggggacagtccccctccagctccagggactccaaaagccaatggctcccagcccaactccggctcccctcagcctgctccgtgatgctccacctgccagcccccggattcccacacatgcagacatgtacacacgtgcacgtacacacatgcatgctcgctaagcggaaggaagttgtagattgcttccttcatgtcactttctttttagatattgtacagccagtttctcagaataaaagtttggtttgtaagttctga

SEQ ID NO: 189017 - DNA, 612 bp, Homo sapiens
  Payload ID: 17332
  Gene Symbol: TAF6
  Gene Name: TAF6 RNA polymerase II, TATA box binding protein (TBP)-associated factor, 80kDa
  ENST ID: ENST00000449571
  CDS Start-End: 211-612
gttttgtggcgcctcttgaaggtcctggcagccgggtagtgaaggaataaattgcagtaattacaccaagagggagtgctccttatatatagatgtagaaacaaacttttaaaatataatttcattctgcgagcctagaggacttattctgggtctccgtctctccaccgggggcttcatccttccagggaggagaagagggactccagaatggctgaggagaagaagctgaagcttagcaacactgtgctgccctcggagtccatgaaggtggtggctgaatccatgggcatcgcccagattcaggaggagacctgccagctgctaacggatgaggtcagctaccgcatcaaagagatcgcacaggatgccttgaagttcatgcacatggggaagcggcagaagctcaccaccagtgacattgactacgccttgaagctaaagaatgtcgagccactctatggcttccacgcccaggagttcattcctttccgcttcgcctctggtgggggccgggagctttacttctatgaggagaaggaggttgatctgagcgacatcatcaatacccctctgccccgggtgcccctggacgtctgcctcaaagctcat

SEQ ID NO: 189018 - DNA, 537 bp, Homo sapiens
  Payload ID: 17332
  Gene Symbol: TAF6
  Gene Name: TAF6 RNA polymerase II, TATA box binding protein (TBP)-associated factor, 80kDa
  ENST ID: ENST00000417349
  CDS Start-End: 309-537
aagatggcgccgagcgccgggtgagcagcgtctcggctgccgctagagttttcctgctccccgcgctcgggtggcgggggcgggtctgagtggtaccccggaggagaccctttgaagggtttccgtctgttacccaggctgttgtgcagtggcaccatcttggctcactgcagcctccaactcctcagttcaagcgatcctcctgcctcagcctcctaagtagctgggatgacaggttcacaccaccagggtctccgtctctccaccgggggcttcatccttccagggaggagaagagggactccagaatggctgaggagaagaagctgaagcttagcaacactgtgctgccctcggagtccatgaaggtggtggctgaatccatgggcatcgcccagattcaggaggagacctgccagctgctaacggatgaggtcagctaccgcatcaaagagatcgcacaggatgccttgaagttcatgcacatggggaagcggcagaagctcaccaccagtgacattgactacgccttgaagc

SEQ ID NO: 189019 - DNA, 321 bp, Homo sapiens
  Payload ID: 17332
  Gene Symbol: TAF6
  Gene Name: TAF6 RNA polymerase II, TATA box binding protein (TBP)-associated factor, 80kDa
  ENST ID: ENST00000431404
  CDS Start-End: 281-321
agagttttcctgctccccgcgctcgggtggcgggggcgggtctgagtggtaccccggaggagaccctttgaaggtcccttgtggggactggaaagaggacgaagtcttgctttgttgcccaggctggagtgcaatgacacagatctttgctcactgcaacctccgcctcccgggttcgagtgattcttctgcctcagcctcccgagtagctgtgattacagggtctccgtctctccaccgggggcttcatccttccagggaggagaagagggactccagaatggctgaggagaagaagctgaagcttagcaacactgtgct

SEQ ID NO: 189020 - DNA, 2318 bp, Homo sapiens
  Payload ID: 17332
  Gene Symbol: TAF6
  Gene Name: TAF6 RNA polymerase II, TATA box binding protein (TBP)-associated factor, 80kDa
  Uniprot ID: P49848
  ENST ID: ENST00000437822
  CDS Start-End: 96-2240
gttctgtgtcatcgtcctcctccttcaacatcccagcccaagcctcgtgcacggccaaaaaaaggaaaagcaatattcccaaccgcacaggtcccatgacaaagcgccgtctacaaacaatcaccgcttgccttcaacttcgggaagggtctccgtctctccaccgggggcttcatccttccagggaggagaagagggactccagaatggctgaggagaagaagctgaagcttagcaacactgtgctgccctcggagtccatgaaggtggtggctgaatccatgggcatcgcccagattcaggaggagacctgccagctgctaacggatgaggtcagctaccgcatcaaagagatcgcacaggatgccttgaagttcatgcacatggggaagcggcagaagctcaccaccagtgacattgactacgccttgaagctaaagaatgtcgagccactctatggcttccacgcccaggagttcattcctttccgcttcgcctctggtgggggccgggagctttacttctatgaggagaaggaggttgatctgagcgacatcatcaatacccctctgccccgggtgcccctggacgtctgcctcaaagctcattggctgagcatcgagggctgccagccagctatccccgagaacccgcccccagctcccaaagagcaacagaaggctgaagccacagaacccctgaagtcagccaagccaggccaggaggaagacggacccctgaagggcaaaggtcaaggggccaccacagccgacggcaaagggaaagagaagaaggcgccgcccttgctggagggggcccccttgcgactgaagccccggagcatccacgagttgtctgtggagcagcagctctactacaaggagatcaccgaggcctgcgtgggctcctgcgaggccaagagggcggaagccctgcaaagcattgccacggaccctggactgtatcagatgctgccacggttcagtacctttatctcggagggggtccgtgtgaacgtggttcagaacaacctggccctactcatctacctgatgcgtatggtgaaagcgctgatggacaaccccacgctctatctagaaaaatacgtccatgagctgattccagctgtgatgacctgcatcgtgagcagacagttgtgcctgcgaccagatgtggacaatcactgggcactccgagactttgctgcccgcctggtggcccagatctgcaagcattttagcacaaccactaacaacatccagtcccggatcaccaagaccttcaccaagagctgggtggacgagaagacgccctggacgactcgttatggctccatcgcaggcttggctgagctgggacacgatgttatcaagactctgattctgccccggctgcagcaggaaggggagcggatccgcagtgtgctggacggccctgtgctgagcaacattgaccggattggagcagaccatgtgcagagcctcctgctgaaacactgtgctcctgttctggcaaagctgcgcccaccgcctgacaatcaggacgcctatcgggcagaattcgggtcccttgggcccctcctctgctcccaggtggtcaaggctcgggcccaggctgctctgcaggctcagcaggtcaacaggaccactctgaccatcacgcagccccggcccacgctgaccctctcgcaggccccacagcctggccctcgcacccctggcttgctgaaggttcctggctccatcgcacttcctgtccagacactggtgtctgcacgagcggctgccccaccacagccttcccctcctccaaccaagtttattgtaatgtcatcgtcctccagcgccccatccacccagcaggtcctgtccctcagcacctcggcccccggctcaggttccaccaccacttcgcccgtcaccaccaccgtccccagcgtgcagcccatcgtcaagttggtctccaccgccaccaccgcaccccccagcactgctccctctggtcctgggagtgtccagaagtacatcgtggtctcacttcccccaacaggggagggcaaaggaggccccacctcccatccttctccagttcctcccccggcatcgtccccgtccccactcagcggcagtgccctttgtggggggaagcaggaggctggggacagtccccctccagctccagggactccaaaagccaatggctcccagcccaactccggctcccctcagcctgctccgtgatgctccacctgccagcccccggattcccacacatgcagacatgtacacacgtgcacgtacacacatgcatgctcgcta

SEQ ID NO: 189021 - DNA, 703 bp, Homo sapiens
  Payload ID: 17332
  Gene Symbol: TAF6
  Gene Name: TAF6 RNA polymerase II, TATA box binding protein (TBP)-associated factor, 80kDa
  ENST ID: ENST00000451699
  CDS Start-End: 361-703
ctgctcccacgagggggcggggccaagatggcgccgagcgccgggtgagcagcgtctcggctgccgctagagttttcctgctccccgcgctcgggtggcgggggcgggtctgagtggtaccccggaggagaccctttgaaggtcccttgtggggactggaaagaggacgggtttccgtctgttacccaggctgttgtgcagtggcaccatcttggctcactgcagcctccaactcctcagttcaagcgatcctcctgcctcagcctcctaagtagctgggatgacaggttcacaccaccagggtctccgtctctccaccgggggcttcatccttccagggaggagaagagggactccagaatggctgaggagaagaagctgaagcttagcaacactgtgctgccctcggagtccatgaaggtggtggctgaatccatgggcatcgcccagattcaggaggagacctgccagctgctaacggatgaggtcagctaccgcatcaaagagatcgcacaggatgccttgaagttcatgcacatggggaagcggcagaagctcaccaccagtgacattgactacgccttgaagctaaagaatgtcgagccactctatggcttccacgcccaggagttcattcctttccgcttcgcctctggtgggggccgggagctttacttctatgaggagaaggaggttgatctga

SEQ ID NO: 189022 - DNA, 871 bp, Homo sapiens
  Payload ID: 17332
  Gene Symbol: TAF6
  Gene Name: TAF6 RNA polymerase II, TATA box binding protein (TBP)-associated factor, 80kDa
  ENST ID: ENST00000440225
  CDS Start-End: 174-871
ctcggctgccgctagagttttcctgctccccgcgctcgggtggcgggggcgggtctgagtggtaccccggaggagaccctttgaaggtcccttgtggggactggaaagaggacgggtctccgtctctccaccgggggcttcatccttccagggaggagaagagggactccagaatggctgaggagaagaagctgaagcttagcaacactgtgctgccctcggagtccatgaaggtggtggctgaatccatgggcatcgcccagattcaggaggagacctgccagctgctaacggatgaggtcagctaccgcatcaaagagatcgcacaggatgccttgaagttcatgcacatggggaagcggcagaagctcaccaccagtgacattgactacgccttgaagctaaagaatgtcgagccactctatggcttccacgcccaggagttcattcctttccgcttcgcctctggtgggggccgggagctttacttctatgaggagaaggaggttgatctgagcgacatcatcaatacccctctgccccgggtgcccctggacgtctgcctcaaagctcccaaagagcaacagaaggctgaagccacagaacccctgaagtcagccaagccaggccaggaggaagacggacccctgaagggcaaaggtcaaggggccaccacagccgacggcaaagggaaagagaagaaggcgccgcccttgctggagggggcccccttgcgactgaagccccggagcatccacgagttgtctgtggagcagcagctctactacaaggagatcaccgaggcctgcgtgggctcctgcgaggccaagagggcggaagccctgcaaagcattgccacggaccctggact

SEQ ID NO: 189023 - DNA, 563 bp, Homo sapiens
  Payload ID: 17332
  Gene Symbol: TAF6
  Gene Name: TAF6 RNA polymerase II, TATA box binding protein (TBP)-associated factor, 80kDa
  ENST ID: ENST00000452438
  CDS Start-End: 96-563
acgagggggcggggccaagatggcgccgagcgccggggtctccgtctctccaccgggggcttcatccttccagggaggagaagagggactccagaatggctgaggagaagaagctgaagcttagcaacactgtgctgccctcggagtccatgaaggtggtggctgaatccatgggcatcgcccagattcaggaggagacctgccagctgctaacggatgaggtcagctaccgcatcaaagagatcgcacaggatgccttgaagttcatgcacatggggaagcggcagaagctcaccaccagtgacattgactacgccttgaagctaaagaatgtcgagccactctatggcttccacgcccaggagttcattcctttccgcttcgcctctggtgggggccgggagctttacttctatgaggagaaggaggttgatctgagcgacatcatcaatacccctctgccccgggtgcccctggacgtctgcctcaaagctcccaaagagcaacagaaggctgaagccacagaacccctgaagtcagccaagccaggccaggaggaagac

SEQ ID NO: 189024 - DNA, 2685 bp, Homo sapiens
  Payload ID: 17332
  Gene Symbol: TAF6
  Gene Name: TAF6 RNA polymerase II, TATA box binding protein (TBP)-associated factor, 80kDa
  ENST ID: ENST00000421980
  CDS Start-End: 540-884
ggggcggggccaagatggcgccgagcgccgggtgagcagcgtctcggctgccgctagagttttcctgctccccgcgctcgggtggcgggggcgggtctgagtggtaccccggaggagaccctttgaaggtcccttgtggggactggaaagaggacggttggttgtgtgtctgtgctcgtggggaccccgtgtgtgtgcctgcattggagagatgttgcaggagatggggtgggctctctgaacctcctttcgcgctgcccggggatcttcgacctgcttctctgctgggatctcgcttaagttaacccttccctgggacgccttcctgccgcctccactgatctgaggagatcctgtgactgtagcgtgttttatgagcctttactggcagagggtaccgccgggtattgaaggattcgtaggagttcgccagggaagtgggacacgaccccctcttgtaaacccggcgccaggcacagaggtctccgtctctccaccgggggcttcatccttccagggaggagaagagggactccagaatggctgaggagaagaagctgaagcttagcaacactgtgctgccctcggagtccatgaaggtggtggctgaatccatgggcatcgcccagattcaggaggagacctgccagctgctaacggatgaggtcagctaccgcatcaaagagatcgcacaggatgccttgaagttcatgcacatggggaagcggcagaagctcaccaccagtgacattgactacgccttgaagctaaagaatgtcgagccactctatggcttccacgcccaggagttcattcctttccgcttcgcctctggtgggggccgggagctttacttctatgaggagaaggagctcattggctgagcatcgagggctgccagccagctatccccgagaacccgcccccagctcccaaagagcaacagaaggctgaagccacagaacccctgaagtcagccaagccaggccaggaggaagacggacccctgaagggcaaaggtcaaggggccaccacagccgacggcaaagggaaagagaagaaggcgccgcccttgctggagggggcccccttgcgactgaagccccggagcatccacgagttgtctgtggagcagcagctctactacaaggagatcaccgaggcctgcgtgggctcctgcgaggccaagagggcggaagccctgcaaagcattgccacggaccctggactgtatcagatgctgccacggttcagtacctttatctcggagggggtccgtgtgaacgtggttcagaacaacctggccctactcatctacctgatgcgtatggtgaaagcgctgatggacaaccccacgctctatctagaaaaatacgtccatgagctgattccagctgtgatgacctgcatcgtgagcagacagttgtgcctgcgaccagatgtggacaatcactgggcactccgagactttgctgcccgcctggtggcccagatctgcaagcattttagcacaaccactaacaacatccagtcccggatcaccaagaccttcaccaagagctgggtggacgagaagacgccctggacgactcgttatggctccatcgcaggcttggctgagctgggacacgatgttatcaagactctgattctgccccggctgcagcaggaaggggagcggatccgcagtgtgctggacggccctgtgctgagcaacattgaccggattggagcagaccatgtgcagagcctcctgctgaaacactgtgctcctgttctggcaaagctgcgcccaccgcctgacaatcaggacgcctatcgggcagaattcgggtcccttgggcccctcctctgctcccaggtggtcaaggctcgggcccaggctgctctgcaggctcagcaggtcaacaggaccactctgaccatcacgcagccccggcccacgctgaccctctcgcaggccccacagcctggccctcgcacccctggcttgctgaaggttcctggctccatcgcacttcctgtccagacactggtgtctgcacgagcggctgccccaccacagccttcccctcctccaaccaagtttattgtaatgtcatcgtcctccagcgccccatccacccagcaggtcctgtccctcagcacctcggcccccggctcaggttccaccaccacttcgcccgtcaccaccaccgtccccagcgtgcagcccatcgtcaagttggtctccaccgccaccaccgcaccccccagcactgctccctctggtcctgggagtgtccagaagtacatcgtggtctcacttcccccaacaggggagggcaaaggaggccccacctcccatccttctccagttcctcccccggcatcgtccccgtccccactcagcggcagtgccctttgtggggggaagcaggaggctggggacagtccccctccagctccagggactccaaaagccaatggctcccagcccaactccggctcccctcagcctgctccgtgatgctccacctgccagcccccggattcccacacatgcagacatgtacacacgtgcacgtacacacatgcatgctcgctaagcggaaggaagttgtagattgcttccttcatgtcactttctttttagatattgtacagccagtttctcagaataaaagtttggtttgtaagttctga

SEQ ID NO: 189025 - DNA, 2297 bp, Homo sapiens
  Payload ID: 17332
  Gene Symbol: TAF6
  Gene Name: TAF6 RNA polymerase II, TATA box binding protein (TBP)-associated factor, 80kDa
  Uniprot ID: P49848
  ENST ID: ENST00000452041
  CDS Start-End: 96-2129
acgagggggcggggccaagatggcgccgagcgccggggtctccgtctctccaccgggggcttcatccttccagggaggagaagagggactccagaatggctgaggagaagaagctgaagcttagcaacactgtgctgccctcggagtccatgaaggtggtggctgaatccatgggcatcgcccagattcaggaggagacctgccagctgctaacggatgaggtcagctaccgcatcaaagagatcgcacaggatgccttgaagttcatgcacatggggaagcggcagaagctcaccaccagtgacattgactacgccttgaagctaaagaatgtcgagccactctatggcttccacgcccaggagttcattcctttccgcttcgcctctggtgggggccgggagctttacttctatgaggagaaggaggttgatctgagcgacatcatcaatacccctctgccccgggtgcccctggacgtctgcctcaaagctcattggctgagcatcgagggctgccagccagctatccccgagaacccgcccccagctcccaaagagcaacagaaggctgaagccacagaacccctgaagtcagccaagccaggccaggaggaagacggacccctgaagggcaaaggtcaaggggccaccacagccgacggcaaagggaaagagaagaaggcgccgcccttgctggagggggcccccttgcgactgaagccccggagcatccacgagttgtctgtggagcagcagctctactacaaggagatcaccgaggcctgcgtgggctcctgcgaggccaagagggcggaagccctgcaaagcattgccacggaccctggactgtatcagatgctgccacggttcagtacctttatctcggagggggtccgtgtgaacgtggttcagaacaacctggccctactcatctacctgatgcgtatggtgaaagcgctgatggacaaccccacgctctatctagaaaaatacgtccatgagctgattccagctgtgatgacctgcatcgtgagcagacagttgtgcctgcgaccagatgtggacaatcactgggcactccgagactttgctgcccgcctggtggcccagatctgcaagcattttagcacaaccactaacaacatccagtcccggatcaccaagaccttcaccaagagctgggtggacgagaagacgccctggacgactcgttatggctccatcgcaggcttggctgagctgggacacgatgttatcaagactctgattctgccccggctgcagcaggaaggggagcggatccgcagtgtgctggacggccctgtgctgagcaacattgaccggattggagcagaccatgtgcagagcctcctgctgaaacactgtgctcctgttctggcaaagctgcgcccaccgcctgacaatcaggacgcctatcgggcagaattcgggtcccttgggcccctcctctgctcccaggtggtcaaggctcgggcccaggctgctctgcaggctcagcaggtcaacaggaccactctgaccatcacgcagccccggcccacgctgaccctctcgcaggccccacagcctggccctcgcacccctggcttgctgaaggttcctggctccatcgcacttcctgtccagacactggtgtctgcacgagcggctgccccaccacagccttcccctcctccaaccaagtttattgtaatgtcatcgtcctccagcgccccatccacccagcaggtcctgtccctcagcacctcggcccccggctcaggttccaccaccacttcgcccgtcaccaccaccgtccccagcgtgcagcccatcgtcaagttggtctccaccgccaccaccgcaccccccagcactgctccctctggtcctgggagtgtccagaagtacatcgtggtctcacttcccccaacaggggagggcaaaggaggccccacctcccatccttctccagttcctcccccggcatcgtccccgtccccactcagcggcagtgccctttgtggggggaagcaggaggctggggacagtccccctccagctccagggactccaaaagccaatggctcccagcccaactccggctcccctcagcctgctccgtgatgctccacctgccagcccccggattcccacacatgcagacatgtacacacgtgcacgtacacacatgcatgctcgctaagcggaaggaagttgtagattgcttccttcatgtcactttctttttagatattgtacagccagtttctcagaataaaagtttggtttgta

SEQ ID NO: 189026 - DNA, 934 bp, Homo sapiens
  Payload ID: 17332
  Gene Symbol: TAF6
  Gene Name: TAF6 RNA polymerase II, TATA box binding protein (TBP)-associated factor, 80kDa
  ENST ID: ENST00000493322
  CDS Start-End: 169-934
caagatggcgccgagcgccgggtgagcagcgtctcggctgccgctagagttttcctgctccccgcgctcgggtggcgggggcgggtctgagtggtaccccggaggagaccctttgaaggtcccttgtggggactggaaagaggacgggaggagaagagggactccagaatggctgaggagaagaagctgaagcttagcaacactgtgctgccctcggagtccatgaaggtggtggctgaatccatgggcatcgcccagattcaggaggagacctgccagctgctaacggatgaggtcagctaccgcatcaaagagatcgcacaggatgccttgaagttcatgcacatggggaagcggcagaagctcaccaccagtgacattgactacgccttgaagctaaagaatgtcgagccactctatggcttccacgcccaggagttcattcctttccgcttcgcctctggtgggggccgggagctttacttctatgaggagaaggaggttgatctgagcgacatcatcaatacccctctgccccgggtgcccctggacgtctgcctcaaagctcattggctgagcatcgagggctgccagccagctatccccgagaacccgcccccagctcccaaagagcaacagaaggctgaagccacagaacccctgaagtcagccaagccaggccaggaggaagacggacccctgaagggcaaaggtcaaggggccaccacagccgacggcaaagggaaagagaagaaggcgccgcccttgctggagggggcccccttgcgactgaagccccggagcatccacgagttgtctgtggagcagcagctctactacaaggagatcaccgaggcctgcgtgggctcctgcgaggccaagagggcggaagccctgcaaagcattgccacggaccctggactgtatcagatgc

SEQ ID NO: 189027 - DNA, 2551 bp, Homo sapiens
  Payload ID: 17332
  Gene Symbol: TAF6
  Gene Name: TAF6 RNA polymerase II, TATA box binding protein (TBP)-associated factor, 80kDa
  ENST ID: ENST00000472509
  CDS Start-End: 179-2383
tagtagagatggggtttctccatgttggccaggctggtctcgaattcctgacctcaagtgatccgcccgcctcgtcctcccaaagtgctggtgggattacaggcgtgagccactgaacctggccccagcccagatttgtatctttctctgttacacctcagggctgactcacgtggggatggacataagacactcggagttcctcccctgtctccactgtcctccctttgttggccctctccctgtgtctcacgtttctttttcttctgcctgccccgttcctctgccagggtctccgtctctccaccgggggcttcatccttccagggaggagaagagggactccagaatggctgaggagaagaagctgaagcttagcaacactgtgctgccctcggagtccatgaaggtggtggctgaatccatgggcatcgcccagattcaggaggagacctgccagctgctaacggatgaggtcagctaccgcatcaaagagatcgcacaggatgccttgaagttcatgcacatggggaagcggcagaagctcaccaccagtgacattgactacgccttgaagctaaagaatgtcgagccactctatggcttccacgcccaggagttcattcctttccgcttcgcctctggtgggggccgggagctttacttctatgaggagaaggaggttgatctgagcgacatcatcaatacccctctgccccgggtgcccctggacgtctgcctcaaagctcattggctgagcatcgagggctgccagccagctatccccgagaacccgcccccagctcccaaagagcaacagaaggctgaagccacagaacccctgaagtcagccaagccaggccaggaggaagacggacccctgaagggcaaaggtcaaggggccaccacagccgacggcaaagggaaagagaagaaggcgccgcccttgctggagggggcccccttgcgactgaagccccggagcatccacgagttgtctgtggagcagcagctctactacaaggagatcaccgaggcctgcgtgggctcctgcgaggccaagagggcggaagccctgcaaagcattgccacggaccctggactgtatcagatgctgccacggttcagtacctttatctcggagggggtccgtgtgaacgtggttcagaacaacctggccctactcatctacctgatgcgtatggtgaaagcgctgatggacaaccccacgctctatctagaaaaatacgtccatgagctgattccagctgtgatgacctgcatcgtgagcagacagttgtgcctgcgaccagatgtggacaatcactgggcactccgagactttgctgcccgcctggtggcccagatctgcaagcattttagcacaaccactaacaacatccagtcccggatcaccaagaccttcaccaagagctgggtggacgagaagacgccctggacgactcgttatggctccatcgcaggcttggctgagctgggacacgatgttatcaagactctgattctgccccggctgcagcaggaaggggagcggatccgcagtgtgctggacggccctgtgctgagcaacattgaccggattggagcagaccatgtgcagagcctcctgctgaaacactgtgctcctgttctggcaaagctgcgcccaccgcctgacaatcaggacgcctatcgggcagaattcgggtcccttgggcccctcctctgctcccaggtggtcaaggctcgggcccaggctgctctgcaggctcagcaggtcaacaggaccactctgaccatcacgcagccccggcccacgctgaccctctcgcaggccccacagcctggccctcgcacccctggcttgctgaaggttcctggctccatcgcacttcctgtccagacactggtgtctgcacgagcggctgccccaccacagccttcccctcctccaaccaagtttattgtaatgtcatcgtcctccagcgccccatccacccagcaggtcctgtccctcagcacctcggcccccggctcaggttccaccaccacttcgcccgtcaccaccaccgtccccagcgtgcagcccatcgtcaagttggtctccaccgccaccaccgcaccccccagcactgctccctctggtcctgggagtgtccagaagtacatcgtggtctcacttcccccaacaggggagggcaaaggaggccccacctcccatccttctccagttcctcccccggcatcgtccccgtccccactcagcggcagtgccctttgtggggggaagcaggaggctggggacagtccccctccagctccagggactccaaaagccaatggctcccagcccaactccggctcccctcagcctgctccgtgatgctccacctgccagcccccggattcccacacatgcagacatgtacacacgtgcacgtacacacatgcatgctcgctaagcggaaggaagttgtagattgcttccttcatgtcactttctttttagatattgtacagccagtttctcagaataaaagtttggtttgta

SEQ ID NO: 189028 - DNA, 471 bp, Homo sapiens
  Payload ID: 17332
  Gene Symbol: TAF6
  Gene Name: TAF6 RNA polymerase II, TATA box binding protein (TBP)-associated factor, 80kDa
  ENST ID: ENST00000460673
  CDS Start-End: 444-471
gcggggccaagatggcgccgagcgccgggtgagcagcgtctcggctgccgctagagttttcctgctccccgcgctcgggtggcgggggcgggtctgagtggtaccccggaggagaccctttgaaggtcccttgtggggactggaaagaggacgggtttccgtctgttacccaggctgttgtgcagtggcaccatcttggctcactgcagcctccaactcctcagttcaagcgatcctcctgcctcagcctcctaagtagctgggatgacaggttcacaccaccaggctggagtgcaatgacacagatctttgctcactgcaacctccgcctcccgggttcgagtgattcttctgcctcagcctcccgagtagctgtgattacagggtctccgtctctccaccgggggcttcatccttccagggaggagaagagggactccagaatggctgaggagaagaagctgaagctta

SEQ ID NO: 189029 - DNA, 546 bp, Homo sapiens
  Payload ID: 17332
  Gene Symbol: TAF6
  Gene Name: TAF6 RNA polymerase II, TATA box binding protein (TBP)-associated factor, 80kDa
  ENST ID: ENST00000520135
  CDS Start-End: 206-546
caagatggcgccgagcgccgggtgagcagcgtctcggctgccgctagagttttcctgctccccgcgctcgggtggcgggggcgggtctgagtggtaccccggaggagaccctttgaaggtcccttgtggggactggaaagaggacgggtctccgtctctccaccgggggcttcatccttccagggaggagaagagggactccagaatggctgaggagaagaagctgaagcttagcaacactgtgctgccctcggagtccatgaaggtggtggctgaatccatgggcatcgcccagattcaggaggagacctgccagctgctaacggatgaggatgccttgaagttcatgcacatggggaagcggcagaagctcaccaccagtgacattgactacgccttgaagctaaagaatgtcgagccactctatggcttccacgcccaggagttcattcctttccgcttcgcctctggtgggggccgggagctttacttctatgaggagaaggaggttgatctgagcgacatcatcaatacccctctgccccg

SEQ ID NO: 189030 - DNA, 751 bp, Homo sapiens
  Payload ID: 17332
  Gene Symbol: TAF6
  Gene Name: TAF6 RNA polymerase II, TATA box binding protein (TBP)-associated factor, 80kDa
  ENST ID: ENST00000523306
  CDS Start-End: 328-751
ccgagcgccgggtgagcagcgtctcggctgccgctagagttttcctgctccccgcgctcgggtggcgggggcgggtctgagtggtaccccggaggagaccctttgaaggtcccttgtggggactggaaagaggacgggtttccgtctgttacccaggctgttgtgcagtggcaccatcttggctcactgcagcctccaactcctcagttcaagcgatcctcctgcctcagcctcctaagtagctgggatgacaggttcacaccaccagggtctccgtctctccaccgggggcttcatccttccagggaggagaagagggactccagaatggctgaggagaagaagctgaagcttagcaacactgtgctgccctcggagtccatgaaggtggtggctgaatccatgggcatcgcccagattcaggaggagacctgccagctgctaacggatgaggatgccttgaagttcatgcacatggggaagcggcagaagctcaccaccagtgacattgactacgccttgaagctaaagaatgtcgagccactctatggcttccacgcccaggagttcattcctttccgcttcgcctctggtgggggccgggagctttacttctatgaggagaaggaggttgatctgagcgacatcatcaatacccctctgccccgggtgcccctggacgtctgcctcaaagctcattggctgagcatcgagggctgccagccagctatccccgagaacccgcccccag

SEQ ID NO: 189031 - DNA, 2116 bp, Homo sapiens
  Payload ID: 17333
  Gene Symbol: TAF6L
  Gene Name: TAF6-like RNA polymerase II, p300/CBP-associated factor (PCAF)-associated factor, 65kDa
  Uniprot ID: Q9Y6J9
  ENST ID: ENST00000294168
  CDS Start-End: 202-2070
aatcaagagccaggaagcctcctggagggccggaaactttccaaggcgcccgccgactggctgtattggggagggcggggccggggccccgggagagggaatgagtgtgagctcgtgagtgggcgccgccgccaccgcccccgccgccgtcgtctcggtagcagccttcgccacgccggggtcttcagctccactggggccatgtcagagcgagaagagcggcggtttgtggagatccctcgggagtctgtccggctcatggcggagagcacgggcctggagctgagcgatgaggtggcggcgctgctcgcagaggacgtgtgctatcgtctgagagaggccacgcagaatagctctcagttcatgaagcacaccaaacgccggaagctgacggttgaggacttcaacagggccctcagatggagcagcgtggaggctgtgtgtggttacggatcacaggaggcactgcccatgcgccccgccagggagggtgaactctactttcctgaggatcgagaggtgaacctggtggagctggccctggctaccaacatccccaaaggctgtgctgagacagctgtcagagttcatgtctcctacctggatggcaaagggaacctggcacctcaaggatcggtgcccagtgctgtgtcttcactgacagatgaccttctcaagtactatcaccaggtgactcgtgctgtgctaggggatgatccgcaactgatgaaggttgcactccaggacttgcagacgaactccaagattggggcactcctgccttactttgtttatgtggtcagtggggtgaaatctgtaagccatgacctggagcaactgcaccggctgctgcaggtggcacggagcctatttcgtaatccgcacctgtgcttggggccctatgtccgctgtctggtgggcagtgtcctctactgtgtcctggagccactggctgcctccatcaaccccctgaatgaccactggactctgcgggatggggctgccctcctgctcagccacatcttctggactcatggggaccttgtaagtggcctctatcagcatatcctgctatccctgcagaagatcctggcagatcctgtgcggccgctctgctgccactatggagccgtggtggggctgcatgctcttggctggaaggcagtagaacgagtcctgtacccacacctgtccacctactggacaaacttgcaggctgtgctggatgattattcagtatctaatgcccaggtcaaagcagatggacacaaagtctatggagccattctggtggcggtagagcgactgctgaagatgaaggcccaggcagcagagcccaacaggggtggcccaggtggcagggggtgccggcgcctggacgacctgccatgggacagccttctctttcaagagtcgtcctccgggggcggtgcagaacccagctttgggtccggcctcccgctgccgccagggggcgcggggccggaggacccttctctttcggtgaccctggccgacatctaccgggagctctacgccttcttcggtgacagcttggccacacgctttggcaccggccagcctgcacccacggctccgcggccgcccggggacaagaaggagccggcggcagccccggactcggtgcggaagatgccgcagctgacggcaagcgccatagtcagcccgcacggcgacgagagcccccggggcagcggcggaggcggccccgcgtcggcctctgggcccgccgcctctgagagcaggcccttgccgcgcgtgcatcgggcgcgcggggcaccccggcagcagggccccgggaccggcacccgcgacgttttccagaagagccgtttcgccccgcgcggcgccccgcactttcgtttcatcatagccgggcggcaggctgggaggcgctgccgcgggcgccttttccagactgccttccccgcgccgtacgggcctagcccggcctcgcgctacgtgcagaaactgcccatgatcggccgtaccagccgccccgcccgccggtgggcgctctcggactactcgctgtacttgccgctctgagtcagtggccccttcgttccttgtaaataaatcccgcccccggaaa

SEQ ID NO: 189032 - DNA, 528 bp, Homo sapiens
  Payload ID: 17333
  Gene Symbol: TAF6L
  Gene Name: TAF6-like RNA polymerase II, p300/CBP-associated factor (PCAF)-associated factor, 65kDa
  ENST ID: ENST00000529509
  CDS Start-End: 93-528
gagtccttgctccccctccctacttactcagtgcttacttcatgatcttggagaagtcatggaacatttagcctctgagctccactggggccatgtcagagcgagaagagcggcggtttgtggagatccctcgggagtctgtccggctcatggcggagagcacgggcctggagctgagcgatgaggtggcggcgctgctcgcagaggacgtgtgctatcgtctgagagaggccacgcagaatagctctcagttcatgaagcacaccaaacgccggaagctgacggttgaggacttcaacagggccctcagatggagcagcgtggaggctgtgtgtggttacggatcacaggaggcactgcccatgcgccccgccagggagggtgaactctactttcctgaggatcgagaggtgaacctggtggagctggccctggctaccaacatccccaaaggctgtgctgagacagctgtcagagttcatgtctcctacctggatggcaaagggaacctggcacctcaaggatcgg

SEQ ID NO: 189033 - DNA, 419 bp, Homo sapiens
  Payload ID: 17333
  Gene Symbol: TAF6L
  Gene Name: TAF6-like RNA polymerase II, p300/CBP-associated factor (PCAF)-associated factor, 65kDa
  ENST ID: ENST00000526261
  CDS Start-End: 269-419
gactggctgtattggggagggcggggccggggccccgggagagggaatgagtgtgagctcgtgagtgggcgccgccgccaccgcccccgccgccgtcgtctcggtagcagccttcgccacgccggggtcttcagagctccttgtttagaaactccagagcacgagcagcaaggctggtgtggagggtgttggatcacactcctgggctctccgggaggctgggcagcttttccagtcttcattctccactcccagctccactggggccatgtcagagcgagaagagcggcggtttgtggagatccctcgggagtctgtccggctcatggcggagagcacgggcctggagctgagcgatgaggtggcggcgctgctcgcagaggacgtgtgctatcgtctgagagaggccacgcagaata

SEQ ID NO: 189034 - DNA, 594 bp, Homo sapiens
  Payload ID: 17333
  Gene Symbol: TAF6L
  Gene Name: TAF6-like RNA polymerase II, p300/CBP-associated factor (PCAF)-associated factor, 65kDa
  ENST ID: ENST00000525405
  CDS Start-End: 138-329
attggggagggcggggccggggccccgggagagggaatgagtgtgagctcgtgagtgggcgccgccgccaccgcccccgccgccgtcgtctcggtagcagccttcgccacgccggggtcttcagctccactggggccatgtcagagcgagaagagcggcggtttgtggagatccctcgggagtctgtccggctcatggcggagagcacgggcctggagctgagcgatgaggtggcggcgctgctcgcagaggacgtgtgctatcgtctgagagaggccacgcagctctcagttcatgaagcacaccaaacgccggaagctgacggttgaggacttcaacagggccctcagatggagcagcgtggaggctgtgtgtggttacggatcacaggaggcactgcccatgcgccccgccagggagggtgaactctactttcctgaggatcgagaggtgaacctggtggagctggccctggctaccaacatccccaaaggctgtgctgagacagctgtcagagttcatgtctcctacctggatggcaaagggaacctggcacctcaaggatcggtgcccagtgctgtgtcttcactgaca

SEQ ID NO: 189035 - DNA, 2334 bp, Homo sapiens
  Payload ID: 17334
  Gene Symbol: TAF7
  Gene Name: TAF7 RNA polymerase II, TATA box binding protein (TBP)-associated factor, 55kDa
  Uniprot ID: Q15545
  ENST ID: ENST00000313368
  CDS Start-End: 778-1827
actcacagccgcctcccgccccgcgtcgcgacgtagcacttccgtttttgctgggtaggcgacccggacggagggccggcgaggtgcggggtctggtgatgcgagctgcgcctctcggcaagatttcgcgctgcccatcccgggccctttcatcagtaatcggtagtggatcactctgccaagcggcaggaagaattaaggaaacgacaaggagacgctcggctctctcccgcttggctccttgcggcctcctcttcccttcgctccggcccggtgaaactgaacttataatcgtcactggattgtaagtacccgaggcgaagagagctcgctgagccctgattttttgagtgtctttgttccgggagagtttgtgagttgaaagtatctctgctgggctttctgggccgaaaaccgttccgggggagccgccatttgctttcctgttccctagctagctagctagctctctccgcgttgtccggcagcggcacctagaggttgggacttggcattgcatctgatttaatgaacttaagtctgtgaataagcctttgtgttaacgactggtattcggtcacagcatatttagagaaaagacttggagcttaaataaaaactaaggcaaaatagacgcttagctgctgatctacagagaacttcttgtaattaaaagatttcaattcatagcaaactggtgttttaaactattgcagtagctggaactttttagtgtaaccagcatttattggagaagtgaatcacaaggaaataaagatgagtaaaagcaaagatgatgctcctcacgaactggagagccagtttatcttacgtctgcctccagaatatgcctctactgtgagaagggcagtacagtctggtcatgtcaacctcaaggacagactgacaattgagttacatcctgatgggcgtcatggaatcgtcagagtggaccgtgttccattggcctcaaaattagtagacctgccctgtgttatggaaagcttgaaaaccattgataaaaaaactttttacaagacagctgatatctgtcagatgcttgtatccacagttgatggtgatctctatcctcctgtggaggagccagttgctagcactgatcctaaagcaagcaagaaaaaggataaggacaaagagaaaaagtttatctggaaccacggaattactctgcctctaaagaatgtcaggaagagaaggttccggaagacagcaaagaagaaatatattgaatctccagatgttgaaaaagaagtgaaacgattgctgagtacagatgctgaagctgttagtactcggtgggaaataattgccgaagatgaaacaaaggaggcagaaaatcaaggcctggatatctcttctccaggaatgtctggtcacaggcagggccatgactcattagaacatgatgagcttcgggagatattcaatgacctcagcagcagcagtgaggatgaagatgagacccagcatcaagatgaagaagatataaacatcattgacacggaggaagatctggagagacagctacaggacaagctaaatgaatcagatgaacagcaccaggaaaatgaaggaaccaatcagctggttatgggaattcagaagcagattgacaacatgaaaggcaagctccaagagacccaggacagggcaaaacgacaagaggatctcatcatgaaagtggaaaatctggctctcaagaacagatttcaggctgtactggatgagctcaaacaaaaggaagaccgagaaaaggagcaactcagctctttgcaagaggagctagaatcactcctagagaagtaaaaagaactgatatttaatttcagtcttcagactggtcagcattagaaaattcttggctttattgtactgggtattaagaccttgctcttcctagtccttttaatgctgtgtgttctgttaagttctttcatttgtttgtaattttgtttttcagcaaatttatattgttttgctaggtgttcatcctataagaagcaggattgtataggcagaaaaatgattgtaggaaagttgcaggattagcggaatgtatggttcaaccttaattatagcttcattgcaggactttactgtttctccattttctagaagctgctgttgctgctttgtgatgacgtgagatcaataagaagaacctagtctagagacaatgatgctagtttgcatatgttttcctatgcaataattgttttcccagttattcaaagcagctttctatatgtagagatgcaaattattaagttgtttccaatacaataaataaaagcatctgtttttcactttata

SEQ ID NO: 189036 - DNA, 603 bp, Homo sapiens
  Payload ID: 17334
  Gene Symbol: TAF7
  Gene Name: TAF7 RNA polymerase II, TATA box binding protein (TBP)-associated factor, 55kDa
  ENST ID: ENST00000624761
  CDS Start-End: 459-603
tccgtttttgctgggtaggcgacccggacggagggccggcgaggtgcggggtctggtgatgcgagctgcgcctctcggcaagatttcgcgctgcccatcccgggccctttcatcagtaatcggtagtggatcactctgccaagcggcaggaagaattaaggaaacgacaaggagacgctcggctctctcccgcttggctccttgcggcctcctcttcccttcgctccggcccggtgaaactgaacttataatcgtcactggattcatatttagagaaaagacttggagcttaaataaaaactaaggcaaaatagacgcttagctgctgatctacagagaacttcttgtaattaaaagatttcaattcatagcaaactggtgttttaaactattgcagtagctggaactttttagtgtaaccagcatttattggagaagtgaatcacaaggaaataaagatgagtaaaagcaaagatgatgctcctcacgaactggagagccagtttatcttacgtctgcctccagaatatgcctctactgtgagaagggcagtacagtctggtcatgtcaacctcaaggacagactgacaattgagttacatc

SEQ ID NO: 189037 - DNA, 2107 bp, Homo sapiens
  Payload ID: 17335
  Gene Symbol: TAF7L
  Gene Name: TAF7-like RNA polymerase II, TATA box binding protein (TBP)-associated factor, 50kDa
  Uniprot ID: Q5H9L4
  ENST ID: ENST00000324762
  CDS Start-End: 263-1171
atttgttcatcaaattacatcatgtaatttggattgactttggaaaatctacacatattggagaggagctaaggtaacgtctagaaataattaagttatgtcaaataaggtattgtctaactgtacacacatcattctagtgaggattatgggcaagatcttgtataatttagccagtactaccagaagtggtcaggagagggagcaagaggagtttttagtgatggttttctttttgctttcatgaactcaaaatcaagacatgagtgaaagccaggatgaagttcctgatgaagttgagaaccagtttatattgcgtctgcctctggaacatgcttgtactgtcaggaacctagcacgttctcaaagtgtcaagatgaaggataaactaaaaattgacttattgcctgatgggcgccatgcagttgttgaagtagaagatgtcccactagctgctaagctggttgacttgccttgtgttattgaaagcctgagaacgcttgataaaaaaaccttttataaaacagcagacatttctcagatgcttgtgtgcactgctgatggtgatatccacctttctccagaagaaccagctgcctctactgatcctaatatagtcaggaaaaaagaaagggggagagaagaaaaatgtgtctggaagcatggcattacgccaccacttaagaatgtcagaaagaaaaggttccggaaaacacaaaaaaaggtccctgatgtcaaagaaatggaaaaaagcagctttactgagtacattgaatctccagacgtggaaaatgaagtaaagagactgctgcgttcggatgctgaagccgtaagtacccgttgggaagtcattgctgaagatggaaccaaggaaatagaaagtcaaggctccatcccaggatttttgatatcctcgggaatgagcagccacaagcagggtcatacctcgtcagtcatggaaattcagaagcagattgagaaaaaggagaaaaagctccataagattcagaataaagcacaaagacagaaggatctcatcatgaaagtggaaaacctgacactcaagaatcattttcagtctgtgctggagcagcttgagttacaggaaaaacaaaaaaatgagaagctcatttccctacaggaacagttgcagcgttttctgaagaagtgaggagagccattggcgtggcccacaaaccttggattcaccatccagactgcagattggatgaaactgtgcacgtttttgtcccttcagttgccttatgttgaatcagttatatttatctgtaccttctttgctacttaaaatatgctcacagtttgtagtcatgtagaaaaggccagtataaaaatgtagtagacttaaagaccccactcgaccatgagactttctctttgtcaatttgggaattattattattaatttagaaatggggtcttgttatgttgcccaggctgaattcagactcctgggcttaagggatccttccgcctcagcctcctgagtagctgggactacagttgtgcaccaccacaccaaacaagaattgattatattgcttctgtgctatggtaccagcagattattcagccatgcttctaaaggcagtctagcctagaggccgtacagctgtttggtttgcatatgttttagcttttcttttggtttttagtatttcctaaaacataggggaaaaaacgaggtcatttctactaagcactaggacctgccatagtgagtttaagtgcctaccttgcagcagttaatactagattgtgttctgtctctgttcaggtaacaggactgcattcctgctcaaggatgattccttgctgctgcttatgttctgttgtttttaggatggagctggttgttattcaccaactaagggaacagttagagcagagatgaagaaattatgaactgttatccttattctgagccttctcctcctaaccctcatcagttaaggttaggaagaacaagatgccataatgcctatgaagacttctttaacaatcttgtttgggtttttttctaggtatattattagtgttttatggtctatgttctttaagcaataaataaattgttcattttaaa

SEQ ID NO: 189038 - DNA, 1579 bp, Homo sapiens
  Payload ID: 17335
  Gene Symbol: TAF7L
  Gene Name: TAF7-like RNA polymerase II, TATA box binding protein (TBP)-associated factor, 50kDa
  Uniprot ID: Q5H9L4
  ENST ID: ENST00000356784
  CDS Start-End: 116-1246
gcgttcgcctctacgttccgcgcgggagcccacgcgcggttcgtccggaacccacagaccagagacgcaggtcccagccttttcggtgtcggcgccagttcccggaggagcggacatgagtgaaagccaggatgaagttcctgatgaagttgagaaccagtttatattgcgtctgcctctggaacatgcttgtactgtcaggaacctagcacgttctcaaagtgtcaagatgaaggataaactaaaaattgacttattgcctgatgggcgccatgcagttgttgaagtagaagatgtcccactagctgctaagctggttgacttgccttgtgttattgaaagcctgagaacgcttgataaaaaaaccttttataaaacagcagacatttctcagatgcttgtgtgcactgctgatggtgatatccacctttctccagaagaaccagctgcctctactgatcctaatatagtcaggaaaaaagaaagggggagagaagaaaaatgtgtctggaagcatggcattacgccaccacttaagaatgtcagaaagaaaaggttccggaaaacacaaaaaaaggtccctgatgtcaaagaaatggaaaaaagcagctttactgagtacattgaatctccagacgtggaaaatgaagtaaagagactgctgcgttcggatgctgaagccgtaagtacccgttgggaagtcattgctgaagatggaaccaaggaaatagaaagtcaaggctccatcccaggatttttgatatcctcgggaatgagcagccacaagcagggtcatacctcgtcagaatatgatatgcttcgggagatgttcagtgattctagaagtaacaatgatgatgatgaggatgaggatgatgaagatgaggatgaggatgaggatgaggatgaagatgaagacaaagaagaggaggaggaagattgttctgaagagtatctggaaaggcagctgcaggccgagtttattgaatctggccagtatagggcaaatgaaggtaccagttcaatagtcatggaaattcagaagcagattgagaaaaaggagaaaaagctccataagattcagaataaagcacaaagacagaaggatctcatcatgaaagtggaaaacctgacactcaagaatcattttcagtctgtgctggagcagcttgagttacaggaaaaacaaaaaaatgagaagctcatttccctacaggaacagttgcagcgttttctgaagaagtgaggagagccattggcgtggcccacaaaccttggattcaccatccagactgcagattggatgaaactgtgcacgtttttgtcccttcagttgccttatgttgaatcagttatatttatctgtaccttctttgctacttaaaatatgctcacagtttgtagtcatgtagaaaaggccagtataaaaatgtagtagacttaaagaccccactcgaccatgagactttctctttgtcaatttgggaattattattattaatttagaaatggggtcttgttatgttgcccaggctgaattcagactcctgggcttaagggatccttccgcctcagcctc

SEQ ID NO: 189039 - DNA, 2341 bp, Homo sapiens
  Payload ID: 17335
  Gene Symbol: TAF7L
  Gene Name: TAF7-like RNA polymerase II, TATA box binding protein (TBP)-associated factor, 50kDa
  Uniprot ID: Q5H9L4
  ENST ID: ENST00000372907
  CDS Start-End: 13-1401
acgaggtgggccatggagtgccccgagggacagctccccatttcttcagaaaatgattcaacaccaacagtttcaacatcggaagtaactagccaacaagaaccccaaattcttgtcgaccgtgggtctgaaaccacctatgaaagcagcgccgacattgctggcgacgaaggcacccagattcctgccgacgaggacactcaaacggatgcggacagcagcgcccaggctgctgcccaggccccagaaaacttccaggaagggaaagacatgagtgaaagccaggatgaagttcctgatgaagttgagaaccagtttatattgcgtctgcctctggaacatgcttgtactgtcaggaacctagcacgttctcaaagtgtcaagatgaaggataaactaaaaattgacttattgcctgatgggcgccatgcagttgttgaagtagaagatgtcccactagctgctaagctggttgacttgccttgtgttattgaaagcctgagaacgcttgataaaaaaaccttttataaaacagcagacatttctcagatgcttgtgtgcactgctgatggtgatatccacctttctccagaagaaccagctgcctctactgatcctaatatagtcaggaaaaaagaaagggggagagaagaaaaatgtgtctggaagcatggcattacgccaccacttaagaatgtcagaaagaaaaggttccggaaaacacaaaaaaaggtccctgatgtcaaagaaatggaaaaaagcagctttactgagtacattgaatctccagacgtggaaaatgaagtaaagagactgctgcgttcggatgctgaagccgtaagtacccgttgggaagtcattgctgaagatggaaccaaggaaatagaaagtcaaggctccatcccaggatttttgatatcctcgggaatgagcagccacaagcagggtcatacctcgtcagaatatgatatgcttcgggagatgttcagtgattctagaagtaacaatgatgatgatgaggatgaggatgatgaagatgaggatgaggatgaggatgaggatgaagatgaagacaaagaagaggaggaggaagattgttctgaagagtatctggaaaggcagctgcaggccgagtttattgaatctggccagtatagggcaaatgaaggtaccagttcaatagtcatggaaattcagaagcagattgagaaaaaggagaaaaagctccataagattcagaataaagcacaaagacagaaggatctcatcatgaaagtggaaaacctgacactcaagaatcattttcagtctgtgctggagcagcttgagttacaggaaaaacaaaaaaatgagaagctcatttccctacaggaacagttgcagcgttttctgaagaagtgaggagagccattggcgtggcccacaaaccttggattcaccatccagactgcagattggatgaaactgtgcacgtttttgtcccttcagttgccttatgttgaatcagttatatttatctgtaccttctttgctacttaaaatatgctcacagtttgtagtcatgtagaaaaggccagtataaaaatgtagtagacttaaagaccccactcgaccatgagactttctctttgtcaatttgggaattattattattaatttagaaatggggtcttgttatgttgcccaggctgaattcagactcctgggcttaagggatccttccgcctcagcctcctgagtagctgggactacagttgtgcaccaccacaccaaacaagaattgattatattgcttctgtgctatggtaccagcagattattcagccatgcttctaaaggcagtctagcctagaggccgtacagctgtttggtttgcatatgttttagcttttcttttggtttttagtatttcctaaaacataggggaaaaaacgaggtcatttctactaagcactaggacctgccatagtgagtttaagtgcctaccttgcagcagttaatactagattgtgttctgtctctgttcaggtaacaggactgcattcctgctcaaggatgattccttgctgctgcttatgttctgttgtttttaggatggagctggttgttattcaccaactaagggaacagttagagcagagatgaagaaattatgaactgttatccttattctgagccttctcctcctaaccctcatcagttaaggttaggaagaacaagatgccataatgcctatgaagacttctttaacaatcttgtttgggtttttttctaggtatattattagtgttttatggtctatgttctttaagcaataaataaattgttcattttaaatgga

SEQ ID NO: 189040 - DNA, 6680 bp, Homo sapiens
  Payload ID: 17336
  Gene Symbol: TAF8
  Gene Name: TAF8 RNA polymerase II, TATA box binding protein (TBP)-associated factor, 43kDa
  Uniprot ID: Q7Z7C8
  ENST ID: ENST00000372977
  CDS Start-End: 19-951
acactacgccagaacaagatggccgacgcggcggccacagctggggccggtggctccggaacgagatcgggaagtaaacagtccactaaccctgccgataactatcatctggcccggaggagaaccctgcaggtggttgtgagctccttgctgacagaggcagggtttgagagtgccgagaaagcatccgtggaaacgctgacagagatgctgcagagctacatttcagaaattgggagaagtgccaagtcttactgtgagcacacagccaggacccagcccacactgtccgatatcgtggtcacacttgttgagatgggtttcaatgtggacactctccctgcttatgcaaaacggtctcagaggatggtcatcactgctcctccggtgaccaatcagccagtgacccccaaggccctcactgcagggcagaaccgaccccacccgccgcacatccccagccattttcctgagttccctgatccccacacctacatcaaaactccgacgtaccgtgagcccgtgtcagactaccaggtcctgcgggagaaggctgcatcccagaggcgcgatgtggagcgggcacttacccgtttcatggccaagacaggcgagactcagagtcttttcaaagatgacgtcagcacatttccattgattgctgccagacctttcaccatcccctacctgacagctcttcttccgtctgaactggagatgcaacaaatggaagagacagattcctcggagcaggatgaacagacagacacagagaaccttgctcttcatatcagcatggaggattctggagccgagaaggagaacacctctgtcctgcagcagaacccctccttgtcgggtagccggaatggggaggagaacatcatcgataacccttatctgcggccggtgaagaagcccaagatccgcaggaagaagtccctctcctgagctgagaaggaaacctggcttgtacaggggcgcagattccaccctcccggggagttaaagccactcaagggaagaagagggtgacctcctcatggccaagccgaggctgcagggtgtgatcggacatgattttcatggcaaaccgtcttattaagatgacctattttcactggatgtttgggttgaggaagatatgaacagaataatgagaatttttttttttattttgagatggagtcttactctatcacccaggctggaatgcagtggtgtgatctcagctcactgcagtctcagcaaccctgggtccaagtgattctcctgccttggcctcccgagtagctgggactagaggcaagcgccaccatgctggctaatttttgtattttgagtagagatagggtttcgccatgttggccaggctggtcttgaactcctgacctcaagtgatccacccgcattggcctcccaaagagttgcgattacaggtgtgagccaccacgcccagctaatttttgtatttttaatagagataaggtttcgccatgttggccaggctggtcttgaactcctgacctcaagtgataacccgcctcggcctcccaaagtgctgagattacaggcgtgagccaccgcaccccaccagagactttcttaatcaatcaggctatgtggtggggcatagcagcagccagtgacttcgttcattatcacaggatttgattcctttgaaactcaagagaccagggaaagtgacaggaaggaaagggctctttgctgctgtgcttattacaaggaagactgtttgtccagcgtgtatttcaggatatctggatcccttttattgactcacaatttgtggcaccactttctcatcccagaacttcattcttatttctctcctcatctggcctcccaagtgctccgttgagctgatgaaaagttctttgtactccctcaacgtgtcggaaacaggaggccacacagcacagctttgtttggggtgggcaggagtcaggagtcttgagcagatgcatcactgtgaagaagaacgacatgtcggggctgcacctgtcctcccgtcggcatttgacgaaagctccctgaagcggggcagcactctcctcctgagagatttaccatttattgcccctgtgaggaatgtgtgcttgggaactgccaagtcttaccccttctggaagaagaggttttctctgacaagagcctagagcgtcggctctattatgctgggacttgacagaggagccatggggtttaaacagtaggaaagaggggctacgcgcagtggctcacgcctgtaatcccagcacttcgggaggcgaaggcaggtggatcacttgaggtcaggagttcgagaccagcctggccaacatagtgaaaccccgtctctactaaaaatacaaaaattagccgggtgtggttactcatgcctgtaatcccagctactcgggaggctgaggcaggagaatcacttgaacctgggaggcggaggttgcagtgagccgagatcgtgccactgcactccagcctgggtgacagagcgagactccatttcaaaaaaataaaaaaaggataaagtaaacaataggaaaggatttggtggggtgagggtggggtgttgagggctgggcctcatcttgtattctgaaagctgagaaacggctggtcagctggaaggctggtggatgggcaggagtgagccaagctgaggcgttctgcaagaagcaggtctgagtctgtccaaccaatttgtatcctgtggggagaacaacttcattcttaacataccctacaaaccagaaaacaagtttttaaggaagatgctgggcatgctgatagcttttctggtctcctaaggaagagtttttaaaactaaatccaaggaagaaaaatgtaacaacacgtggaagtgaacactggatgaataagcttgtttcccaaattagaatcctaacgtccatatttagcttcatgtattcccctttggcttccacagttcaactccttttattttgagacagggtctcgctgtgtcgccccagctggagtatagtggcactacctcggctcactgcaacctccactccccgggttcaagcaattctcagagtagctgggattacagatgcccgccaccacatctggctaattttttttttttttttttagtagacacgggattttgctatgttgcccaggctggtcttgaactcctggcctcaagtgatccacccgccttggccttccaaagtgttgagattacaggcgtgagccacggtgcccagcccatctcttagtcttccattcccttggtgaatttggaaacttgaaaaacttggggacttgacagcaggctccatgttcttctggcctcactgtactgtgtaaggaaagagctgcttgtcaggaacggaagaggggacgctagtaaaaaaaaaaaaattggattccccaactggactaaataggagtttttcaggtttgtagtaacgtgaaactctcctagatcgaagcagttagactggcctatgtggccttctcagggtttgtgattcagttcttagcgattcttggcctgataagtttatgaacacagccccacattcaagccgtggccaatcccagctgttctcactgctcttgggaggtgttgtcccagtcagtgtttctgcagcttccatttgttgttgttatccagtgtaagcacctgttgaatgcagatgtgctgagttagaggtgggatttggaaaagggctgctatttctgctgttgagatttcagaggctatactctttttttttcttttcttttttttttttttttgagacggcatctcactcttatcgcccaggctggagtgcaatggcgtgatctcggctcactgcaacctccacctcctgggttcaagggattctcctgcctcagcctcctgagtagctgggattacaggcacctaccacaattctcggctaattttttttgtatttttggtagagacggggtttcaccaggttggccagggtggtctcgaacacctgacctcagatgatccacccacctcggcctcccagtgtgggtgggattacaggcatgagccaccgcgcctggcctcagaggctatactcttataattttgttctgaggggagacagggaaagggttagacaacttgaaacattgaccctgtataaaaatgcaaaattctcaatgtgtatttataaatttctattttttataactttatgggacttcttagaggccaaaagtagtaaacatgcagattaaaaatgtttatgaaaatctcaataaaaattcataataaaaactttgtaaataaatagaactgtaagctttgaacttaatttgtgttcaaaagttaacagcaatgtggacaaataagtcaggcttagcccttgtgttggcctaagcacacctgggaacttagtaaaacttttattttggaaattttcaaatacaaaattagagagcaaaatatatgaacccctgtatatgcctcatcaagcttccacacttgtcagtagcttgttgattctgtttcatctgtttctcccactttttgtcctttattttctttcctcctggagtgtgtgtgtgtgtgtgtgtgcgtgtgtgtgcgtgtgagacagagtttcgcgctggagtgcaatggtgcaatcttggcccactgcaacttctgcctcccgggttcaaatgattctactgcctcagcttcctgagtagctgggattataggtatctaccaccaccaccacgcctggctaattttttcttttttttttggagacggagtctcgctctgtcgcccaggctggattgcagtggattgtcaagattgcagtggtgcaatctcagctcaccgcaagctccgccacccaggttcacgccattctcctgcctcagcctcccaagtagctgggactacaggtgcctgctaccacgcccagctaattttttgtatttttcagtagagatggagtttcactgcattagccaggatggtctcgatctcctgacctcatgatccgcccgcctcggcctcccaaagtgctgggattacaggcatgagccaccgcacctggcctaatttttttgtaggtttagtagagatggggtttcaccatgttggccagactggtctccaactcctgacctcaggtgatcacctgcctcagcctcctaaagtgctgaggttacaggcgtgagcccccgcgcctggctcttctggagtatttttaaatgcaaactccagacctgtgtcatttaatctaaatgtgtctatacgtatctctgattgatctttctttaaattttaattttggaataattatagattcacaagatgttgcaaaaaatgttgagagagatcctatgtacccatcacccactttctcccagtggtagcatcttgcataactgtggtgcaatatcaaaacccttgcattcagtttcagtgtacaatgtagatggtatattagtacaatgcatagagcttatttagttttcaccatgtgcacgtgtgtgttatgtgtgtgttgttccgtgcagtttcatcgtgtagatttgtgtaaccaccagcacacaaatggtgaagacacagaaccattgcatcagtacagttctccctcatgctgtctctttgcaatcacatccacctctctgctcttccacttctctcctggcagccactactctgttctctatctctaatgttattgaaagaatgttataaattgaatcataaagtatgtgacttttttctttttgagacagagtcttgctctatcgcctaggctggatggagtgcagtggagcgatcccagctcactgcaactcctccacctcccgggttcaagagattctcctgcctcagcctcccaagtagctgggattacaggcatgtgccaccacacccagctaacttttgtatttttagtagagatggggtttcaccatgttggccaggttggtctccaactcctgacctcaagtgatccgcccacctcagcctcccaaagtgctaggattataggtatgacccaccgcacctggccgagtatgggactttttgacgttggctttttcagttctgcataattctcttgaggtccatctaggtggttgtgtgtatcagtagttcctttctttttattgctgagtagcatggaggcaccatagtttaacacagtttctttaaccattcacgcattgagacaaaaaaagttcttaattctgcgaacatcaacttcctgtgcccaggtgcaagtgcgggggcagctggcccagggtagagctttaccatggaccctggcgctcctggaaaaaaattcaaggtatttttcctcctcttggagcgtgtggcctacctcatctccatttgattactagcttttctttttctcctttgttaaacagttatttaattttgaagagataatatatgtatacagtataaaatttaaaagacagaaaaagatataagtgataacaaaatatcttcctcctcccctgtttcccagaggctcagacctcatccctggcagctgctattatgttactgtcaatatgaccttatgtattcttccagaagtattctgtgcatcaaatgcaaatacttatattttctacttctcagtgtattttttggtgatgttccatgtcagtaataaagagcttctctgtttcgtggc

SEQ ID NO: 189041 - DNA, 794 bp, Homo sapiens
  Payload ID: 17336
  Gene Symbol: TAF8
  Gene Name: TAF8 RNA polymerase II, TATA box binding protein (TBP)-associated factor, 43kDa
  ENST ID: ENST00000372978
  CDS Start-End: 30-554
cgcgctcgcgcacactacgccagaacaagatggccgacgcggcggccacagctggggccggtggctccggaacgagatcgggaagtaaacagtccactaaccctgccgataactatcatctggcccggaggagaaccctgcaggtggttgtgagctccttgctgacagaggcagggtttgagagtgccgagaaagcatccgtggaaacgctgacagagatgctgcagagctacatttcagaaattgggagaagtgccaagtcttactgtgagcacacagccaggacccagcccacactgtccgatatcgtggtcacacttgttgagatgggtttcaatgtggacactctccctgcttatgcaaaacggtctcagaggatggtcatcactgctcctccggtgaccaatcagccagtgacccccaaggccctcactgcagggcagaaccgaccccacccgccgcacatccccagccattttcctgagttccctgatccccacacctacatcaaaactccggtgagtgatgaagcactgggactgcgcgtggtgtaaagcacggagtcagttcctactgactgtcacgtggcagagtccagtccaaaagcttgttgatgaaagagtggttcaaaactcagaatgtggccgggcacattggctcacacctgtaatcccagcattttaggaggccgaggcaggaggatcacttgagcctgggagttcaagaccagcctgggcagcagagcaagaccctgtctcatttgaaaaataaataaataaagaaaaaaaaaagaa

SEQ ID NO: 189042 - DNA, 1805 bp, Homo sapiens
  Payload ID: 17336
  Gene Symbol: TAF8
  Gene Name: TAF8 RNA polymerase II, TATA box binding protein (TBP)-associated factor, 43kDa
  Uniprot ID: Q7Z7C8
  ENST ID: ENST00000372982
  CDS Start-End: 21-1037
gcacactacgccagaacaagatggccgacgcggcggccacagctggggccggtggctccggaacgagatcgggaagtaaacagtccactaaccctgccgataactatcatctggcccggaggagaaccctgcaggtggttgtgagctccttgctgacagaggcagggtttgagagtgccgagaaagcatccgtggaaacgctgacagagatgctgcagagctacatttcagaaattgggagaagtgccaagtcttactgtgagcacacagccaggacccagcccacactgtccgatatcgtggtcacacttgttgagatgggtttcaatgtggacactctccctgcttatgcaaaacggtctcagaggatggtcatcactgctcctccggtgaccaatcagccagtgacccccaaggccctcactgcagggcagaaccgaccccacccgccgcacatccccagccattttcctgagttccctgatccccacacctacatcaaaactccgacgtaccgtgagcccgtgtcagactaccaggtcctgcgggagaaggctgcatcccagaggcgcgatgtggagcgggcacttacccgtttcatggccaagacaggcgagactcagagtcttttcaaagatgacgtcagcacatttccattgattgctgccagacctttcaccatcccctacctgacagctcttcttccgtctgaactggagatgcaacaaatggaagagacagattcctcggagcaggatgaacagacagacacagagaaccttgctcttcatatcagcatgatagagtctcgctccgtcacccaggctggagtgcagtggcaagatcttggctcactgcaacctccgcctcctgggttcaagcgattctccagcctcagcctcctgagtagctggaattacaggaggattctggagccgagaaggagaacacctctgtcctgcagcagaacccctccttgtcgggtagccggaatggggaggagaacatcatcgataacccttatctgcggccggtgaagaagcccaagatccgcaggaagaagccagatacattctagagaattgtgagactttgccctaagctgccaagtgctccccaaggagatcggtcaccaggagagcagccacaaaggtcaagaaagacacacacggaagcaaacccaggctctgtgctccttccagcccttgctggtgcagatgctaccccacaagcttgtcagatcgcccaggtgacgggccaggcgcagccatcgggaaggtcattcagccaacccagaggatgtagaccctgtcctcaagaagtgcagggcgagttctgccgtgccctctgaaatactctccctcctctcagagccctccctcgagagcctgagtgcaccatgtcttgtggcctcgcctgaagccttcctctggcttcacagaatgctctggaactctggggtctggtcagggagtgtgtcctcagcttgtctggaggaggcctgcatccctcctgagctcttggaggtgcccaggaaccctgcttctcctcacagggcctggccatatagccagctccaacccaaagccctgcacagtgcctcacccactcccttctcctggtctctcctcaaaagaattttacatgattttaaaataataatagctttcatttacatagtgcttacatttatatagcacttactatgtgcgatgtactaatttaagtactttatattaactcatataataaatggacacaacacaaaactcaaaaggtacaaaagaataaaacagttaaaaact

SEQ ID NO: 189043 - DNA, 1293 bp, Homo sapiens
  Payload ID: 17336
  Gene Symbol: TAF8
  Gene Name: TAF8 RNA polymerase II, TATA box binding protein (TBP)-associated factor, 43kDa
  Uniprot ID: Q7Z7C8
  ENST ID: ENST00000456846
  CDS Start-End: 21-956
gcacactacgccagaacaagatggccgacgcggcggccacagctggggccggtggctccggaacgagatcgggaagtaaacagtccactaaccctgccgataactatcatctggcccggaggagaaccctgcaggtggttgtgagctccttgctgacagaggcagggtttgagagtgccgagaaagcatccgtggaaacgctgacagagatgctgcagagctacatttcagaaattgggagaagtgccaagtcttactgtgagcacacagccaggacccagcccacactgtccgatatcgtggtcacacttgttgagatgggtttcaatgtggacactctccctgcttatgcaaaacggtctcagaggatggtcatcactgctcctccggtgaccaatcagccagtgacccccaaggccctcactgcagggcagaaccgaccccacccgccgcacatccccagccattttcctgagttccctgatccccacacctacatcaaaactccgacgtaccgtgagcccgtgtcagactaccaggtcctgcgggagaaggctgcatcccagaggcgcgatgtggagcgggcacttacccgtttcatggccaagacaggcgagactcagagtcttttcaaagatgacgtcagcacatttccattgattgctgccagacctttcaccatcccctacctgacagctcttcttccgtctgaactggagatgcaacaaatggaagagacagattcctcggagcaggatgaacagacagacacagagaaccttgctcttcatatcagcatggaggattctggagccgagaaggagaacacctctgtcctgcagcagaacccctccttgtcgggtagccggaatggggaggagaacatcatcgataacccttatctgcggccggtgaagaagcccaagatccgcaggaagaagccagatacattctagagaattgtgagactttgccctaagctgccaagtgctccccaaggagatcggtcaccaggagagcagccacaaaggtcaagaaagacacacacggaagcaaacccaggctctgtgctccttccagcccttgctggtgcagatgctaccccacaagcttgtcagatcgcccaggtgacgggccaggcgcagccatcgggaaggtcattcagccaacccagaggatgtagaccctgtcctcaagaagtgcagggcgagttctgccgtgccctctgaaatactctccctcctctcagagccctccctcgagagcctgagtgcaccatgtcttgtggcctcg

SEQ ID NO: 189044 - DNA, 556 bp, Homo sapiens
  Payload ID: 17336
  Gene Symbol: TAF8
  Gene Name: TAF8 RNA polymerase II, TATA box binding protein (TBP)-associated factor, 43kDa
  ENST ID: ENST00000482432
  CDS Start-End: 373-555
ttttatcttttgccctcctctcctcgcggtcacctcttgttactgttttcattttccctttcaatgaaatggtgtgaagatgggaggcacaagagagggatcctgttttttctgcgggacacgtcttaatcccatcatgcgtgtttcttcagctatgtattctaataatctgctaaagtagaaagtaaaagacctgctattttatctcattgggactgtacgttttagagatcgggaagtaaacagtccactaaccctgccgataactatcatctggcccggaggagaaccctgcaggtggttgtgagctccttgctgacagaggcagggtttgagagtgccgagaaagcatccgtggaaacgctgacagagatgctgcagagctacatttcagaaattgggagaagtgccaagtcttactgtgagcacacagccaggacccagcccacactgtccgatatcgtggtcacacttgttgagatgggtttcaatgtggacactctccctgcttatgcaaaacggtctcagaggatggtcatcactgctcgtaagtgac

SEQ ID NO: 189045 - DNA, 719 bp, Homo sapiens
  Payload ID: 17336
  Gene Symbol: TAF8
  Gene Name: TAF8 RNA polymerase II, TATA box binding protein (TBP)-associated factor, 43kDa
  ENST ID: ENST00000472818
  CDS Start-End: 19-390
acactacgccagaacaagatggccgacgcggcggccacagctggggccggtggctccggaacgagatcgggaagtaaacagtccactaaccctgccgataactatcatctggcccggaggagaaccctgcaggtggttgtgagctccttgctgacagaggcagggtttgagagtgccgagaaagcatccgtggaaacgctgacagagatgctgcagagctacatttcagaaattgggagaagtgccaagtcttactgtgagcacacagccaggacccagcccacactgtccgatatcgtggtcacacttgttgagatgggtttcaatgtggacactctccctgcttatgcaaaacggtctcagaggatggtcatcactgctcgtaagtgactttgaactgaggtacttagcaatttttcaattaatgcttgtggaatgaagtaattgaatatggtagggattggattagtagctacttccttgttgtgggctctcttccaatgtttggggctacctacaatataatctttatttgggctagtctgattagcatgtgaaattcagtcaccaaaaggtaaaccatctttgagatattgctgtgtttcttgtgttctagccccagaagggcaaatgatgctgcttggaaaaatgaaagtttttgttcttcttagattaagggttggtaaattgtggcctatgggccaaatgcagcctgcctc

SEQ ID NO: 189046 - DNA, 2402 bp, Homo sapiens
  Payload ID: 17336
  Gene Symbol: TAF8
  Gene Name: TAF8 RNA polymerase II, TATA box binding protein (TBP)-associated factor, 43kDa
  Uniprot ID: Q7Z7C8
  ENST ID: ENST00000494547
  CDS Start-End: 21-1037
gcacactacgccagaacaagatggccgacgcggcggccacagctggggccggtggctccggaacgagatcgggaagtaaacagtccactaaccctgccgataactatcatctggcccggaggagaaccctgcaggtggttgtgagctccttgctgacagaggcagggtttgagagtgccgagaaagcatccgtggaaacgctgacagagatgctgcagagctacatttcagaaattgggagaagtgccaagtcttactgtgagcacacagccaggacccagcccacactgtccgatatcgtggtcacacttgttgagatgggtttcaatgtggacactctccctgcttatgcaaaacggtctcagaggatggtcatcactgctcctccggtgaccaatcagccagtgacccccaaggccctcactgcagggcagaaccgaccccacccgccgcacatccccagccattttcctgagttccctgatccccacacctacatcaaaactccgacgtaccgtgagcccgtgtcagactaccaggtcctgcgggagaaggctgcatcccagaggcgcgatgtggagcgggcacttacccgtttcatggccaagacaggcgagactcagagtcttttcaaagatgacgtcagcacatttccattgattgctgccagacctttcaccatcccctacctgacagctcttcttccgtctgaactggagatgcaacaaatggaagagacagattcctcggagcaggatgaacagacagacacagagaaccttgctcttcatatcagcatgatagagtctcgctccgtcacccaggctggagtgcagtggcaagatcttggctcactgcaacctccgcctcctgggttcaagcgattctccagcctcagcctcctgagtagctggaattacaggaggattctggagccgagaaggagaacacctctgtcctgcagcagaacccctccttgtcgggtagccggaatggggaggagaacatcatcgataacccttatctgcggccggtgaagaagcccaagatccgcaggaagaagtccctctcctgagctgagaaggaaacctggcttgtacaggggcgcagattccaccctcccggggagttaaagccactcaagggaagaagagggtgacctcctcatggccaagccgaggctgcagggtgtgatcggacatgattttcatggcaaaccgtcttattaagatgacctattttcactggatgtttgggttgaggaagatatgaacagaataatgagaatttttttttttattttgagatggagtcttactctatcacccaggctggaatgcagtggtgtgatctcagctcactgcagtctcagcaaccctgggtccaagtgattctcctgccttggcctcccgagtagctgggactagaggcaagcgccaccatgctggctaatttttgtattttgagtagagatagggtttcgccatgttggccaggctggtcttgaactcctgacctcaagtgatccacccgcattggcctcccaaagagttgcgattacaggtgtgagccaccacgcccagctaatttttgtatttttaatagagataaggtttcgccatgttggccaggctggtcttgaactcctgacctcaagtgataacccgcctcggcctcccaaagtgctgagattacaggcgtgagccaccgcaccccaccagagactttcttaatcaatcaggctatgtggtggggcatagcagcagccagtgacttcgttcattatcacaggatttgattcctttgaaactcaagagaccagggaaagtgacaggaaggaaagggctctttgctgctgtgcttattacaaggaagactgtttgtccagcgtgtatttcaggatatctggatcccttttattgactcacaatttgtggcaccactttctcatcccagaacttcattcttatttctctcctcatctggcctcccaagtgctccgttgagctgatgaaaagttctttgtactccctcaacgtgtcggaaacaggaggccacacagcacagctttgtttggggtgggcaggagtcaggagtcttgagcagatgcatcactgtgaagaagaacgacatgtcggggctgcacctgtcctcccgtcggcatttgacgaaagctccctgaagcggggcagcactctcctcctgagagatttaccatttattgcccctgtgaggaatgtgtgcttgggaactgccaagtcttaccccttctggaagaagaggttttctctgacaagagcctagagcgtcggctctattatgctgggacttgacagaggagccatggggtttaaacagtaggaaagaggggctacgcgcagtggctcacgcctgtaatccca

SEQ ID NO: 189047 - DNA, 1222 bp, Homo sapiens
  Payload ID: 17336
  Gene Symbol: TAF8
  Gene Name: TAF8 RNA polymerase II, TATA box binding protein (TBP)-associated factor, 43kDa
  ENST ID: ENST00000465926
  CDS Start-End: 421-1125
gaaaggcattcccgtttcaaaatatttagctttcttacttttttgtgcttttatcttttgccctcctctcctcgcggtcacctcttgttactgttttcattttccctttcaatgaaatggtgtgaagatgggaggcacaagagagggatcctgttttttctgcgggacacgtcttaatcccatcatgcgtgtttcttcagctatgtattctaataatctgctaaagtagaaagtaaaagacctgctattttatctcattgggactgtacgttttagagatcgggaagtaaacagtccactaaccctgccgataactatcatctggcccggaggagaaccctgcaggtggttgtgagctccttgctgacagaggcagggtttgagagtgccgagaaagcatccgtggaaacgctgacagagatgctgcagagctacatttcagaaattgggagaagtgccaagtcttactgtgagcacacagccaggacccagcccacactgtccgatatcgtggtcacacttgttgagatgggtttcaatgtggacactctccctgcttatgcaaaacggtctcagaggatggtcatcactgctcctccggtgaccaatcagccagtgacccccaaggccctcactgcagggcagaaccgaccccacccgccgcacatccccagccattttcctgagttccctgatccccacacctacatcaaaactccgacgtaccgtgagcccgtgtcagactaccaggtcctgcgggagaaggctgcatcccagaggcgcgatgtggagcgggcacttacccgtttcatggccaagacaggcgagactcagagtcttttcaaagatgacgtcagcacatttccatctcttcttccgtctgaactggagatgcaacaaatggaagagacagattcctcggagcaggatgaacagacagacacagagaaccttgctcttcatatcagcatggaggattctggagccgagaaggagaacacctctgtcctgcagcagaacccctccttgtcgggtagccggaatggggaggagaacatcatcgataacccttatctgcggccggtgaagaagcccaagatccgcaggaagaagtccctctcctgagctgagaaggaaacctggcttgtacaggggcgcagattccaccctcccggggagttaaagccactcaagggaagaagagggtgacctcctcatggcc

SEQ ID NO: 189048 - DNA, 1283 bp, Homo sapiens; identical to SEQ ID NO: 105326
  Payload ID: 17337
  Gene Symbol: TAF9
  Gene Name: TAF9 RNA polymerase II, TATA box binding protein (TBP)-associated factor, 32kDa
  Uniprot ID: Q16594
  ENST ID: ENST00000217893
  CDS Start-End: 291-1085

SEQ ID NO: 189049 - DNA, 1461 bp, Homo sapiens
  Payload ID: 17337
  Gene Symbol: TAF9
  Gene Name: TAF9 RNA polymerase II, TATA box binding protein (TBP)-associated factor, 32kDa
  Uniprot ID: Q16594
  ENST ID: ENST00000328663
  CDS Start-End: 468-1262
cccaggaaagcttgaaggcagagatagactcacgtctctaagacatatacataatatagccgcaaccgcggcggccttactttcccggagctgcatccccttttaggcgaagagcggaggcgaccagggactaccctaggtgaaagggcagccacctggccctacccgggctcaacgccgagcctctcggaggtacggcctcccggggaccttccagactggtcggcgcaagcgaagggcggggaccaccgaaggagtgtgtgacttaggcatccagcgcactgcctgacccgaagtaccgacccgagttatgcccaccctccaactttgcgacggaaatgtgtcatcgaaagccaggtacaccaggggttggaaaaaccacactaggcaaagaacttgcgtcaaaatcaggactgaaatacattaatgtgggtgatttagctcgagaagtctgatcatcggatatcatggagtctggcaagacggcttctcccaagagcatgccgaaagatgcacagatgatggcacaaatcctgaaggatatggggattacagaatatgagccaagagttataaatcagatgttggagtttgccttccgatatgtgaccacaattctagatgatgcaaaaatttattcaagccatgctaagaaagctactgttgatgcagatgatgtgcgattggcaatccagtgccgcgctgatcagtcttttacctctcctcccccaagagattttttattagatattgcaaggcaaagaaatcaaacccctttgccattgatcaagccatattcaggtcctaggttgccacctgatagatactgcttaacagctccaaactataggctgaaatctttacagaaaaaggcatcaacttctgcgggaagaataacagtcccgcggttaagtgttggttcagttactagcagaccaagtactcccacactaggcacaccaaccccacagaccatgtctgtttcaactaaagtagggactcccatgtccctcacaggtcaaaggtttacagtacagatgcctacttctcagtctccagctgtaaaagcttcaattcctgcaacctcagcagttcagaatgttctgattaatccatcattaatcgggtccaaaaacattcttattaccactaatatgatgtcatcacaaaatactgccaatgaatcatcaaatgcattgaaaagaaaacgtgaagatgatgatgatgacgatgatgatgatgatgactatgataatctgtaatctagccttgctgaatgtaacatgtatacttggtcttgaattcattgtactgatattaaacatgcatgctggatgttttcaagttgtgttttagaaaactaataataatgagtaaacacagttaccatacttttcaattgaaatgaaggtttttcatcagccttaaaagtgtaagaaaaataaagttgtcattcattcg

SEQ ID NO: 189050 - DNA, 1331 bp, Homo sapiens; identical to SEQ ID NO: 105327
  Payload ID: 17337
  Gene Symbol: TAF9
  Gene Name: TAF9 RNA polymerase II, TATA box binding protein (TBP)-associated factor, 32kDa
  Uniprot ID: Q16594
  ENST ID: ENST00000506736
  CDS Start-End: 337-1131

SEQ ID NO: 189051 - DNA, 582 bp, Homo sapiens; identical to SEQ ID NO: 105331
  Payload ID: 17337
  Gene Symbol: TAF9
  Gene Name: TAF9 RNA polymerase II, TATA box binding protein (TBP)-associated factor, 32kDa
  ENST ID: ENST00000512152
  CDS Start-End: 202-582

SEQ ID NO: 189052 - DNA, 966 bp, Homo sapiens; identical to SEQ ID NO: 105332
  Payload ID: 17337
  Gene Symbol: TAF9
  Gene Name: TAF9 RNA polymerase II, TATA box binding protein (TBP)-associated factor, 32kDa
  ENST ID: ENST00000503245
  CDS Start-End: 374-966

SEQ ID NO: 189053 - DNA, 588 bp, Homo sapiens; identical to SEQ ID NO: 105334
  Payload ID: 17337
  Gene Symbol: TAF9
  Gene Name: TAF9 RNA polymerase II, TATA box binding protein (TBP)-associated factor, 32kDa
  ENST ID: ENST00000504109
  CDS Start-End: 182-588

SEQ ID NO: 189054 - DNA, 761 bp, Homo sapiens; identical to SEQ ID NO: 105335
  Payload ID: 17337
  Gene Symbol: TAF9
  Gene Name: TAF9 RNA polymerase II, TATA box binding protein (TBP)-associated factor, 32kDa
  ENST ID: ENST00000509462
  CDS Start-End: 263-761

SEQ ID NO: 189055 - DNA, 1057 bp, Homo sapiens
  Payload ID: 17337
  Gene Symbol: TAF9
  Gene Name: TAF9 RNA polymerase II, TATA box binding protein (TBP)-associated factor, 32kDa
  ENST ID: ENST00000508954
  CDS Start-End: 752-1057
ccggtcagggcgcgcggccgggagggactgggctggggcaggctgggggcgcagagtgctctgggcatcgggcgcccaggtgggggcccctcactgccctcttcagaggccggccgagggccacgaggcggttgtcagcgccccgggagccgaccctcgcgggcgttgcgggaggcgagggaggggacgcggaacgttaattccgttggcctgaggctccgggggggggcgggggggggtggagagaggtcggcagatccagctctccagcttggcaacctgcttagtctttctgaatctggtatttcgtttgtaaaatgggttgttgattctttggcagggttggccttgggatttttagcgaaataacgtaaggccatatctgcttcccggtagagtcattaatggtggatgcctcactccttaggcctccgtgggccgtattttattttttctttgcttctgataaacgcctcagattagatttcggtaaacgagttcagatgtttgtgacgtgacgaaattgctgtatgcttttgttgagttacatcaaaggatccccccgccccttaaaaggaaggcatatagagcatttcgggtcgtttctcgcgtaggagtgggtctttgaagccatactcagggtacaccaggggttggaaaaaccacactaggcaaagaacttgcgtcaaaatcaggactgaaatacattaatgtgggtgatttagctcgagaagtctgatcatcggatatcatggagtctggcaagacggcttctcccaagagcatgccgaaagatgcacagatgatggcacaaatcctgaaggatatggggattacagaatatgagccaagagttataaatcagatgttggagtttgccttccgatatgtgaccacaattctagatgatgcaaaaatttattcaagccatgctaagaaagctactgttgatgcagatgatgtgcgattggcaatccagtgccgcgctgatcagtcttttacctctcctcccccaagagattttttattagatattgcaaggcaaagaaatcaaacc

SEQ ID NO: 189056 - DNA, 1183 bp, Homo sapiens
  Payload ID: 17337
  Gene Symbol: TAF9
  Gene Name: TAF9 RNA polymerase II, TATA box binding protein (TBP)-associated factor, 32kDa
  ENST ID: ENST00000620269
  CDS Start-End: 339-848
cccaggaaagcttgaaggcagagatagactcgcgtctctaagacatatacataatatagccgcaaccgcggcggccttactttcccggagctgcatccccttttgggcgaagagcggaggcgaccagggactaccctaggtgaaagggcagccacctggccctacccgggctcaacgccgagcctctcggaggtacggcctcccggggaccttccagactggtcggcgcaagcgaagggcggggaccaccgaaggagtgtgtgacttaggcatccagcgcactgcctgacccgaagtaccgacccgagttatgcccaccctccaactttgcgacggaaatgtgtcatcgaaagccaggtacaccaggggttggaaaaaccacactaggcaaagaacttgcgtcaaaatcaggactgaaatacattaatgtgggtgatttagctcgagaagagcaattgtatgatggctatgatgaagagtatgactgtcccattttagatgaagacagagtagttgatgagttagataaccaaatgagagaaggtggagttattgttgattaccatggttgtgatttcttccctgaacgctggtttcatatagtttttgtgctgagaacagataccaatgtattgtacgaaagacttgaaacaaggggttataatgagaagaaactaacagacaatattcagtgtgagatttttcaagttctttatgaagaagccacagcatcctacaaggaagaaatcgtgcatcagctgcccagtaataaaccagaagagctagaaaataatgtagatcagatcttgaaatggattgagcagtggatcaaagatcataactcttgacttataaggctagctacttaataatcactcttgttgatatctctgccgacatcatagaaattgttcaagtgtcagtaacactttattaaaatcatgttgcagaaccagcaggtggatagtatataggtttatgcctgtgtttctttttctccatgagaaagctaaacatgaaatataatgaatatagtattattaaggattgagacaaaaactgtgattttaatacttaaattgctaaagaataaataaatctgacaaaatgggtggatatcttttaagtttattacagaaaaaaatgcagatgatctcttaaaataaaactaaagataaagcaa

SEQ ID NO: 189057 - DNA, 587 bp, Homo sapiens; identical to SEQ ID NO: 105325
  Payload ID: 17337
  Gene Symbol: TAF9
  Gene Name: TAF9 RNA polymerase II, TATA box binding protein (TBP)-associated factor, 32kDa
  ENST ID: ENST00000617079
  CDS Start-End: 31-456

SEQ ID NO: 189058 - DNA, 1648 bp, Homo sapiens; identical to SEQ ID NO: 105324
  Payload ID: 17337
  Gene Symbol: TAF9
  Gene Name: TAF9 RNA polymerase II, TATA box binding protein (TBP)-associated factor, 32kDa
  ENST ID: ENST00000612207
  CDS Start-End: 53-571

SEQ ID NO: 189059 - DNA, 743 bp, Homo sapiens; identical to SEQ ID NO: 105333
  Payload ID: 17337
  Gene Symbol: TAF9
  Gene Name: TAF9 RNA polymerase II, TATA box binding protein (TBP)-associated factor, 32kDa
  ENST ID: ENST00000618233
  CDS Start-End: 14-157

SEQ ID NO: 189060 - DNA, 483 bp, Homo sapiens; identical to SEQ ID NO: 105330
  Payload ID: 17337
  Gene Symbol: TAF9
  Gene Name: TAF9 RNA polymerase II, TATA box binding protein (TBP)-associated factor, 32kDa
  ENST ID: ENST00000625009
  CDS Start-End: 1-330

SEQ ID NO: 189061 - DNA, 2713 bp, Homo sapiens
  Payload ID: 17338
  Gene Symbol: TAF9B
  Gene Name: TAF9B RNA polymerase II, TATA box binding protein (TBP)-associated factor, 31kDa
  Uniprot ID: Q9HBM6
  ENST ID: ENST00000341864
  CDS Start-End: 96-851
cctcctcccgctccccgcaggggtggagcctgagcgaggagcccgcgagctctcctctctcctctgtctccgcggatgacgagtggctggataacatggagtcgggcaagatggcgcctcccaagaacgctccgagagatgccttggtgatggcacagatcctgaaggatatgggaatcacagagtatgaaccaagggttataaatcaaatgttggaatttgctttccgttatgtgactacaattctggatgatgcaaaaatttattcgagccatgctaagaaacctaatgttgatgcagatgatgtgagactggcaatccagtgtcgtgctgaccaatcttttacctctcctcccccaagagattttttactggatatcgcaaggcagaaaaatcaaacccctttgccactgattaagccatatgcaggacctagactgccacctgatagatactgcttaacagctccaaactataggctgaagtccttaattaaaaagggacctaaccaagggagactagttccacgattaagtgttggtgctgttagtagcaaacctactactcctactatagcaaccccacaaacggtgtctgtcccaaataaagttgcaactccaatgtcagtgacaagccaaagatttacggtgcagattccaccttctcagtccacacctgtcaaaccagttcctgcaacaactgcagttcaaaatgttctgattaatccttcaatgattgggcccaaaaatattcttattaccaccaacatggtttcgtcacagaacacagccaatgaagcaaacccactgaagagaaaacatgaagatgatgatgacaatgatattatgtaaggaatatagtctagtctagatgcatttcaaaaggaaagttggttttgagcccagtatactgaactagaatattctagatcttgttttaccttaaaagactgaaatgtagctgcagtatttttcgtcagttaaaactgttagatctctttagtaaacatacaaatgtgtttttcagtaggcttcaattacaaacagttaagtacttgtttcttaatagtttcattaatgttgagtcctaatatggcaattctgtttttgagacacttttctgccttctatcactgatagtagcatttaagtttcagattctacagcctagtcagcagatttatctttgacagcataatttctgatctacatttaaatactactttattttataaggtaatatagttacttactgtcactagctaatttttttttttttaccaaatctctcaatataggaaacattttttggaaaggatggatttagaggagagattctaaatccattttggatgtatttgtttctttgacttccttaacttccaaactcaactccctttctagatcccattcattttctgcacctcccccataggcttgtttctctccattgctattaaatgtagaaggccatacctggaattttaaaaatattattcctggtaatacagctcagtgtcattttcctatttttaaaacatgctctacatgcctaatgttttgtgattcactttaacctgatggtttgcatttgctgtttttcactcttatgtcagagcagttgggttttaccccttagtttttatgcctgttaagctttactgtgcttttgacaggtagttttgggtcagttatattcagttttagtattgtattccaagttgataactcttccatgtttcacatttctaaatttaacagagatgctgtagcttaaaacatgttttgataagtaattacactggacctaggcaaaaccactgaagaacaagtgttcctttttaccacatacatattatgttttgatcactgctgcttgagccccgctattggtataattcagatcattttagcttgttgctgaggatgtcacatataagacaggatcaaacctgaaagacactaatggttcatcctctataaggccaacaaagaaaacaaattaatgtgatgtaacttgcatttatgtgcactctgcataggtttcccaataatactgtaatgttgctgaacacctttccctgttttccatttatacacatattaaagtcatattgggaaagatggcaaagcttttgagaatataaacacacctgttttgtttttcttaagttcaacatacttttgtagaatttgtaaaataaatgttcgtatcataattgagaatttatagccaaggatcctcaaaacagaagtttcatcttaggatagtgtttgatatatctaagaaagtccagtaacagagaagaaatgtctcaaatgtctcgtatcagttttagtgtttttcagtattagggaaaggtaatataaaaacaggtaaaatgtataaaaatagacctgatcaacatcataggagataaatattcattatatagcataggatattattacttgaatgttctcagggaggcagcaagtcagaaggcctaggttctagtcctagctccatcatttaccaactgtgtgaccttacttcacctcttagccttgttctcctcactagcagtaggaaagtaacacctaccctgcctacctcacagggctgttgtgagggttcaattggtatatgtgaaaattctttcagaattgtaaaatgctatatgactgtaaggaattattgcatttgttccaaggttaataaaaatttgagctta

SEQ ID NO: 189062 - DNA, 1596 bp, Homo sapiens
  Payload ID: 17339
  Gene Symbol: TAZ
  Gene Name: tafazzin
  ENST ID: ENST00000369776
  CDS Start-End: 86-874
tctcgagcggtcgaggtcgcagacctagaggcgccccacaggccggcccggggcgctgggagcgccggccgcgggccgggtggggatgcctctgcacgtgaagtggccgttccccgcggtgccgccgctcacctggaccctggccagcagcgtcgtcatgggcttggtgggcacctacagctgcttctggaccagtgagtgggcccaggccgaggcaggcccgcccgggtacccatgcccggccggagggatcctgaaactccgccacatctggaacctgaagttgatgcgttggacccctgcagctgcagacatctgcttcaccaaggagctacactcccacttcttcagcttgggcaagtgtgtgcctgtgtgccgaggagatggcgtctaccagaaggggatggacttcattttggagaagctcaaccatggggactgggtgcatatcttcccagaaggaatcgggcgcctgattgctgagtgtcatctcaaccccatcatcctgcccctgtggcatgtcggtgagcctggggacggggacagagagatggcatctggggtggggggcctgggactccctctggtcccaggctgccctgctccaccccacgtctggccttctgtccactgtgctgcaggaatgaatgacgtccttcctaacagtccgccctacttcccccgctttggacagaaaatcactgtgctgatcgggaagcccttcagtgccctgcctgtactcgagcggctccgggcggagaacaagtcggctgtggagatgcggaaagccctgacggacttcattcaagaggaattccagcatctgaagactcaggcagagcagctccacaaccacctccagcctgggagataggccttgcttgctgccttctggattcttggcccgcacagagctggggctgagggatggactgatgcttttagctcaaacgtggcttttagacagatttgttcatagaccctctcaagtgccctctccgagctggtaggcattccagctcctccgtgcttcctcagttacacaaaggacctcagctgcttctcccacttggccaagcagggaggaagaagcttaggcagggctctctttccttcttgccttcagatgttctctcccaggggctggcttcaggagggagcatagaaggcaggtgagcaaccagttggctaggggagcagggggcccaccagagctgtggagaggggaccctaagactcctcggcctggctcctacccaccgcccttgccgaaccaggagctgctcactacctcctcagggatggccgttggccacgtcttccttctgcctgagcttcccccccaccacaggccctttcctcaggcaaggtctggcctcaggtgggccgcaggcgggaaaagcagcccttggccagaagtcaagcccagccacgtggagcctagagtgagggcctgaggtctggctgcttgcccccatgctggcgccaacaacttctccatcctttctgcctctcaacatcacttgaatcctagggcctgggttttcatgtttttgaaacagaaccataaagcatatgtgttggcttgttgtaaaa

SEQ ID NO: 189063 - DNA, 567 bp, Homo sapiens
  Payload ID: 17339
  Gene Symbol: TAZ
  Gene Name: tafazzin
  ENST ID: ENST00000439735
  CDS Start-End: 15-567
cgggccgggtggggatgcctctgcacgtgaagtggccgttccccgcggtgccgccgctcacctggaccctggccagcagcgtcgtcatgggcttggtgggcacctacagctgcttctggaccaagtacatgaaccacctgaccgtgcacaacagggaggtgctgtacgagctcatcgagaagcgaggcccggccacgcccctcatcaccgtgtccaatcaccagtcctgcatggacgaccctcatctctgggggatcctgaaactccgccacatctggaacctgaagttgatgcgttggacccctgcagctgcagacatctgcttcaccaaggagctacactcccacttcttcagcttgggcaagtgtgtgcctgtgtgccgagatggcgtctaccagaaggggatggacttcattttggagaagctcaaccatggggactgggtgcatatcttcccagaagggaaagtgaacatgagttccgaattcctgcgtttcaagtggggaatcgggcgcctgattgctgagtgtcatctcaaccccatcatcctgcccctgtggcatgtcg

SEQ ID NO: 189064 - DNA, 864 bp, Homo sapiens
  Payload ID: 17339
  Gene Symbol: TAZ
  Gene Name: tafazzin
  ENST ID: ENST00000426231
  CDS Start-End: 1-104
ccctcatcaccgtgtccaatcaccagtcctgcatggacgaccctcatctctgggggatcctgaaactccgccacatctggaacctgaagttgatgcgttggtgaggaggaatgggcccctcgaagtgggccgggccggccccacctgcctctgcccagatttgccctcctcctgctctgcccaggaggtggcgtccagcagacccctgcagctgcagacatctgcttcaccaaggagctacactcccacttcttcagcttgggcaagtgtgtgcctgtgtgccgaggagcagaatttttccaagcagagaatgaggggaaaggtgttctagacacaggcaggcacatgccaggtgctggaaaaagaagagagaaaggagatggcgtctaccagaaggggatggacttcattttggagaagctcaaccatggggactgggtgcatatcttcccagaaggtcagcagggctgactgggtcgagcccccccagtatgagcgggatgggctcccaagcctcgcctctgtgctctctcaccagggaaagtgaacatgagttccgaattcctgcgtttcaagtggggaatcgggcgcctgattgctgagtgtcatctcaaccccatcatcctgcccctgtggcatgtcggaatgaatgacgtccttcctaacagtccgccctacttcccccgctttggacagaaaatcactgtgctgatcgggaagcccttcagtgccctgcctgtactcgagcggctccgggcggagaacaagtcggctgtggagatgcggaaagccctgacggacttcattcaagaggaattccagcatctgaagactcaggcagagcagctccacaaccacctccag

SEQ ID NO: 189065 - DNA, 1862 bp, Homo sapiens
  Payload ID: 17339
  Gene Symbol: TAZ
  Gene Name: tafazzin
  Uniprot ID: Q16635
  ENST ID: ENST00000475699
  CDS Start-End: 304-1140
tttccggcggttgcaccgggccggggtgccagcgcccgccttcccgtttcctcccgttccgcagcgcgcccacggcctgtgaccccggcgaccgctccccagtgacgagagagcggggccgggcgctgctccggcctgacctgcgaagggacctcggtccagtcccctgttgcgccgcgcccccgtccgtccgtgcgcgggccagtcaggggccagtgtctcgagcggtcgaggtcgcagacctagaggcgccccacaggccggcccggggcgctgggagcgccggccgcgggccgggtggggatgcctctgcacgtgaagtggccgttccccgcggtgccgccgctcacctggaccctggccagcagcgtcgtcatgggcttggtgggcacctacagctgcttctggaccaagtacatgaaccacctgaccgtgcacaacagggaggtgctgtacgagctcatcgagaagcgaggcccggccacgcccctcatcaccgtgtccaatcaccagtcctgcatggacgaccctcatctctgggggatcctgaaactccgccacatctggaacctgaagttgatgcgttggacccctgcagctgcagacatctgcttcaccaaggagctacactcccacttcttcagcttgggcaagtgtgtgcctgtgtgccgaggagcagaatttttccaagcagagaatgaggggaaaggtgttctagacacaggcaggcacatgccaggtgctggaaaaagaagagagaaaggagatggcgtctaccagaaggggatggacttcattttggagaagctcaaccatggggactgggtgcatatcttcccagaaggaatcgggcgcctgattgctgagtgtcatctcaaccccatcatcctgcccctgtggcatgtcggaatgaatgacgtccttcctaacagtccgccctacttcccccgctttggacagaaaatcactgtgctgatcgggaagcccttcagtgccctgcctgtactcgagcggctccgggcggagaacaagtcggctgtggagatgcggaaagccctgacggacttcattcaagaggaattccagcatctgaagactcaggcagagcagctccacaaccacctccagcctgggagataggccttgcttgctgccttctggattcttggcccgcacagagctggggctgagggatggactgatgcttttagctcaaacgtggcttttagacagatttgttcatagaccctctcaagtgccctctccgagctggtaggcattccagctcctccgtgcttcctcagttacacaaaggacctcagctgcttctcccacttggccaagcagggaggaagaagcttaggcagggctctctttccttcttgccttcagatgttctctcccaggggctggcttcaggagggagcatagaaggcaggtgagcaaccagttggctaggggagcagggggcccaccagagctgtggagaggggaccctaagactcctcggcctggctcctacccaccgcccttgccgaaccaggagctgctcactacctcctcagggatggccgttggccacgtcttccttctgcctgagcttcccccccaccacaggccctttcctcaggcaaggtctggcctcaggtgggccgcaggcgggaaaagcagcccttggccagaagtcaagcccagccacgtggagcctagagtgagggcctgaggtctggctgcttgcccccatgctggcgccaacaacttctccatcctttctgcctctcaacatcacttgaatcctagggcctgggttttcatgtttttgaaacagaaccataaagcatatgtgttggcttgttgtaaaa

SEQ ID NO: 189066 - DNA, 1889 bp, Homo sapiens
  Payload ID: 17339
  Gene Symbol: TAZ
  Gene Name: tafazzin
  Uniprot ID: Q16635
  ENST ID: ENST00000601016
  CDS Start-End: 289-1167
ccgggccggggtgccagcgcccgccttcccgtttcctcccgttccgcagcgcgcccacggcctgtgaccccggcgaccgctccccagtgacgagagagcggggccgggcgctgctccggcctgacctgcgaagggacctcggtccagtcccctgttgcgccgcgcccccgtccgtccgtgcgcgggccagtcaggggccagtgtctcgagcggtcgaggtcgcagacctagaggcgccccacaggccggcccggggcgctgggagcgccggccgcgggccgggtggggatgcctctgcacgtgaagtggccgttccccgcggtgccgccgctcacctggaccctggccagcagcgtcgtcatgggcttggtgggcacctacagctgcttctggaccaagtacatgaaccacctgaccgtgcacaacagggaggtgctgtacgagctcatcgagaagcgaggcccggccacgcccctcatcaccgtgtccaatcaccagtcctgcatggacgaccctcatctctgggggatcctgaaactccgccacatctggaacctgaagttgatgcgttggacccctgcagctgcagacatctgcttcaccaaggagctacactcccacttcttcagcttgggcaagtgtgtgcctgtgtgccgaggagcagaatttttccaagcagagaatgaggggaaaggtgttctagacacaggcaggcacatgccaggtgctggaaaaagaagagagaaaggagatggcgtctaccagaaggggatggacttcattttggagaagctcaaccatggggactgggtgcatatcttcccagaagggaaagtgaacatgagttccgaattcctgcgtttcaagtggggaatcgggcgcctgattgctgagtgtcatctcaaccccatcatcctgcccctgtggcatgtcggaatgaatgacgtccttcctaacagtccgccctacttcccccgctttggacagaaaatcactgtgctgatcgggaagcccttcagtgccctgcctgtactcgagcggctccgggcggagaacaagtcggctgtggagatgcggaaagccctgacggacttcattcaagaggaattccagcatctgaagactcaggcagagcagctccacaaccacctccagcctgggagataggccttgcttgctgccttctggattcttggcccgcacagagctggggctgagggatggactgatgcttttagctcaaacgtggcttttagacagatttgttcatagaccctctcaagtgccctctccgagctggtaggcattccagctcctccgtgcttcctcagttacacaaaggacctcagctgcttctcccacttggccaagcagggaggaagaagcttaggcagggctctctttccttcttgccttcagatgttctctcccaggggctggcttcaggagggagcatagaaggcaggtgagcaaccagttggctaggggagcagggggcccaccagagctgtggagaggggaccctaagactcctcggcctggctcctacccaccgcccttgccgaaccaggagctgctcactacctcctcagggatggccgttggccacgtcttccttctgcctgagcttcccccccaccacaggccctttcctcaggcaaggtctggcctcaggtgggccgcaggcgggaaaagcagcccttggccagaagtcaagcccagccacgtggagcctagagtgagggcctgaggtctggctgcttgcccccatgctggcgccaacaacttctccatcctttctgcctctcaacatcacttgaatcctagggcctgggttttcatgtttttgaaacagaaccataaagcatatgtgttggcttgttgtaaaa

SEQ ID NO: 189067 - DNA, 1485 bp, Homo sapiens
  Payload ID: 17339
  Gene Symbol: TAZ
  Gene Name: tafazzin
  Uniprot ID: Q16635
  ENST ID: ENST00000613002
  CDS Start-End: 304-1050
tttccggcggttgcaccgggccggggtgccagcgcccgccttcccgtttcctcccgttccgcagcgcgcccacggcctgtgaccccggcgaccgctccccagtgacgagagagcggggccgggcgctgctccggcctgacctgcgaagggacctcggtccagtcccctgttgcgccgcgcccccgtccgtccgtgcgcgggccagtcaggggccagtgtctcgagcggtcgaggtcgcagacctagaggcgccccacaggccggcccggggcgctgggagcgccggccgcgggccgggtggggatgcctctgcacgtgaagtggccgttccccgcggtgccgccgctcacctggaccctggccagcagcgtcgtcatgggcttggtgggcacctacagctgcttctggaccaagtacatgaaccacctgaccgtgcacaacagggaggtgctgtacgagctcatcgagaagcgaggcccggccacgcccctcatcaccgtgtccaatcaccagtcctgcatggacgaccctcatctctgggggatcctgaaactccgccacatctggaacctgaagttgatgcgttggacccctgcagctgcagacatctgcttcaccaaggagctacactcccacttcttcagcttgggcaagtgtgtgcctgtgtgccgaggagatggcgtctaccagaaggggatggacttcattttggagaagctcaaccatggggactgggtgcatatcttcccagaaggaatcgggcgcctgattgctgagtgtcatctcaaccccatcatcctgcccctgtggcatgtcggaatgaatgacgtccttcctaacagtccgccctacttcccccgctttggacagaaaatcactgtgctgatcgggaagcccttcagtgccctgcctgtactcgagcggctccgggcggagaacaagtcggctgtggagatgcggaaagccctgacggacttcattcaagaggaattccagcatctgaagactcaggcagagcagctccacaaccacctccagcctgggagataggccttgcttgctgccttctggattcttggcccgcacagagctggggctgagggatggactgatgcttttagctcaaacgtggcttttagacagatttgttcatagaccctctcaagtgccctctccgagctggtaggcattccagctcctccgtgcttcctcagttacacaaaggacctcagctgcttctcccacttggccaagcagggaggaagaagcttaggcagggctctctttccttcttgccttcagatgttctctcccaggggctggcttcaggagggagcatagaaggcaggtgagcaaccagttggctaggggagcagggggcccaccagagctgtggagaggggaccctaagactcctcggcctggctcctacccaccgcccttgccgaaccaggagctgctcactacctcctcagggatggccgt

SEQ ID NO: 189068 - DNA, 773 bp, Homo sapiens
  Payload ID: 17339
  Gene Symbol: TAZ
  Gene Name: tafazzin
  ENST ID: ENST00000620808
  CDS Start-End: 271-558
gcccgccttcccgtttcctcccgttccgcagcgcgcccacggcctgtgaccccggcgaccgctccccagtgacgagagagcggggccgggcgctgctccggcctgacctgcgaagggacctcggtccagtcccctgttgcgccgcgcccccgtccgtccgtgcgcgggccagtcaggggccagtgtctcgagcggtcgaggtcgcagacctagaggcgccccacaggccggcccggggcgctgggagcgccggccgcgggccgggtggggatgcctctgcacgtgaagtggccgttccccgcggtgccgccgctcacctggaccctggccagcagcgtcgtcatgggcttggtgggcacctacagctgcttctggaccaagtacatgaaccacctgaccgtgcacaacagggaggtgctgtacgagctcatcgagaagcgaggcccggccacgcccctcatcaccgtgtccaatcaccagtcctgcatggacgaccctcatctctgggggatcctgaaactccgccacatctggaacctgaagttgatgcgttggtgaggaggaatgggcccctcgaagtgggccgggccggccccacctgcctctgcccagatttgccctcctcctgctctgcccaggaggacccctgcagctgcagacatctgcttcaccaaggagctacactcccacttcttcagcttgggcaagtgtgtgcctgtgtgccgaggaatcgggcgcctgattgctgagtgtcatctcaaccccatcatcct

SEQ ID NO: 189069 - DNA, 1900 bp, Homo sapiens
  Payload ID: 17339
  Gene Symbol: TAZ
  Gene Name: tafazzin
  ENST ID: ENST00000615986
  CDS Start-End: 284-571
ccggggtgccagcgcccgccttcccgtttcctcccgttccgcagcgcgcccacggcctgtgaccccggcgaccgctccccagtgacgagagagcggggccgggcgctgctccggcctgacctgcgaagggacctcggtccagtcccctgttgcgccgcgcccccgtccgtccgtgcgcgggccagtcaggggccagtgtctcgagcggtcgaggtcgcagacctagaggcgccccacaggccggcccggggcgctgggagcgccggccgcgggccgggtggggatgcctctgcacgtgaagtggccgttccccgcggtgccgccgctcacctggaccctggccagcagcgtcgtcatgggcttggtgggcacctacagctgcttctggaccaagtacatgaaccacctgaccgtgcacaacagggaggtgctgtacgagctcatcgagaagcgaggcccggccacgcccctcatcaccgtgtccaatcaccagtcctgcatggacgaccctcatctctgggggatcctgaaactccgccacatctggaacctgaagttgatgcgttggtgaggaggaatgggcccctcgaagtgggccgggccggccccacctgcctctgcccagatttgccctcctcctgctctgcccaggaggtggcgtccagcagtccaggacccctgcagctgcagacatctgcttcaccaaggagctacactcccacttcttcagcttgggcaagtgtgtgcctgtgtgccgaggagatggcgtctaccagaaggggatggacttcattttggagaagctcaaccatggggactgggtgcatatcttcccagaagggaaagtgaacatgagttccgaattcctgcgtttcaagtggggaatcgggcgcctgattgctgagtgtcatctcaaccccatcatcctgcccctgtggcatgtcggaatgaatgacgtccttcctaacagtccgccctacttcccccgctttggacagaaaatcactgtgctgatcgggaagcccttcagtgccctgcctgtactcgagcggctccgggcggagaacaagtcggctgtggagatgcggaaagccctgacggacttcattcaagaggaattccagcatctgaagactcaggcagagcagctccacaaccacctccagcctgggagataggccttgcttgctgccttctggattcttggcccgcacagagctggggctgagggatggactgatgcttttagctcaaacgtggcttttagacagatttgttcatagaccctctcaagtgccctctccgagctggtaggcattccagctcctccgtgcttcctcagttacacaaaggacctcagctgcttctcccacttggccaagcagggaggaagaagcttaggcagggctctctttccttcttgccttcagatgttctctcccaggggctggcttcaggagggagcatagaaggcaggtgagcaaccagttggctaggggagcagggggcccaccagagctgtggagaggggaccctaagactcctcggcctggctcctacccaccgcccttgccgaaccaggagctgctcactacctcctcagggatggccgttggccacgtcttccttctgcctgagcttcccccccaccacaggccctttcctcaggcaaggtctggcctcaggtgggccgcaggcgggaaaagcagcccttggccagaagtcaagcccagccacgtggagcctagagtgagggcctgaggtctggctgcttgcccccatgctggcgccaacaacttctccatcctttctgcctctcaacatcacttgaatcctagggcctgggttttcatgtttttgaaacagaaccataaagcatatgtgttggcttgttgtaaaa

SEQ ID NO: 189070 - DNA, 1793 bp, Homo sapiens
  Payload ID: 17339
  Gene Symbol: TAZ
  Gene Name: tafazzin
  Uniprot ID: Q16635
  ENST ID: ENST00000612460
  CDS Start-End: 289-1077
ccgggccggggtgccagcgcccgccttcccgtttcctcccgttccgcagcgcgcccacggcctgtgaccccggcgaccgctccccagtgacgagagagcggggccgggcgctgctccggcctgacctgcgaagggacctcggtccagtcccctgttgcgccgcgcccccgtccgtccgtgcgcgggccagtcaggggccagtgtctcgagcggtcgaggtcgcagacctagaggcgccccacaggccggcccggggcgctgggagcgccggccgcgggccgggtggggatgcctctgcacgtgaagtggccgttccccgcggtgccgccgctcacctggaccctggccagcagcgtcgtcatgggcttggtgggcacctacagctgcttctggaccaagtacatgaaccacctgaccgtgcacaacagggaggtgctgtacgagctcatcgagaagcgaggcccggccacgcccctcatcaccgtgtccaatcaccagtcctgcatggacgaccctcatctctgggggatcctgaaactccgccacatctggaacctgaagttgatgcgttggacccctgcagctgcagacatctgcttcaccaaggagctacactcccacttcttcagcttgggcaagtgtgtgcctgtgtgccgaggagatggcgtctaccagaaggggatggacttcattttggagaagctcaaccatggggactgggtgcatatcttcccagaagggaaagtgaacatgagttccgaattcctgcgtttcaagtggggaatcgggcgcctgattgctgagtgtcatctcaaccccatcatcctgcccctgtggcatgtcggaatgaatgacgtccttcctaacagtccgccctacttcccccgctttggacagaaaatcactgtgctgatcgggaagcccttcagtgccctgcctgtactcgagcggctccgggcggagaacaagtcggctgtggagatgcggaaagccctgacggacttcattcaagaggaattccagcatctgaagactcaggcagagcagctccacaaccacctccagcctgggagataggccttgcttgctgccttctggattcttggcccgcacagagctggggctgagggatggactgatgcttttagctcaaacgtggcttttagacagatttgttcatagaccctctcaagtgccctctccgagctggtaggcattccagctcctccgtgcttcctcagttacacaaaggacctcagctgcttctcccacttggccaagcagggaggaagaagcttaggcagggctctctttccttcttgccttcagatgttctctcccaggggctggcttcaggagggagcatagaaggcaggtgagcaaccagttggctaggggagcagggggcccaccagagctgtggagaggggaccctaagactcctcggcctggctcctacccaccgcccttgccgaaccaggagctgctcactacctcctcagggatggccgttggccacgtcttccttctgcctgagcttcccccccaccacaggccctttcctcaggcaaggtctggcctcaggtgggccgcaggcgggaaaagcagcccttggccagaagtcaagcccagccacgtggagcctagagtgagggcctgaggtctggctgcttgcccccatgctggcgccaacaacttctccatcctttctgcctctcaacatcacttgaatcctagggcctgggttttcatgtttttgaaacagaaccataaagcatatgtgttggcttgtt

SEQ ID NO: 189071 - DNA, 770 bp, Homo sapiens
  Payload ID: 17339
  Gene Symbol: TAZ
  Gene Name: tafazzin
  ENST ID: ENST00000617701
  CDS Start-End: 283-570
cggggtgccagcgcccgccttcccgtttcctcccgttccgcagcgcgcccacggcctgtgaccccggcgaccgctccccagtgacgagagagcggggccgggcgctgctccggcctgacctgcgaagggacctcggtccagtcccctgttgcgccgcgcccccgtccgtccgtgcgcgggccagtcaggggccagtgtctcgagcggtcgaggtcgcagacctagaggcgccccacaggccggcccggggcgctgggagcgccggccgcgggccgggtggggatgcctctgcacgtgaagtggccgttccccgcggtgccgccgctcacctggaccctggccagcagcgtcgtcatgggcttggtgggcacctacagctgcttctggaccaagtacatgaaccacctgaccgtgcacaacagggaggtgctgtacgagctcatcgagaagcgaggcccggccacgcccctcatcaccgtgtccaatcaccagtcctgcatggacgaccctcatctctgggggatcctgaaactccgccacatctggaacctgaagttgatgcgttggtgaggaggaatgggcccctcgaagtgggccgggccggccccacctgcctctgcccagatttgccctcctcctgctctgcccaggaggtggcgtccagcagtccaggcagggcatggggacccctgcagctgcagacatctgcttcaccaaggagctacactcccacttcttcagcttgggcaagtgtgtgcctgtgtgccgag

SEQ ID NO: 189072 - DNA, 877 bp, Homo sapiens
  Payload ID: 17339
  Gene Symbol: TAZ
  Gene Name: tafazzin
  ENST ID: ENST00000612012
  CDS Start-End: 289-877
ccgggccggggtgccagcgcccgccttcccgtttcctcccgttccgcagcgcgcccacggcctgtgaccccggcgaccgctccccagtgacgagagagcggggccgggcgctgctccggcctgacctgcgaagggacctcggtccagtcccctgttgcgccgcgcccccgtccgtccgtgcgcgggccagtcaggggccagtgtctcgagcggtcgaggtcgcagacctagaggcgccccacaggccggcccggggcgctgggagcgccggccgcgggccgggtggggatgcctctgcacgtgaagtggccgttccccgcggtgccgccgctcacctggaccctggccagcagcgtcgtcatgggcttggtgggcacctacagctgcttctggaccagtgagtgggcccaggccgaggcaggcccgcccgggtacccatgcccggccggagagtacatgaaccacctgaccgtgcacaacagggaggtgctgtacgagctcatcgagaagcgaggcccggccacgcccctcatcaccgtgtccaatcaccagtcctgcatggacgaccctcatctctgggggatcctgaaactccgccacatctggaacctgaagttgatgcgttggacccctgcagctgcagacatctgcttcaccaaggagctacactcccacttcttcagcttgggcaagtgtgtgcctgtgtgccgaggagatggcgtctaccagaaggggatggacttcattttggagaagctcaaccatggggactgggtgcatatcttcccagaagggaaagtgaacatgagttccgaattcctgcgtttcaagtggggaatcgggcgcctgattgctgagtgtcatctcaaccccatca

SEQ ID NO: 189073 - DNA, 815 bp, Homo sapiens
  Payload ID: 17339
  Gene Symbol: TAZ
  Gene Name: tafazzin
  ENST ID: ENST00000616020
  CDS Start-End: 304-815
tttccggcggttgcaccgggccggggtgccagcgcccgccttcccgtttcctcccgttccgcagcgcgcccacggcctgtgaccccggcgaccgctccccagtgacgagagagcggggccgggcgctgctccggcctgacctgcgaagggacctcggtccagtcccctgttgcgccgcgcccccgtccgtccgtgcgcgggccagtcaggggccagtgtctcgagcggtcgaggtcgcagacctagaggcgccccacaggccggcccggggcgctgggagcgccggccgcgggccgggtggggatgcctctgcacgtgaagtggccgttccccgcggtgccgccgctcacctggaccctggccagcagcgtcgtcatgggcttggtgggcacctacagctgcttctggaccagtgagtgggcccaggccgaggcaggcccgcccgggtacccatgcccggccggagagtacatgaaccacctgaccgtgcacaacagggaggtgctgtacgagctcatcgagaagcgaggcccggccacgcccctcatcaccgtgtccaatcaccagtcctgcatggacgaccctcatctctgggggatcctgaaactccgccacatctggaacctgaagttgatgcgttggacccctgcagctgcagacatctgcttcaccaaggagctacactcccacttcttcagcttgggcaagtgtgtgcctgtgtgccgaggagcagaatttttccaagcagagaatgaggggaaaggtgttctagacacaggcaggcacatgccaggtgctggaaaaagaagagagaa

SEQ ID NO: 189074 - DNA, 8823 bp, Homo sapiens
  Payload ID: 17340
  Gene Symbol: TLN1
  Gene Name: talin 1
  Uniprot ID: Q9Y490
  ENST ID: ENST00000314888
  CDS Start-End: 355-7980
ggaagagttctagcctgaaagggaactcgggcgtcgtcctggcgtcctctccggattgcgccgcaccctcgcttcctgccagggaggggctgccgggctttggcggctcccgagcatcgagaacggggccagagcagcttcctgcctgccccccgcgaccatagagcgcgggcccagggcgccgcccgcgggtgggggacgttcccaggacggaagtggccgagagagtgtcgaagggagggcgaggccggagcccgagggcgacccgagaagcggcggggcggcgggccggcgggcggggcgcagagccaggcagcgcaggtatagccaggctggagaaaagaagctgccaccatggttgcactttcactgaagatcagcattgggaatgtggtgaagacgatgcagtttgagccgtctaccatggtgtacgacgcctgccgcatcattcgtgagcggatcccagaggccccagctggtcctcccagcgactttgggctctttctgtcagatgatgaccccaaaaagggtatatggctggaggctgggaaagctttggactactacatgctccgaaatggggacactatggagtacaggaagaaacagagacccctgaagatccgtatgctggatggaactgtgaagacgatcatggtggatgactctaagactgtcactgacatgctcatgaccatctgtgcccgcattggcatcaccaatcatgatgaatattcattggttcgagagctgatggaagagaaaaaggaggaaataacagggaccttaagaaaggacaagacattgctgcgagatgaaaagaagatggagaaactaaagcagaaattgcacacagatgatgagttgaactggctggaccatggtcggacactgagggagcagggtgtagaggagcacgagacgctgctgctgcggaggaagttcttttactcagaccagaatgtggattcccgggaccctgtacagctgaacctcctgtatgtgcaggcacgagatgacatcctgaatggctcccaccctgtctcctttgacaaggcctgtgagtttgctggcttccaatgccagatccagtttgggccccacaatgagcagaagcacaaggctggcttccttgacctgaaggacttcctgcccaaggagtatgtgaagcagaagggagagcgtaagatcttccaggcacacaagaattgtgggcagatgagtgagattgaggccaaggtccgctacgtgaagctagcccgttctctcaagacttacggtgtctccttcttcctggtgaaggaaaaaatgaaagggaagaacaagctagtgcccaggcttctgggcatcaccaaggagtgtgtgatgcgagtggatgagaagaccaaggaagtgatccaggagtggaacctcaccaacatcaaacgctgggctgcgtctcccaaaagcttcaccctggattttggagattaccaagatggctattactcagtacagacaactgaaggggagcagattgcacagctcattgccggctacatcgatatcatcctgaagaagaaaaaaagcaaggatcactttgggctggaaggagatgaggagtctactatgctggaggactcagtgtcccccaaaaagtcaacagtcctgcagcagcaatacaaccgggtggggaaagtggagcatggctctgtggccctgcctgccatcatgcgctctggagcctctggtcctgagaatttccaggtgggcagcatgccccctgcccagcagcagattaccagcggccagatgcaccgaggacacatgcctcctctgacttcagcccagcaggcactcactggaaccattaactccagcatgcaggccgtgcaggctgcccaggccaccctggatgactttgacactctgccgcctcttggccaggatgctgcctctaaggcctggcgtaaaaacaagatggatgaatcaaagcatgagatccactctcaggtagatgccatcacagctggtactgcgtctgtggtgaacctgacagcaggggaccctgctgagacagactataccgcagtgggctgtgcagtcaccacaatctcctccaacctgacggagatgtcccgtggggtgaagctgctggctgccttgctggaggacgaaggcggcagtggtcggcccctgttgcaggcagcaaagggccttgcgggagcagtgtcagaactgctgcgcagtgcccaaccagccagtgctgagccccgtcagaacctgctgcaagcagctgggaacgtgggccaggccagtggggagctgttgcaacaaattggggaaagtgatactgacccccacttccaggatgcgctaatgcagctcgccaaagctgtggcaagtgctgcagctgccctggtcctcaaggccaagagtgtggcccagcggacagaggactcgggacttcagacccaagttattgctgcagcaacacagtgtgccctatccacttcccaactagtggcctgtactaaggtggtggcacctacaatcagctcacctgtctgccaagagcaactggtggaggctggacgactggtagccaaagccgtggagggctgtgtgtctgcctcccaggcagctacagaggatgggcaactgttgcgaggggtaggagcagcagccacagctgtcacccaggccctaaatgagctgctgcagcatgtgaaagcccatgccacaggggctgggcctgctggccgttatgaccaggctactgacaccatcctaaccgtcactgagaacatctttagctccatgggtgatgctggggagatggtgcgacaggcccgcatcctggcccaagccacatctgacctggtcaatgccatcaaggctgatgctgagggggaaagtgatctggagaactcccgcaagctcttaagtgctgccaagatcctagctgatgccacagccaagatggtagaggctgccaagggagcagctgcccaccctgacagtgaggagcagcagcagcggctgcgggaggcagctgaggggctgcgcatggccaccaatgcagctgcgcagaatgccatcaagaaaaagctggtgcagcgcctggagcatgcagccaagcaggctgcagcctcagccacacagaccatcgctgcagctcagcacgcagcctctacccccaaggcctctgccggcccccagcccctgctggtgcagagctgcaaggcagtggcagagcagattccactgctggtgcagggcgtccgaggaagccaagcccagcctgacagccccagcgctcagcttgccctcattgctgccagccagagcttcctgcagccaggtgggaagatggtggcagctgcaaaggcctcagtgccaacgattcaggaccaggcttcagccatgcagctgagtcagtgtgccaagaacctgggcaccgcgctggctgaactccggacggctgcccagaaggctcaggaagcatgtggacctttggagatggattctgcactgagtgtggtacagaatctagagaaagatctacaggaagtgaaggcagcagctcgagatggcaagcttaaacccttacctggggagacaatggagaagtgtacccaggacctgggcaacagcaccaaagccgtgagctcagccatcgcccagctactgggagaggttgcccagggcaatgagaattatgcaggtattgcagctcgggatgtggcaggtgggctgcggtcactggcccaggccgctaggggagtcgctgcactgacgtcagatcctgcagtgcaggccattgtacttgatacggccagtgatgtgctggacaaggccagcagcctcattgaggaggcgaaaaaggcagctggccatccaggggaccctgagagccagcagcggcttgcccaggtggctaaagcagtgacccaggctctgaaccgctgtgtcagctgcctacctggccagcgcgatgtggataatgccctgagggcagttggagatgccagcaagcgactcctgagtgactcgcttcctcctagcactgggacatttcaagaagctcagagccggttgaatgaagctgctgctgggctgaatcaggcagccacagaactggtgcaggcctctcggggaacccctcaggacctggctcgagcctcaggccgatttggacaggacttcagcaccttcctggaagctggtgtggagatggcaggccaggctccgagccaggaggaccgagcccaagttgtgtccaacttgaagggcatctccatgtcttcaagcaaacttcttctggctgccaaggccctgtccacggaccctgctgcccctaacctcaagagtcagctggctgcagctgccagggcagtaactgacagcatcaatcagctcatcactatgtgcacccagcaggcacccggccagaaggagtgtgataacgccctgcgggaattggagacggtccgggaactcctggagaacccagtccagcccatcaatgacatgtcctactttggttgcctggacagtgtaatggagaactcaaaggtgctgggcgaggccatgactggcatctcccaaaatgccaagaacggaaacctgccagagtttggagatgccatttccacagcctcaaaggcactttgtggcttcaccgaggcagctgcacaggctgcatatctggttggtgtctctgaccccaatagccaagctggacagcaagggctagtggagcccacacagtttgcccgtgcaaaccaggcaattcagatggcctgccagagtttgggagagcctggctgtacccaggcccaggtgctctctgcagccaccattgtggctaaacacacctctgcactgtgtaacagctgtcgcctggcttctgcccgtaccaccaatcctactgccaagcgccagtttgtacagtcagccaaggaggtggccaacagcacagctaatcttgtcaagaccatcaaggcgctagatggggccttcacagaggagaaccgtgcccagtgccgagcagcaacagcccctctgctggaggctgtggacaatctgagtgcctttgcgtccaaccctgagttctccagcattcctgcccagatcagccctgagggtcgggctgccatggagcccattgtgatctctgccaagacaatgttagagagtgccgggggactcatccagacagcccgggccctcgcagtcaatccccgggaccccccgagctggtcggtgctggccggccactcccgtactgtctcagactccatcaagaagctaattacaagcatgagggacaaggctccagggcagctggagtgtgaaacggccattgcagctctgaacagttgtctacgggacctagaccaggcttccctcgctgcagtcagccagcagcttgctccccgtgagggaatctctcaagaggccttgcacactcagatgctcactgcagtccaagagatctcccatctcattgagccgctggccaatgctgcccgggctgaagcctcccagctgggacacaaggtgtcccagatggcgcagtactttgagccgctcaccctggctgcagtgggtgctgcctccaagaccctgagccacccgcagcagatggcactcctggaccagactaaaacattggcagagtctgccctgcagttgctatacactgccaaggaggctggtggtaacccaaagcaagcagctcacacccaggaagccctggaggaggctgtgcagatgatgaccgaggccgtagaggacctgacaacaaccctcaacgaggcagccagtgctgctggggtcgtgggtggcatggtggactccatcacccaggccatcaaccagctagatgaaggaccaatgggtgaaccagaaggttccttcgtggattaccaaacaactatggtgcggacagccaaggccattgcagtgaccgttcaggagatggttaccaagtcaaacaccagcccagaggagctgggccctcttgctaaccagctgaccagtgactatggccgtctggcctcggaggccaagcctgcagcggtggctgctgaaaatgaagagataggttcccatatcaaacaccgggtacaggagctgggccatggctgtgccgctctggtcaccaaggcaggcgccctgcagtgcagccccagtgatgcctacaccaagaaggagctcatagagtgtgcccggagagtctctgagaaggtctcccacgtcctggctgcgctccaggctgggaatcgtggcacccaggcctgcatcacagcagccagcgctgtgtctggtatcattgctgacctcgacaccaccatcatgttcgccactgctggcacgctcaatcgtgagggtactgaaactttcgctgaccaccgggagggcatcctgaagactgcgaaggtgctggtggaggacaccaaggtcctggtgcaaaacgcagctgggagccaggagaagttggcgcaggctgcccagtcctccgtggcgaccatcacccgcctcgctgatgtggtcaagctgggtgcagccagcctgggagctgaggaccctgagacccaggtggtactaatcaacgcagtgaaagatgtagccaaagccctgggagacctcatcagtgcaacgaaggctgcagctggcaaagttggagatgaccctgctgtgtggcagctaaagaactctgccaaggtgatggtgaccaatgtgacatcattgcttaagacagtaaaagccgtggaagatgaggccaccaaaggcactcgggccctggaggcaaccacagaacacatacggcaggagctggcggttttctgttccccagagccacctgccaagacctctaccccagaagacttcatccgaatgaccaagggtatcaccatggcaaccgccaaggccgttgctgctggcaattcctgtcgccaggaagatgtcattgccacagccaatctgagccgccgtgctattgcagatatgcttcgggcttgcaaggaagcagcttaccacccagaagtggcccctgatgtgcggcttcgagccctgcactatggccgggagtgtgccaatggctacctggaactgctggaccatgtactgctgaccctgcagaagccaagcccagaactgaagcagcagttgacaggacattcaaagcgtgtggctggttccgtcactgagctcatccaggctgctgaagccatgaagggaacagaatgggtagacccagaggaccccacagtcattgctgagaatgagctcctgggagctgcagccgccattgaggctgcagccaaaaagctagagcagctgaagccccgggccaaacccaaggaggcagatgagtccttgaactttgaggagcagatactagaagctgccaagtccattgcagcagccaccagtgcactggtaaaggctgcgtcggctgcccagagagaactagtggcccaagggaaggtgggtgccattccagccaatgcactggacgatgggcagtggtcccagggcctcatttctgctgcccggatggtggctgcggccaccaacaatctgtgtgaggcagccaatgcagctgtacaaggccatgccagccaggagaagctcatctcatcagccaagcaggtagctgcctccacagcccagctccttgtggcctgcaaggtcaaggctgaccaggactcggaggcaatgaaacgacttcaggctgctggcaacgcagtgaagcgagcctcagataatctggtgaaagcagcacagaaggctgcagcctttgaagagcaggagaatgagacagtggtggtgaaagagaagatggttggcggcattgcccagatcatcgcagcacaggaagaaatgcttcggaaggaacgagagctggaagaggcgcggaagaaactggcccagatccggcagcagcagtacaagtttctgccttcagagcttcgagatgagcactaaagaagcctcttctatttaatgcagacccggcccagagactgtgcgtgccactaccaaagccttctgggctgtcggggcccaacctgcccaaccccagcactccccaaagtgcctgccaaaccccagggcctggccccgcccagtcccgcagtacatcccctgtcccctccccaaccccaagtgccttcatgccctagggccccccaagtgcctgcccctccccagagtattaacgctccaagagtattattaacgctgctgtacctcgatctgaatctgccggggccccagcccactccaccctgccagcagcttccggccagtccccacagcctcatcagctctcttcaccgttttttgatactatcttcccccacccccagctacccataggggctgcagagttataagccccaaacaggtcatgctccaataaaaatgattctacctacaacctctgcctggcttcaagggagatacaagttttctcccagggcagtaggagagacagtggggttgaattctgtcacccagcttgatccagcttgaaatgggagaggggaagactggcagtctgcacctgaggtcccttcctccttgcacccggaccctaaagttatccaatggggaagttgtgcctgagaagtcatactcctgttatcctcacctccctggccagcacctaagcctcacaaagtgtcgttctgctgctgctgggacagcagctaccacagttccttgtggctaccaggacattctgttcttcatagctactcagggtatgtcaacaaatccagtccttgaccaaattcaaattttcaaaagaagctttgctaaaaataa

SEQ ID NO: 189075 - DNA, 11650 bp, Homo sapiens
  Payload ID: 17341
  Gene Symbol: TLN2
  Gene Name: talin 2
  Uniprot ID: Q9Y4G6
  ENST ID: ENST00000306829
  CDS Start-End: 1-7629
atggtggccctgtccttaaagatttgtgtgcgccactgcaacgtggtgaagaccatgcagtttgaaccatctacagctgtgtacgatgcgtgtcgagtcattcgggaacgggtgcctgaggcacaaactgggcaagcttctgactatggactctttctttcggatgaagacccgaggaaagggatttggctggaagcgggcagaacactggattactacatgttgcggaatggggatattttggaatataaaaagaaacagagacctcagaaaatccggatgctggatggatctgtgaagacagtgatggtggatgattccaagactgtgggggagctcctggtcactatttgtagcagaataggaataacaaattatgaagaatactccttaatccaagaaactattgaagaaaagaaagaggaaggaacgggcacactcaaaaaagacaggacactgttacgagatgagaggaaaatggagaagttgaaggccaagctgcacacagatgatgacctaaattggctggatcacagccgaacattcagagaacaaggagtagatgaaaacgaaacgttgctgcttagacggaagttcttttactctgatcagaatgtagattcgagagaccccgtgcagctgaacttgctttatgttcaggcacgggatgacatcctgaatggctctcaccctgtctccttcgagaaagcttgtgagtttggtggatttcaagcccagatacaatttggacctcatgtggaacataaacacaaacctggatttttagatctgaaggaattcctgcccaaagaatatatcaagcagagaggagctgaaaagaggatctttcaggagcataagaactgcggagagatgagtgagatagaagccaaggtcaagtacgtcaaactcgcacggtccctccgcacatatggcgtgtccttcttcctggtgaaggagaagatgaaaggcaagaacaagctggtgcctcgcctgctggggatcaccaaagactcggtgatgcgcgtggatgagaagaccaaggaagtgctgcaggagtggcccctcaccaccgtcaagcgctgggcagcctcacccaagagcttcacactggattttggggagtatcaggaaagctactattcagtacaaaccaccgagggagagcagatatcccagctgattgcaggctacattgacatcatcctgaaaaagaaacaaagtaaagatcgatttggactagaaggtgatgaggagtcaaccatgttagaagagtccgtttccccaaaaaagtccaccatcttgcagcagcagttcaaccggaccgggaaggcagagcacggctcagtggcgctgccggccgtgatgcgctcgggctccagcgggcctgagaccttcaacgttggcagcatgccctcgccacagcagcaggtcatggttgggcagatgcaccgaggccacatgccgccactgacctcagcccagcaggccctgatggggaccatcaacacaagcatgcacgccgtccagcaggcccaggatgatctcagtgagctcgactcgctgccacctctcggccaggatatggcatctagggtatgggttcagaacaaagtcgacgaatccaaacacgaaatccattctcaagttgatgctatcacggccggaacggcttcagttgttaacctcacagctggtgaccctgcagacactgactacacagctgtgggatgtgcgatcaccactatttcttccaacctgacggagatgtccaagggtgtgaagctattggccgccctcatggatgatgaggtgggcagcggggaggacttgctcagagctgccaggaccctcgctggggcggtgtcagacttgctgaaagctgtgcagcctacttctggagagcctcgacagacagttttgactgctgctggcagcatcggacaagccagtggggatcttctgagacagattggagagaatgagactgatgagcgattccaggatgttttaatgagtttggccaaagctgttgccaatgcagctgccatgttggtactaaaggcaaagaatgttgcccaagtggccgaagacactgtcctacagaacagggtaattgctgctgccacccagtgtgccctctccacctcccagcttgtggcatgtgccaaggttgtgagccccactattagctcccctgtgtgccaggagcagctgattgaagcagggaagctggtggaccgctcggtggagaactgtgtccgtgcctgccaggcggccactaccgatagtgagctcctgaagcaggtcagcgcagcggccagcgtggtcagccaggccctccatgatctcctgcagcatgtgcggcagtttgccagccgaggcgagcccatcggccgctacgaccaggctactgacaccatcatgtgtgtcaccgagagcatcttcagctccatgggtgacgctggtgaaatggtgcgccaggcgcgggttctggcccaagccacatcagacctcgtcaatgccatgaggtcagatgcagaagccgaaatcgacatggagaattcaaagaagctcctggcagcagcaaaactcttagctgactccactgctcgcatggtggaagctgcaaagggggctgcagccaacccagagaatgaggaccagcagcaaaggctgagagaagctgcagaaggcctccgggtagcaaccaacgcagctgcccagaatgctattaagaaaaaaattgtcaaccgactggaggttgcagccaagcaggccgcagcggcagccacacagaccatcgccgcctcccagaatgcagctgtttccaacaagaaccctgcggcccagcagcagctggtccagagttgcaaggcagtggctgatcacatccctcagctggtccagggagtgagggggagccaagctcaagctgaagacctgagtgcccagctggctctcatcatctccagccagaacttcctccagcctggaagcaagatggtgtcctctgccaaagccgcagtgcccaccgtgagtgaccaggccgcagccatgcagctgagccagtgtgccaagaacctggccaccagcttggcggagctgcgtaccgcctcgcagaaggcccatgaagcttgtggtccgatggaaatcgattcagctctgaatacggtgcagacgcttaagaatgaactgcaggatgccaagatggcagccgtggagagccagctgaagccacttccaggggaaacgctggaaaaatgtgctcaggacctgggaagcacatccaaggcggtgggctcctccatggcacagctgctgacctgtgctgctcaaggcaacgaacactacacaggggtggctgctagagagacggcccaagctctgaaaacactggcccaggccgcccgtggagtggctgcatcgacaaccgaccccgcggccgcccatgccatgttagattctgctcgagacgtgatggagggctccgccatgctcattcaagaggccaagcaggccctgattgcacctggagatgcagagcgtcaacaaagactggctcaggtggctaaagccgtctcacactccttgaataactgcgtaaattgcctccctgggcagaaggatgtggacgtggccttgaagagcatcggggagtccagcaagaagctgcttgtggattcgctacctccaagcacgaagcctttccaggaagcccagagtgaactgaaccaggcagcagctgatctgaaccagtctgctggggaagtggtccatgccacccggggccagagtggagagttggctgcagcctctggaaagttcagtgatgattttgatgaattcctcgatgctggcattgagatggctggccaagctcagacaaaagaagaccagatccaagtgatagggaacctcaagaatatctcgatggcatccagcaagctgctgttagctgccaagtctctctctgtagatccaggagctcccaatgcgaaaaatctcctggctgcagctgcaagagctgtgacagagagcatcaatcaactcatcactctgtgtacccaacaagctccgggccagaaagagtgcgataatgccctgcgggagctcgagactgtgaaggggatgttggacaatcctaatgaacctgttagtgacctctcttactttgactgcattgagagtgtgatggaaaactccaaggttctgggtgaatcgatggcagggatttcacagaatgccaagaccggagacctccctgcctttggggaatgtgtggggattgcatccaaggctctctgtgggctgacagaggctgcagcccaggctgcatacttggttggcatctctgatccaaacagccaggcaggccaccagggcctggtggaccccatccagtttgccagggctaaccaggccatccagatggcatgccagaacttggtggaccctggcagcagcccatcacaggtcctgtcagccgccacaattgttgccaagcacacgtcagccttgtgcaatgcctgccgcatcgcctcatccaagacggccaacccagtagccaagaggcacttcgtccagtcagccaaggaagtcgccaacagcactgccaacctggtgaagaccatcaaggccctggatggggatttctctgaagacaaccgcaataagtgtcgcatcgccaccgcacccttgattgaagctgtggagaacctgacagcgttcgcctcaaaccctgagtttgtcagcattcctgcccagatcagctccgagggttcccaggcacaggaaccaatcctggtctcagccaagaccatgctggagagttcatcgtacctcattcgcactgcacgctctctggccatcaaccccaaagacccacccacctggtctgtactggctggacattcccatacagtgtccgactccatcaagagtctcatcacttctatcagggacaaggcccctggacagagggagtgtgattactccatcgatggcatcaaccggtgcatccgggacatcgagcaggcctcgctggccgccgtcagccagagcctggccacgagggacgacatctctgtggaggccctgcaggagcagctgacttcggtggtccaggaaatcggacaccttatcgatcccatcgccacagcggctcggggagaagcagctcagctgggacataaggtgacacaactggcaagctattttgagcccttgatcttagccgcagttggtgtggcctccaagattcttgatcatcagcagcagatgacggtgctggaccagaccaagactctcgcagagtctgccttgcagatgttgtatgcagccaaagaaggtggcggaaaccccaaggcacaacacacccatgacgccatcacagaggccgcccagttgatgaaggaagccgtggatgacatcatggtgacgctgaacgaagctgccagtgaagtggggctggttgggggcatggtggacgccattgcagaagccatgagcaagctggatgaaggcactcctccagaaccaaagggaacatttgtcgactatcagacgactgtggttaaatactccaaagccattgcggtgacagctcaggaaatgatgactaagtcggttactaacccggaggagttgggaggactggcttcacaaatgaccagtgactatgggcacctggctttccagggccagatggcagcagccacggcggaaccagaggagatcggattccagattcgcactcgtgtgcaggacctgggccacggctgtatcttcctggtgcagaaggcaggggccctccaggtctgccccacagacagctacaccaagagggagctgatcgaatgcgcccgtgccgtcacggaaaaggtctccttggtgctctcggctctccaggccgggaacaaaggaacccaggcatgcattacagccgccaccgctgtgtctgggatcattgccgacctggacaccaccattatgtttgcaacagcggggacgctgaatgcagagaacagtgagaccttcgcagaccacagggagaacattctcaagacggccaaggccttggtagaagacacgaaactacttgtgtcaggagctgcgtccactcctgacaagctggcccaggcggcccagtcctcagcagccaccatcacccagctcgcagaagtggtcaagctgggggcagccagcctgggctccgacgaccccgagacccaggtggttttgatcaatgccatcaaagatgtggccaaggccctttctgatctcatcagtgctaccaagggagctgccagcaagccagtggacgacccttccatgtaccagctcaagggggctgccaaggtgatggtgaccaatgtcacctcgctcctcaagactgtaaaggcagtggaggatgaggccacccggggcaccagggcgcttgaggccacaattgaatgcataaagcaggagcttacggtgttccagtcaaaagacgtacctgaaaagacatcatcacctgaagaatccataaggatgacgaaaggcatcaccatggcaacagccaaagccgtggcagctgggaactcatgtagacaggaggacgtgattgctactgccaacctgagccggaaagccgtgtcagatatgttgacggcttgcaagcaagcatccttccaccccgatgtcagtgacgaggtgagaaccagagccttgcgtttcgggacggagtgcacccttggctacttggacctcctggagcacgtcttggtgattcttcagaaaccaaccccagaattcaagcagcagctggccgctttctccaagcgagtcgccggcgctgtgacagagctcatccaggcggcggaagccatgaaaggaacagagtgggtggatccagaagacccaactgtcattgcagaaacagagttactgggggctgcagcatccatcgaagctgctgctaagaagttagagcaactgaagccaagagcaaaaccaaaacaagcggatgagaccctggactttgaggaacagatcttggaagctgctaaatccattgctgctgccacaagcgccctggtcaaatcggcctcagcagcccagagggagctggtggcccaaggaaaggtgggctccatccctgccaatgctgcagacgacggacagtggtcacaggggctgatttctgctgcccggatggtggcggctgcgaccagcagtctctgtgaggcggccaatgcctccgttcagggacacgccagcgaggagaagctcatctcatctgccaagcaggtcgccgcttccacggctcagctgctggtggcctgcaaggtgaaggccgaccaggattcagaggccatgaggcggctacaggcggcaggaaatgctgtgaaaagagcctcagacaatcttgtccgtgcagcccagaaggcagcttttggcaaagctgatgacgacgatgttgtagtgaaaaccaagtttgtggggggcattgctcagatcatcgccgcccaggaagaaatgctaaagaaagagcgagaactggaagaagcaaggaaaaaactggcccaaatccgccagcagcagtataagtttttacccaccgagctgagggaagatgagggctaaaggtgcgagcccagatggcgagccccaggggatggccctggctgaactggacagacagtgttcctgagaggctgggcacttagctggaaaccgcccacctccctcccgggtgagcctggagccctgcgtgcttgttctcacatctctgtcccgtcggcactggctgcatgatcgtgatgtcacacggtacaatgtcctacccacaactcctctgccgcctcccctcatgcctcaccgtgtctcaggagagaggggtgcacgtttcatggactgttaccaacaaagaaaagtcagtattatgttgttctcagacactttggcttttgttggtccttctcttaggcctgctcctggacctctttatgatattgtgatagggaaaaaaatcattgacgtcatagaatattcttcttcctctcaggagaagacggaagctggagttggacatggttcataaaagccagaaacacaaacccgtgtggactccgggagggtgactcaggtcctccttccatgtcttgagcactggctcacccagggggtgaaaaattcccgcccctgtttgcacgctttcttgcctccgtgtgtaagctccttgtacaacccagacccatcttgtattttgtggcccagaaaactgaacgattattttgttcctccgtagtccaaagggcagagttgcggaaggccgtcggggcttggtgagcaggggctgtaatacagtctgtgggctccttaccctgcagaggctgtttcagctcacacagagtcatccacacaaacccacggctcccagttgacagtcagtggaatgctcgtctccttagcgtccagggtggggattctgctggaataaagagcttcctcagtgactcatctttaggtcccacgctggtttctgtgccttcagaatggtcacaagcccggattggaaaggatctgcttacaaacctgtcccctgtcctccaacccaaaacgcctttttttctgtcttaatatccagaaaatctaaatgcatcctaaaatcaatgtgaacctttaacaagatagttttacttattatcacataagacataagatgttttcattttctggatgtcacacttccagaatttcatatttttcccctcttttctttccccttttcagagccctcccataggaagggaagggcttgaatttacccttaatctgcacctttagccaaggcagtgcatggaagatgaatggctcgtgggacagaatctaatgccagggagcaggagtgtttgaaagaattcatagtggggaaggtaaaagttaatggaagtacatgattttcaaaactggtaacagttaaaggcactcaccctccgcctctctctctctctctctctctggtgtgctatcatgtcttggactccatccacactatagtttcaaagttccactgacgggggaaagttggtgctttggtcctccgaagatgtcacctttcgaccttgcccgatcttgtttcaccagactctagcccatgtcatggttttaaaatacataaacttctgacagcttcccatatttataagttacttataagtgctgcacgtattagaatttttttttttcagaccagtaaagttagagaaaagacgctgtaaaggaaaagcaagtgagagtatgtgtaggacactgacagtgtgtgggcaccagttctgaagaggaggggagctgctggagccctagcctgttggggaaaagctggcacactcttggctcgccctctttgagtggagctgatccaacacctcatgcctgccttggccggacactgagaggaggggcacacgtgcttccagagacactcaggagtcagaccccaatgctcagagtcacaatgtgttcatggcctcctgtaacaggactctggggatcccctctgtggcccagcccaccccaccctctgctcttctatgctgtgcccagggcagctgccctcttctgcctgtgccccatcccatcctgaaaacccaggaccaaggcaggggcaggcagccagttcttccaccttgcctcagagtcatttaaaacctttactgcatttgataccagaaaagcctccagagacaaaccaaatgcaaaggcctttcctttataactctaaagaacaggcatcgaaagtttatttttgtaggagctatataaatactcacctttctggagtcgtccagtgctgggagctttggggagtttggttctcagttatcacctggtatggtcccagtttctcatctgtcctttcctcatccaccctgcacatgtgtatgtgaacggcttcgtggccggtgtggtggtttctcatttcataagatagttgaagggccatgccttgtctggatgttatttaataggcactactgcggtgtcctcagatggtactgagggggccttctggtccttcaaaggaaaataacacaggcatgagttcatttgggagtgtgaactttcagaacacctaataagagagtggtgtcagagtaaaaacggccccaggtctggagcatagaagtgtatctctgtgaagagagagccggtgtgttgacatgtggttcttctcacacccctctactcctcgagggctttgaatccttgggctgatttttgtgccagaaattgctgttcccgatggccaaaaggggaacctgaactggatttcagaactgcccagtgatttgaaaatttagattttacttgggcctttcaggagtctttagatagggatgctgaggtcatatttagttcaatgaacagcccttgtttaagttttgccagtgtccagccagctgtggccctggccatctgtgcaggcaggttcctcaattcctggttggccctgcagtcggtcaacacagtccctccaggtcggctgcagaggcagctgcccagcctgcagtctatgcacgggccttaagaaatgagctgcctgtagcctcacggcatatgcttttatcagggaaaacccttcgagcttcttctgattctcacctgcttgctttctggctgtcttagtcagtgtgtttacaggcaactaaagcctgttcctaatttatcaaaaaattataaccaaaattcaccatagcctaagagagtaaaccccacctccaaagtgatgccaaggccaaaacctcatcaaggaaccagacacaggtcaaaagtggtgagcaagccatggtctctgctcctggggaactcacacgctgacccccgaggagccttggtttcctccctggcagatagtccccagaatcttctctcccagctttgaggttctgggctctggaaaggcctctgggatgctggccttaagatctcagcacagactatcagcatgttccattctcagattcctggaggaaaggtaccctctgttgaccaaggggctggctgcttctgagacttaccaacccaagaaatttggagacattcccctcaggctaaaaggcagcggtccccagagttcagaaagcaaaagatcttgacaactgtgccagtagtggctctggtcctatctctccacagtgctggcctctgctggggaaggcatctttcccaaaggtatccccaagtaccatgttgaaaatgtcctcagtctgttgctccatctttctgagcctctgcttggtatgtcatgtttatggtcactacggatgagtgtgtgcagagtttgggttgattcttttaaatgctacaaacaagagctatttcttttcaataaaaaaggtttggattcggcctcttcctctgagcccacctcccagccctccagggagcatcagtgtacctgagtcactttgtctgcatctcttcatcccacaaaacacgaggctgggtctcattcagcggcctctcaccaaccttcaagatccagaagaaaacaggaacgttcagctctgccctgtgtcgtatctaatcacatacattaatttatctaaccacataagttatttttttttatttgccagaaataaacctttaaaggaacaaa

SEQ ID NO: 189076 - DNA, 11880 bp, Homo sapiens
  Payload ID: 17341
  Gene Symbol: TLN2
  Gene Name: talin 2
  Uniprot ID: Q9Y4G6
  ENST ID: ENST00000561311
  CDS Start-End: 231-7859
cttcatttcctcaagctccctccttaacagctaacgccttcgcgagaggagctgagggccctatgcggaataattaagatgccttctttagggtctctgccttggggccattttacaggtgctgcaggaggcttctcacatgctttgggatatcttcagggaaatacgctcttaatagaaactgagaatttaagacattctaagtgagactgtccacatcatctaggaaaatggtggccctgtccttaaagatttgtgtgcgccactgcaacgtggtgaagaccatgcagtttgaaccatctacagctgtgtacgatgcgtgtcgagtcattcgggaacgggtgcctgaggcacaaactgggcaagcttctgactatggactctttctttcggatgaagacccgaggaaagggatttggctggaagcgggcagaacactggattactacatgttgcggaatggggatattttggaatataaaaagaaacagagacctcagaaaatccggatgctggatggatctgtgaagacagtgatggtggatgattccaagactgtgggggagctcctggtcactatttgtagcagaataggaataacaaattatgaagaatactccttaatccaagaaactattgaagaaaagaaagaggaaggaacgggcacactcaaaaaagacaggacactgttacgagatgagaggaaaatggagaagttgaaggccaagctgcacacagatgatgacctaaattggctggatcacagccgaacattcagagaacaaggagtagatgaaaacgaaacgttgctgcttagacggaagttcttttactctgatcagaatgtagattcgagagaccccgtgcagctgaacttgctttatgttcaggcacgggatgacatcctgaatggctctcaccctgtctccttcgagaaagcttgtgagtttggtggatttcaagcccagatacaatttggacctcatgtggaacataaacacaaacctggatttttagatctgaaggaattcctgcccaaagaatatatcaagcagagaggagctgaaaagaggatctttcaggagcataagaactgcggagagatgagtgagatagaagccaaggtcaagtacgtcaaactcgcacggtccctccgcacatatggcgtgtccttcttcctggtgaaggagaagatgaaaggcaagaacaagctggtgcctcgcctgctggggatcaccaaagactcggtgatgcgcgtggatgagaagaccaaggaagtgctgcaggagtggcccctcaccaccgtcaagcgctgggcagcctcacccaagagcttcacactggattttggggagtatcaggaaagctactattcagtacaaaccaccgagggagagcagatatcccagctgattgcaggctacattgacatcatcctgaaaaagaaacaaagtaaagatcgatttggactagaaggtgatgaggagtcaaccatgttagaagagtccgtttccccaaaaaagtccaccatcttgcagcagcagttcaaccggaccgggaaggcagagcacggctcagtggcgctgccggccgtgatgcgctcgggctccagcgggcctgagaccttcaacgttggcagcatgccctcgccacagcagcaggtcatggttgggcagatgcaccgaggccacatgccgccactgacctcagcccagcaggccctgatggggaccatcaacacaagcatgcacgccgtccagcaggcccaggatgatctcagtgagctcgactcgctgccacctctcggccaggatatggcatctagggtatgggttcagaacaaagtcgacgaatccaaacacgaaatccattctcaagttgatgctatcacggccggaacggcttcagttgttaacctcacagctggtgaccctgcagacactgactacacagctgtgggatgtgcgatcaccactatttcttccaacctgacggagatgtccaagggtgtgaagctattggccgccctcatggatgatgaggtgggcagcggggaggacttgctcagagctgccaggaccctcgctggggcggtgtcagacttgctgaaagctgtgcagcctacttctggagagcctcgacagacagttttgactgctgctggcagcatcggacaagccagtggggatcttctgagacagattggagagaatgagactgatgagcgattccaggatgttttaatgagtttggccaaagctgttgccaatgcagctgccatgttggtactaaaggcaaagaatgttgcccaagtggccgaagacactgtcctacagaacagggtaattgctgctgccacccagtgtgccctctccacctcccagcttgtggcatgtgccaaggttgtgagccccactattagctcccctgtgtgccaggagcagctgattgaagcagggaagctggtggaccgctcggtggagaactgtgtccgtgcctgccaggcggccactaccgatagtgagctcctgaagcaggtcagcgcagcggccagcgtggtcagccaggccctccatgatctcctgcagcatgtgcggcagtttgccagccgaggcgagcccatcggccgctacgaccaggctactgacaccatcatgtgtgtcaccgagagcatcttcagctccatgggtgacgctggtgaaatggtgcgccaggcgcgggttctggcccaagccacatcagacctcgtcaatgccatgaggtcagatgcagaagccgaaatcgacatggagaattcaaagaagctcctggcagcagcaaaactcttagctgactccactgctcgcatggtggaagctgcaaagggggctgcagccaacccagagaatgaggaccagcagcaaaggctgagagaagctgcagaaggcctccgggtagcaaccaacgcagctgcccagaatgctattaagaaaaaaattgtcaaccgactggaggttgcagccaagcaggccgcagcggcagccacacagaccatcgccgcctcccagaatgcagctgtttccaacaagaaccctgcggcccagcagcagctggtccagagttgcaaggcagtggctgatcacatccctcagctggtccagggagtgagggggagccaagctcaagctgaagacctgagtgcccagctggctctcatcatctccagccagaacttcctccagcctggaagcaagatggtgtcctctgccaaagccgcagtgcccaccgtgagtgaccaggccgcagccatgcagctgagccagtgtgccaagaacctggccaccagcttggcggagctgcgtaccgcctcgcagaaggcccatgaagcttgtggtccgatggaaatcgattcagctctgaatacggtgcagacgcttaagaatgaactgcaggatgccaagatggcagccgtggagagccagctgaagccacttccaggggaaacgctggaaaaatgtgctcaggacctgggaagcacatccaaggcggtgggctcctccatggcacagctgctgacctgtgctgctcaaggcaacgaacactacacaggggtggctgctagagagacggcccaagctctgaaaacactggcccaggccgcccgtggagtggctgcatcgacaaccgaccccgcggccgcccatgccatgttagattctgctcgagacgtgatggagggctccgccatgctcattcaagaggccaagcaggccctgattgcacctggagatgcagagcgtcaacaaagactggctcaggtggctaaagccgtctcacactccttgaataactgcgtaaattgcctccctgggcagaaggatgtggacgtggccttgaagagcatcggggagtccagcaagaagctgcttgtggattcgctacctccaagcacgaagcctttccaggaagcccagagtgaactgaaccaggcagcagctgatctgaaccagtctgctggggaagtggtccatgccacccggggccagagtggagagttggctgcagcctctggaaagttcagtgatgattttgatgaattcctcgatgctggcattgagatggctggccaagctcagacaaaagaagaccagatccaagtgatagggaacctcaagaatatctcgatggcatccagcaagctgctgttagctgccaagtctctctctgtagatccaggagctcccaatgcgaaaaatctcctggctgcagctgcaagagctgtgacagagagcatcaatcaactcatcactctgtgtacccaacaagctccgggccagaaagagtgcgataatgccctgcgggagctcgagactgtgaaggggatgttggacaatcctaatgaacctgttagtgacctctcttactttgactgcattgagagtgtgatggaaaactccaaggttctgggtgaatcgatggcagggatttcacagaatgccaagaccggagacctccctgcctttggggaatgtgtggggattgcatccaaggctctctgtgggctgacagaggctgcagcccaggctgcatacttggttggcatctctgatccaaacagccaggcaggccaccagggcctggtggaccccatccagtttgccagggctaaccaggccatccagatggcatgccagaacttggtggaccctggcagcagcccatcacaggtcctgtcagccgccacaattgttgccaagcacacgtcagccttgtgcaatgcctgccgcatcgcctcatccaagacggccaacccagtagccaagaggcacttcgtccagtcagccaaggaagtcgccaacagcactgccaacctggtgaagaccatcaaggccctggatggggatttctctgaagacaaccgcaataagtgtcgcatcgccaccgcacccttgattgaagctgtggagaacctgacagcgttcgcctcaaaccctgagtttgtcagcattcctgcccagatcagctccgagggttcccaggcacaggaaccaatcctggtctcagccaagaccatgctggagagttcatcgtacctcattcgcactgcacgctctctggccatcaaccccaaagacccacccacctggtctgtactggctggacattcccatacagtgtccgactccatcaagagtctcatcacttctatcagggacaaggcccctggacagagggagtgtgattactccatcgatggcatcaaccggtgcatccgggacatcgagcaggcctcgctggccgccgtcagccagagcctggccacgagggacgacatctctgtggaggccctgcaggagcagctgacttcggtggtccaggaaatcggacaccttatcgatcccatcgccacagcggctcggggagaagcagctcagctgggacataaggtgacacaactggcaagctattttgagcccttgatcttagccgcagttggtgtggcctccaagattcttgatcatcagcagcagatgacggtgctggaccagaccaagactctcgcagagtctgccttgcagatgttgtatgcagccaaagaaggtggcggaaaccccaaggcacaacacacccatgacgccatcacagaggccgcccagttgatgaaggaagccgtggatgacatcatggtgacgctgaacgaagctgccagtgaagtggggctggttgggggcatggtggacgccattgcagaagccatgagcaagctggatgaaggcactcctccagaaccaaagggaacatttgtcgactatcagacgactgtggttaaatactccaaagccattgcggtgacagctcaggaaatgatgactaagtcggttactaacccggaggagttgggaggactggcttcacaaatgaccagtgactatgggcacctggctttccagggccagatggcagcagccacggcggaaccagaggagatcggattccagattcgcactcgtgtgcaggacctgggccacggctgtatcttcctggtgcagaaggcaggggccctccaggtctgccccacagacagctacaccaagagggagctgatcgaatgcgcccgtgccgtcacggaaaaggtctccttggtgctctcggctctccaggccgggaacaaaggaacccaggcatgcattacagccgccaccgctgtgtctgggatcattgccgacctggacaccaccattatgtttgcaacagcggggacgctgaatgcagagaacagtgagaccttcgcagaccacagggagaacattctcaagacggccaaggccttggtagaagacacgaaactacttgtgtcaggagctgcgtccactcctgacaagctggcccaggcggcccagtcctcagcagccaccatcacccagctcgcagaagtggtcaagctgggggcagccagcctgggctccgacgaccccgagacccaggtggttttgatcaatgccatcaaagatgtggccaaggccctttctgatctcatcagtgctaccaagggagctgccagcaagccagtggacgacccttccatgtaccagctcaagggggctgccaaggtgatggtgaccaatgtcacctcgctcctcaagactgtaaaggcagtggaggatgaggccacccggggcaccagggcgcttgaggccacaattgaatgcataaagcaggagcttacggtgttccagtcaaaagacgtacctgaaaagacatcatcacctgaagaatccataaggatgacgaaaggcatcaccatggcaacagccaaagccgtggcagctgggaactcatgtagacaggaggacgtgattgctactgccaacctgagccggaaagccgtgtcagatatgttgacggcttgcaagcaagcatccttccaccccgatgtcagtgacgaggtgagaaccagagccttgcgtttcgggacggagtgcacccttggctacttggacctcctggagcacgtcttggtgattcttcagaaaccaaccccagaattcaagcagcagctggccgctttctccaagcgagtcgccggcgctgtgacagagctcatccaggcggcggaagccatgaaaggaacagagtgggtggatccagaagacccaactgtcattgcagaaacagagttactgggggctgcagcatccatcgaagctgctgctaagaagttagagcaactgaagccaagagcaaaaccaaaacaagcggatgagaccctggactttgaggaacagatcttggaagctgctaaatccattgctgctgccacaagcgccctggtcaaatcggcctcagcagcccagagggagctggtggcccaaggaaaggtgggctccatccctgccaatgctgcagacgacggacagtggtcacaggggctgatttctgctgcccggatggtggcggctgcgaccagcagtctctgtgaggcggccaatgcctccgttcagggacacgccagcgaggagaagctcatctcatctgccaagcaggtcgccgcttccacggctcagctgctggtggcctgcaaggtgaaggccgaccaggattcagaggccatgaggcggctacaggcggcaggaaatgctgtgaaaagagcctcagacaatcttgtccgtgcagcccagaaggcagcttttggcaaagctgatgacgacgatgttgtagtgaaaaccaagtttgtggggggcattgctcagatcatcgccgcccaggaagaaatgctaaagaaagagcgagaactggaagaagcaaggaaaaaactggcccaaatccgccagcagcagtataagtttttacccaccgagctgagggaagatgagggctaaaggtgcgagcccagatggcgagccccaggggatggccctggctgaactggacagacagtgttcctgagaggctgggcacttagctggaaaccgcccacctccctcccgggtgagcctggagccctgcgtgcttgttctcacatctctgtcccgtcggcactggctgcatgatcgtgatgtcacacggtacaatgtcctacccacaactcctctgccgcctcccctcatgcctcaccgtgtctcaggagagaggggtgcacgtttcatggactgttaccaacaaagaaaagtcagtattatgttgttctcagacactttggcttttgttggtccttctcttaggcctgctcctggacctctttatgatattgtgatagggaaaaaaatcattgacgtcatagaatattcttcttcctctcaggagaagacggaagctggagttggacatggttcataaaagccagaaacacaaacccgtgtggactccgggagggtgactcaggtcctccttccatgtcttgagcactggctcacccagggggtgaaaaattcccgcccctgtttgcacgctttcttgcctccgtgtgtaagctccttgtacaacccagacccatcttgtattttgtggcccagaaaactgaacgattattttgttcctccgtagtccaaagggcagagttgcggaaggccgtcggggcttggtgagcaggggctgtaatacagtctgtgggctccttaccctgcagaggctgtttcagctcacacagagtcatccacacaaacccacggctcccagttgacagtcagtggaatgctcgtctccttagcgtccagggtggggattctgctggaataaagagcttcctcagtgactcatctttaggtcccacgctggtttctgtgccttcagaatggtcacaagcccggattggaaaggatctgcttacaaacctgtcccctgtcctccaacccaaaacgcctttttttctgtcttaatatccagaaaatctaaatgcatcctaaaatcaatgtgaacctttaacaagatagttttacttattatcacataagacataagatgttttcattttctggatgtcacacttccagaatttcatatttttcccctcttttctttccccttttcagagccctcccataggaagggaagggcttgaatttacccttaatctgcacctttagccaaggcagtgcatggaagatgaatggctcgtgggacagaatctaatgccagggagcaggagtgtttgaaagaattcatagtggggaaggtaaaagttaatggaagtacatgattttcaaaactggtaacagttaaaggcactcaccctccgcctctctctctctctctctctctggtgtgctatcatgtcttggactccatccacactatagtttcaaagttccactgacgggggaaagttggtgctttggtcctccgaagatgtcacctttcgaccttgcccgatcttgtttcaccagactctagcccatgtcatggttttaaaatacataaacttctgacagcttcccatatttataagttacttataagtgctgcacgtattagaatttttttttttcagaccagtaaagttagagaaaagacgctgtaaaggaaaagcaagtgagagtatgtgtaggacactgacagtgtgtgggcaccagttctgaagaggaggggagctgctggagccctagcctgttggggaaaagctggcacactcttggctcgccctctttgagtggagctgatccaacacctcatgcctgccttggccggacactgagaggaggggcacacgtgcttccagagacactcaggagtcagaccccaatgctcagagtcacaatgtgttcatggcctcctgtaacaggactctggggatcccctctgtggcccagcccaccccaccctctgctcttctatgctgtgcccagggcagctgccctcttctgcctgtgccccatcccatcctgaaaacccaggaccaaggcaggggcaggcagccagttcttccaccttgcctcagagtcatttaaaacctttactgcatttgataccagaaaagcctccagagacaaaccaaatgcaaaggcctttcctttataactctaaagaacaggcatcgaaagtttatttttgtaggagctatataaatactcacctttctggagtcgtccagtgctgggagctttggggagtttggttctcagttatcacctggtatggtcccagtttctcatctgtcctttcctcatccaccctgcacatgtgtatgtgaacggcttcgtggccggtgtggtggtttctcatttcataagatagttgaagggccatgccttgtctggatgttatttaataggcactactgcggtgtcctcagatggtactgagggggccttctggtccttcaaaggaaaataacacaggcatgagttcatttgggagtgtgaactttcagaacacctaataagagagtggtgtcagagtaaaaacggccccaggtctggagcatagaagtgtatctctgtgaagagagagccggtgtgttgacatgtggttcttctcacacccctctactcctcgagggctttgaatccttgggctgatttttgtgccagaaattgctgttcccgatggccaaaaggggaacctgaactggatttcagaactgcccagtgatttgaaaatttagattttacttgggcctttcaggagtctttagatagggatgctgaggtcatatttagttcaatgaacagcccttgtttaagttttgccagtgtccagccagctgtggccctggccatctgtgcaggcaggttcctcaattcctggttggccctgcagtcggtcaacacagtccctccaggtcggctgcagaggcagctgcccagcctgcagtctatgcacgggccttaagaaatgagctgcctgtagcctcacggcatatgcttttatcagggaaaacccttcgagcttcttctgattctcacctgcttgctttctggctgtcttagtcagtgtgtttacaggcaactaaagcctgttcctaatttatcaaaaaattataaccaaaattcaccatagcctaagagagtaaaccccacctccaaagtgatgccaaggccaaaacctcatcaaggaaccagacacaggtcaaaagtggtgagcaagccatggtctctgctcctggggaactcacacgctgacccccgaggagccttggtttcctccctggcagatagtccccagaatcttctctcccagctttgaggttctgggctctggaaaggcctctgggatgctggccttaagatctcagcacagactatcagcatgttccattctcagattcctggaggaaaggtaccctctgttgaccaaggggctggctgcttctgagacttaccaacccaagaaatttggagacattcccctcaggctaaaaggcagcggtccccagagttcagaaagcaaaagatcttgacaactgtgccagtagtggctctggtcctatctctccacagtgctggcctctgctggggaaggcatctttcccaaaggtatccccaagtaccatgttgaaaatgtcctcagtctgttgctccatctttctgagcctctgcttggtatgtcatgtttatggtcactacggatgagtgtgtgcagagtttgggttgattcttttaaatgctacaaacaagagctatttcttttcaataaaaaaggtttggattcggcctcttcctctgagcccacctcccagccctccagggagcatcagtgtacctgagtcactttgtctgcatctcttcatcccacaaaacacgaggctgggtctcattcagcggcctctcaccaaccttcaagatccagaagaaaacaggaacgttcagctctgccctgtgtcgtatctaatcacatacattaatttatctaaccacataagttatttttttttatttgccagaaataaacctttaaaggaacaaa

SEQ ID NO: 189077 - DNA, 5155 bp, Homo sapiens
  Payload ID: 17341
  Gene Symbol: TLN2
  Gene Name: talin 2
  ENST ID: ENST00000494733
  CDS Start-End: 1-4416
gaaaaatgtgctcaggacctgggaagcacatccaaggcggtgggctcctccatggcacagctgctgacctgtgctgctcaaggcaacgaacactacacaggggtggctgctagagagacggcccaagctctgaaaacactggcccaggccgcccgtggagtggctgcatcgacaaccgaccccgcggccgcccatgccatgttagattctgctcgagacgtgatggagggctccgccatgctcattcaagaggccaagcaggccctgattgcacctggagatgcagagcgtcaacaaagactggctcaggtggctaaagccgtctcacactccttgaataactgcgtaaattgcctccctgggcagaaggatgtggacgtggccttgaagagcatcggggagtccagcaagaagctgcttgtggattcgctacctccaagcacgaagcctttccaggaagcccagagtgaactgaaccaggcagcagctgatctgaaccagtctgctggggaagtggtccatgccacccggggccagagtggagagttggctgcagcctctggaaagttcagtgatgattttgatgaattcctcgatgctggcattgagatggctggccaagctcagacaaaagaagaccagatccaagtgatagggaacctcaagaatatctcgatggcatccagcaagctgctgttagctgccaagtctctctctgtagatccaggagctcccaatgcgaaaaatctcctggctgcagctgcaagagctgtgacagagagcatcaatcaactcatcactctgtgtacccaacaagctccgggccagaaagagtgcgataatgccctgcgggagctcgagactgtgaaggggatgttggacaatcctaatgaacctgttagtgacctctcttactttgactgcattgagagtgtgatggaaaactccaaggttctgggtgaatcgatggcagggatttcacagaatgccaagaccggagacctccctgcctttggggaatgtgtggggattgcatccaaggctctctgtgggctgacagaggctgcagcccaggctgcatacttggttggcatctctgatccaaacagccaggcaggccaccagggcctggtggaccccatccagtttgccagggctaaccaggccatccagatggcatgccagaacttggtggaccctggcagcagcccatcacaggtcctgtcagccgccacaattgttgccaagcacacgtcagccttgtgcaatgcctgccgcatcgcctcatccaagacggccaacccagtagccaagaggcacttcgtccagtcagccaaggaagtcgccaacagcactgccaacctggtgaagaccatcaaggccctggatggggatttctctgaagacaaccgcaataagtgtcgcatcgccaccgcacccttgattgaagctgtggagaacctgacagcgttcgcctcaaaccctgagtttgtcagcattcctgcccagatcagctccgagggttcccaggcacaggaaccaatcctggtctcagccaagaccatgctggagagttcatcgtacctcattcgcactgcacgctctctggccatcaaccccaaagacccacccacctggtctgtactggctggacattcccatacagtgtccgactccatcaagagtctcatcacttctatcagggacaaggcccctggacagagggagtgtgattactccatcgatggcatcaaccggtgcatccgggacatcgagcaggcctcgctggccgccgtcagccagagcctggccacgagggacgacatctctgtggaggccctgcaggagcagctgacttcggtggtccaggaaatcggacaccttatcgatcccatcgccacagcggctcggggagaagcagctcagctgggacataaggtgacacaactggcaagctattttgagcccttgatcttagccgcagttggtgtggcctccaagattcttgatcatcagcagcagatgacggtgctggaccagaccaagactctcgcagagtctgccttgcagatgttgtatgcagccaaagaaggtggcggaaaccccaaggcacaacacacccatgacgccatcacagaggccgcccagttgatgaaggaagccgtggatgacatcatggtgacgctgaacgaagctgccagtgaagtggggctggttgggggcatggtggacgccattgcagaagccatgagcaagctggatgaaggcactcctccagaaccaaagggaacatttgtcgactatcagacgactgtggttaaatactccaaagccattgcggtgacagctcaggaaatgatgactaagtcggttactaacccggaggagttgggaggactggcttcacaaatgaccagtgactatgggcacctggctttccagggccagatggcagcagccacggcggaaccagaggagatcggattccagattcgcactcgtgtgcaggacctgggccacggctgtatcttcctggtgcagaaggcaggggccctccaggtctgccccacagacagctacaccaagagggagctgatcgaatgcgcccgtgccgtcacggaaaaggtctccttggtgctctcggctctccaggccgggaacaaaggaacccaggcatgcattacagccgccaccgctgtgtctgggatcattgccgacctggacaccaccattatgtttgcaacagcggggacgctgaatgcagagaacagtgagaccttcgcagaccacagggagaacattctcaagacggccaaggccttggtagaagacacgaaactacttgtgtcaggagctgcgtccactcctgacaagctggcccaggcggcccagtcctcagcagccaccatcacccagctcgcagaagtggtcaagctgggggcagccagcctgggctccgacgaccccgagacccaggtggttttgatcaatgccatcaaagatgtggccaaggccctttctgatctcatcagtgctaccaagggagctgccagcaagccagtggacgacccttccatgtaccagctcaagggggctgccaaggtgatggtgaccaatgtcacctcgctcctcaagactgtaaaggcagtggaggatgaggccacccggggcaccagggcgcttgaggccacaattgaatgcataaagcaggagcttacggtgttccagtcaaaagacgtacctgaaaagacatcatcacctgaagaatccataaggatgacgaaaggcatcaccatggcaacagccaaagccgtggcagctgggaactcatgtagacaggaggacgtgattgctactgccaacctgagccggaaagccgtgtcagatatgttgacggcttgcaagcaagcatccttccaccccgatgtcagtgacgaggtgagaaccagagccttgcgtttcgggacggagtgcacccttggctacttggacctcctggagcacgtcttggtgattcttcagaaaccaaccccagaattcaagcagcagctggccgctttctccaagcgagtcgccggcgctgtgacagagctcatccaggcggcggaagccatgaaaggaacagagtgggtggatccagaagacccaactgtcattgcagaaacagagttactgggggctgcagcatccatcgaagctgctgctaagaagttagagcaactgaagccaagagcaaaaccaaaacaagcggatgagaccctggactttgaggaacagatcttggaagctgctaaatccattgctgctgccacaagcgccctggtcaaatcggcctcagcagcccagagggagctggtggcccaaggaaaggtgggctccatccctgccaatgctgcagacgacggacagtggtcacaggggctgatttctgctgcccggatggtggcggctgcgaccagcagtctctgtgaggcggccaatgcctccgttcagggacacgccagcgaggagaagctcatctcatctgccaagcaggtcgccgcttccacggctcagctgctggtggcctgcaaggtgaaggccgaccaggattcagaggccatgaggcggctacaggtaatggtcactgatgctggtgggaaaatactcctgttggagcgggcggcaggaaatgctgtgaaaagagcctcagacaatcttgtccgtgcagcccagaaggcagcttttggcaaagctgatgacgacgatgttgtagtgaaaaccaagtttgtggggggcattgctcagatcatcgccgcccaggaagaaatgctaaagaaagagcgagaactggaagaagcaaggaaaaaactggcccaaatccgccagcagcagtataagtttttacccaccgagctgagggaagatgagggctaaaggtgcgagcccagatggcgagccccaggggatggccctggctgaactggacagacagtgttcctgagaggctgggcacttagctggaaaccgcccacctccctcccgggtgagcctggagccctgcgtgcttgttctcacatctctgtcccgtcggcactggctgcatgatcgtgatgtcacacggtacaatgtcctacccacaactcctctgccgcctcccctcatgcctcaccgtgtctcaggagagaggggtgcacgtttcatggactgttaccaacaaagaaaagtcagtattatgttgttctcagacactttggcttttgttggtccttctcttaggcctgctcctggacctctttatgatattgtgatagggaaaaaaatcattgacgtcatagaatattcttcttcctctcaggagaagacggaagctggagttggacatggttcataaaagccagaaacacaaacccgtgtggactccgggagggtgactcaggtcctccttccatgtcttgagcactggctcacccagggggtgaaaaattcccgcccctgtttgcacgctttcttgcctccgtgtgtaagctccttgtacaacccagacccatcttgtattttgtggcccagaaaactgaacgattattttgttcctccgtagtccaaagggcagagttgcggaaggccgtcggggcttggtgagcaggggctgtaatacagtctgtgggctccttac

SEQ ID NO: 189078 - DNA, 2116 bp, Homo sapiens
  Payload ID: 17341
  Gene Symbol: TLN2
  Gene Name: talin 2
  ENST ID: ENST00000472902
  CDS Start-End: 254-1246
gcaattaagcactttcagtgtgtaccacagacacccgatccagctctctttaatcgaatttgacttggctgccctggatggggatttctctgaagacaaccgcaataagtgtcgcatcgccaccgcacccttgattgaagctgtggagaacctgacagcgttcgcctcaaaccctgagtttgtcagcattcctgcccagatcagctccgagggttcccaggcacaggaaccaatcctggtctcagccaagaccatgctggagagttcatcgtacctcattcgcactgcacgctctctggccatcaaccccaaagacccacccacctggtctgtactggctggacattcccatacagtgtccgactccatcaagagtctcatcacttctatcagggacaaggcccctggacagagggagtgtgattactccatcgatggcatcaaccggtgcatccgggacatcgagcaggcctcgctggccgccgtcagccagagcctggccacgagggacgacatctctgtggaggccctgcaggagcagctgacttcggtggtccaggaaatcggacaccttatcgatcccatcgccacagcggctcggggagaagcagctcagctgggacataaggtgacacaactggcaagctattttgagcccttgatcttagccgcagttggtgtggcctccaagattcttgatcatcagcagcagatgacggtgctggaccagaccaagactctcgcagagtctgccttgcagatgttgtatgcagccaaagaaggtggcggaaaccccaaggcacaacacacccatgacgccatcacagaggccgcccagttgatgaaggaagccgtggatgacatcatggtgacgctgaacgaagctgccagtgaagtggggctggttgggggcatggtggacgccattgcagaagccatgagcaagctggatgaaggcactcctccagaaccaaagggaacatttgtcgactatcagacgactgtggttaaatactccaaagccattgcggtgacagctcaggaaatgatgactaagtcggttactaacccggaggagttgggaggactggcttcacaaatgaccagtgactatgggcacctggctttccagggccagatggcagcagccacggcggaaccagaggaggtctgccaccttaagacccctattttaagatgcacacacacactggtgcccactcctgggtatttcttcatagcttagctccactctggaagaccccagcccagtaaccagagcccagtttatttccccaccactgcacagcacaggtccagaccaggtagccccaggctgtactcaagtctcactgccccttatggggcagactggccaagaactggggcatgggctttcagacagaaggactttgtatacagtgttctatcaggtcccctgtccctagccctgtcacctgtctcttttagcatgcccaagcttgggactgccatcttatcacttcctactccagttagcacatcccccgcaattatttttgttttccataggttcacagaagtgttgaaagattcaagtatgaaaattagctatccctctccctcgaaagagctactttcatgaaacaaagtcttgcctgaatattctgggtggctaagaattagcccagacatacctcctgtggactccttttattacttccctgcctttcctagaccagctttccttagtggccagtgtagacttggctttagaatgcctgtacccgtaagagtctaacggtagccaaagttgggccccaaaggccactttctaagagctgccatctctcatacttctaatggggtggtccattgggaaggacacaggtcatgtgtggctccaaggagctttgtagcatctatatcagtgtgaacacatagaaggagtccagggcttgggggaaccacatggcttcttagagaaaggaagcccaatttaaaatgaagattaatggagtggattacagggacacttaaaagataaaagtaattatattctgtgaaattcagcaagctgtttattgagcgcaaaccatgttcgagacgttcctaaatgaactgagttgtcaaggca

SEQ ID NO: 189079 - DNA, 1297 bp, Homo sapiens
  Payload ID: 17342
  Gene Symbol: TAMM41
  Gene Name: TAM41 mitochondrial translocator assembly and maintenance homolog
  Uniprot ID: Q96BW9
  ENST ID: ENST00000273037
  CDS Start-End: 284-1234
gaagcgcctgtgcgtgcgtggggcgtagcaagggacggaagctctgcctgtgcgaccgccgcccacccgagcctatctgggctgcgtcttctcgccgctgctcttcgtggcccaacgccccaatccttgcgtgtgcttgcagtcccaccccacactcagccttgtgtccctcgatccagtctccgacttccatttcccaccctaaaccgcctacccggtgtctgttccccgcccggttgtcctcgccctgctgcgctgagtgtcccctgttagcctcgaccccatggcgctgcagacgctgcagagctcgtgggtgaccttccgcaagatcctgtctcacttccccgaggagctgagtctggctttcgtctacggctccggggtgtaccgccaggcagggccgagttcagaccagaagaatgctatgctggactttgtgttcacagtagatgaccctgtcgcatggcattcaaagaacctgaagaaaaattggagtcactactctttcctaaaagttttagggcccaagattatcacgtccatccagaataactatggcgctggagtttactacaattcattgatcatgtgtaatggtaggcttatcaaatatggagttattagcactaacgttctgattgaagatctcctcaactggaataacttatacattgctggacgactccaaaaaccggtgaaaattatctcagtgaacgaggatgtcactcttagatcagccctcgatagaaatctgaagagtgctgtgaccgctgctttcctcatgctccccgaaagcttttctgaagaagacctcttcatagagattgccggtctctcctattcaggtgactttcggatggtggttggagaagataaaacaaaagtgttgaatattgtgaagcccaatatagcccactttcgagagctctatggcagcatactacaggaaaatcctcaagtggtgtataaaagccagcaaggctggctggagatagataaaagcccagaaggacagttcactcagctgatgacattgcccaaaaccttacagcaacagataaatcatattatggaccctcctggaaaaaacagagatgtggaagaaactttattccaagtggctcatgatcccgactgtggagatgtggtgcgactaggcctgaagaagtcagtgatttatagttcactaaaactgcacaaaatgtggaaagggtggctgaggaaaacatcctgattttgcttgcttttatatatgttatgtgtagatgaataaagtgtttgatcctttttgacagaa

SEQ ID NO: 189080 - DNA, 1619 bp, Homo sapiens
  Payload ID: 17342
  Gene Symbol: TAMM41
  Gene Name: TAM41 mitochondrial translocator assembly and maintenance homolog
  Uniprot ID: Q96BW9
  ENST ID: ENST00000444133
  CDS Start-End: 144-1502
agtcccaccccacactcagccttgtgtccctcgatccagtctccgacttccatttcccaccctaaaccgcctacccggtgtctgttccccgcccggttgtcctcgccctgctgcgctgagtgtcccctgttagcctcgaccccatggcgctgcagacgctgcagagctcgtgggtgaccttccgcaagatcctgtctcacttccccgaggagctgagtctggctttcgtctacggctccggggtgtaccgccaggcagggccgagttcagaccagaagaatgctatgctggactttgtgttcacagtagatgaccctgtcgcatggcattcaaagaacctgaagaaaaattggagtcactactctttcctaaaagttttagggcccaagattatcacgtccatccagaataactatggcgctggagtttactacaattcattgatcatgtgtaatggtaggcttatcaaatatggagttattagcactaacgttctgattgaagatctcctcaactggaataacttatacattgctggacgactccaaaaaccggtgaaaattatctcagtgaacgaggatgtcactcttagatcagccctcgatagaaatctgaagagtgctgtgaccgctgctttcctcatgctccccgaaagcttttctgaagaagacctcttcatagagattgccggtctctcctattcaggtgactttcggatggtggttggagaagataaaacaaaagtgttgaatattgtgaagcccaatatagcccactttcgagagctctatggcagcatactacaggaaaatcctcaagtggtgtataaaagccagcaaggctggctggagatagataaaagcccagaaggacagttcactcagctgatgacattgcccaaaaccttacagcaacagataaatcatattatggaccctcctggaaaaaacagagatgtggaagaaactttattccaagtggctcatgatcccgactgtggagatgtggtgcgactagggctttcagcaatcgtgagaccgtctagtataagacagagcacgaaaggcatttttactgctggtaagagctttggaaatccgtgtgtaacatacctgctgactgagtggcttccacactcttggttacagtgtaaagctttgtatcttttaggtgcttgtgaaatgctgagctttgatggccataaactgggatattgcagtaaggtacaaacaggcataacagcagcagaacctggtggtcgaacaatgtcagaccattggcagtgctgttggaagctttactgcccttctgaattttctgagacacttcctgtgtgcagggtttttccctcatattgttttatttatcaaagttacagatgcataggattgcaaaaacagcagcatctgtgctccccctcctcttccccttctctgagacaactgcttccatctgtcttagtgggttatttttgttgttactgccatttctctaaatggtaagttttcgttgctccttctctacgtttcaactttaggtatcatctattgacttctctctatgggaggttagaagtcaactctggcacccaccctcatcaaatgtacgcaccctcccat

SEQ ID NO: 189081 - DNA, 992 bp, Homo sapiens
  Payload ID: 17342
  Gene Symbol: TAMM41
  Gene Name: TAM41 mitochondrial translocator assembly and maintenance homolog
  ENST ID: ENST00000417723
  CDS Start-End: 250-573
acggaagctctgcctgtgcgaccgccgcccacccgagcctatctgggctgcgtcttctcgccgctgctcttcgtggcccaacgccccaatccttgcgtgtgcttgcagtcccaccccacactcagccttgtgtccctcgatccagtctccgacttccatttcccaccctaaaccgcctacccggtgtctgttccccgcccggttgtcctcgccctgctgcgctgagtgtcccctgttagcctcgaccccatggcgctgcagacgctgcagagctcgtgggtgaccttccgcaagatcctgtctcacttccccgaggagctgagtctggctttcgtctacggctccggggtgtaccgccaggcagggccgagttcagaccagaagtcatatctgacggcagcttccagaacatgctggctcccatatccacagagcactttcctccaacacggctccctacccttccctgtgcttcccccagtgcttccagcaagtctgtttaactcacgtgtccttcaagactcagatttgtcatctctaggagaatttctccctcctgtgcccctgatctgatccctatgctgagtgcaaatgctatgctggactttgtgttcacagtagatgaccctgtcgcatggcattcaaagaacctgaagaaaaattggagtcactactctttcctaaaagttttagggcccaagattatcacgtccatccagaataactatggcgctggagtttactacaattcattgatcatgtgtaatggtaggcttatcaaatatggagttattagcactaacgttctgattgaagatctcctcaactggaataacttatacattgctggacgactccaaaaaccggcctctctggcagtgtcccaagagttcactggcttttcactctgaacaacaaataacagtgctgctgagacaagttcctagttcacctttcattgaagaaccagatcagcacagtagcagaatctt

SEQ ID NO: 189082 - DNA, 1078 bp, Homo sapiens
  Payload ID: 17342
  Gene Symbol: TAMM41
  Gene Name: TAM41 mitochondrial translocator assembly and maintenance homolog
  ENST ID: ENST00000411947
  CDS Start-End: 257-712
gcaagggacggaagctctgcctgtgcgaccgccgcccacccgagcctatctgggctgcgtcttctcgccgctgctcttcgtggcccaacgccccaatccttgcgtgtgcttgcagtcccaccccacactcagccttgtgtccctcgatccagtctccgacttccatttcccaccctaaaccgcctacccggtgtctgttccccgcccggttgtcctcgccctgctgcgctgagtgtcccctgttagcctcgaccccatggcgctgcagacgctgcagagctcgtgggtgaccttccgcaagatcctgtctcacttccccgaggagctgagtctggctttcgtctacggctccggggtgtaccgccaggcagggccgagttcagaccagaagaatgctatgctggactttgtgttcacagtagatgaccctgtcgcatggcattcaaagaacctgaagaaaaattggagtcactactctttcctaaaagttttagggcccaagattatcacgtccatccagaataactatggcgctggagtttactacaattcattgatcatgtgtaatggtaggcttatcaaatatggagttattagcactaacgttctgattgaagatctcctcaactggaataacttatacattgctggacgactccaaaaaccggcctctctggcagtgtcccaagagttcactggcttttcactctgaacaacaaataacagtgctgctgagacaagttcctagttcacctttcattgaagaaccagatcagcacagtagcagaatcttccgaactgacatttttcctttgaggtctcaactgtgtctttcaggctggagtgtagtgtcatgatcatggctcactgcaacccactgcagcctcaaccacctggactgaagctgtcttcctacctcaacctcctgagtatctgggaccacacatgtgcatcactgtgcctggctaggtgaaaattatctcagtgaacgaggatgtcactcttagatcagccctcgatagaaatctgaagagtgctgtgaccgctgctttcctcatgctccccgaaagcttttctg

SEQ ID NO: 189083 - DNA, 1213 bp, Homo sapiens
  Payload ID: 17342
  Gene Symbol: TAMM41
  Gene Name: TAM41 mitochondrial translocator assembly and maintenance homolog
  Uniprot ID: Q96BW9
  ENST ID: ENST00000455809
  CDS Start-End: 137-1150
ccccacactcagccttgtgtccctcgatccagtctccgacttccatttcccaccctaaaccgcctacccggtgtctgttccccgcccggttgtcctcgccctgctgcgctgagtgtcccctgttagcctcgaccccatggcgctgcagacgctgcagagctcgtgggtgaccttccgcaagatcctgtctcacttccccgaggagctgagtctggctttcgtctacggctccggggtgtaccgccaggcagggccgagttcagaccagaagaatgctatgctggactttgtgttcacagtagatgaccctgtcgcatggcattcaaagaacctgaagaaaaattggagtcactactctttcctaaaagttttagggcccaagattatcacgtccatccagaataactatggcgctggagtttactacaattcattgatcatgtgtaatggtaggcttatcaaatatggagttattagcactaacgttctgattgaagatctcctcaactggaataacttatacattgctggacgactccaaaaaccggtgaaaattatctcagtgaacgaggatgtcactcttagatcagccctcgatagaaatctgaagagtgctgtgaccgctgctttcctcatgctccccgaaagcttttctgaagaagacctcttcatagagattgccggtctctcctattcaggtgactttcggatggtggttggagaagataaaacaaaagtgttgaatattgtgaagcccaatatagcccactttcgagagctctatggcagcatactacaggaaaatcctcaagtggtgtataaaagccagcaaggctggctggagatagataaaagcccagaaggacagttcactcagctgatgacattgcccaaaaccttacagcaacagataaatcatattatggaccctcctggaaaaaacagagatgtggaagaaactttattccaagtggctcatgatcccgactgtggagatgtggtgcgactagggctttcagcaatcgtgagaccgtctagtataagacagagcacgaaaggcatttttactgctggcctgaagaagtcagtgatttatagttcactaaaactgcacaaaatgtggaaagggtggctgaggaaaacatcctgattttgcttgcttttatatatgttatgtgtagatgaataaagtgtttgatcctttttgacagaa

SEQ ID NO: 189084 - DNA, 648 bp, Homo sapiens
  Payload ID: 17342
  Gene Symbol: TAMM41
  Gene Name: TAM41 mitochondrial translocator assembly and maintenance homolog
  ENST ID: ENST00000414736
  CDS Start-End: 1-167
gtgactttcggatggtggttggagaagataaaacaaaagtgttgaatattgtgaagcccaatatagcccactttcgagagctctatggcagcatactacaggaaaatcctcaagtggtgtataaaagccagcaaggctggctggaggtaactgtatgtggaaaatagcttgtattgtttctaagacaaaggctatttgcaggaagaaagtcaggggtagaacagcatgactggtgtgagaacatttatagtttaaaaaagccggatatctcactcttttgctagggctgatgttgaatttttgtgctcaagcaattctcctgcctcagcctcccaaactgttgggattacaggtgtgaacctgtgctcctggcccatttgatagataaaagcccagaaggacagttcactcagctgatgacattgcccaaaaccttacagcaacagataaatcatattatggaccctcctggaaaaaacagagatgtggaagaaactttattccaagtggctcatgatcccgactgtggagatgtggtgcgactagggctttcagcaatcgtgagaccgtctagtataagacagagcacgaaaggcatttttactgctggcctgaagaagtcagtgatttatagttcactaaaactgc

SEQ ID NO: 189085 - DNA, 2558 bp, Homo sapiens
  Payload ID: 17342
  Gene Symbol: TAMM41
  Gene Name: TAM41 mitochondrial translocator assembly and maintenance homolog
  ENST ID: ENST00000457498
  CDS Start-End: 246-701
aagctctgcctgtgcgaccgccgcccacccgagcctatctgggctgcgtcttctcgccgctgctcttcgtggcccaacgccccaatccttgcgtgtgcttgcagtcccaccccacactcagccttgtgtccctcgatccagtctccgacttccatttcccaccctaaaccgcctacccggtgtctgttccccgcccggttgtcctcgccctgctgcgctgagtgtcccctgttagcctcgaccccatggcgctgcagacgctgcagagctcgtgggtgaccttccgcaagatcctgtctcacttccccgaggagctgagtctggctttcgtctacggctccggggtgtaccgccaggcagggccgagttcagaccagaagaatgctatgctggactttgtgttcacagtagatgaccctgtcgcatggcattcaaagaacctgaagaaaaattggagtcactactctttcctaaaagttttagggcccaagattatcacgtccatccagaataactatggcgctggagtttactacaattcattgatcatgtgtaatggtaggcttatcaaatatggagttattagcactaacgttctgattgaagatctcctcaactggaataacttatacattgctggacgactccaaaaaccggcctctctggcagtgtcccaagagttcactggcttttcactctgaacaacaaataacagtgctgctgagacaagttcctagttcacctttcattgaagaaccagatcagcacagtagcagaatcttccgaactgacatttttcctttgagtgaaaattatctcagtgaacgaggatgtcactcttagatcagccctcgatagaaatctgaagagtgctgtgaccgctgctttcctcatgctccccgaaagcttttctgaagaagacctcttcatagagattgccggtctctcctattcaggtgactttcggatggtggttggagaagataaaacaaaagtgttgaatattgtgaagcccaatatagcccactttcgagagctctatggcagcatactacaggaaaatcctcaagtggtgtataaaagccagcaaggctggctggagatagataaaagcccagaaggacagttcactcagctgatgacattgcccaaaaccttacagcaacagataaatcatattatggaccctcctggaaaaaacagagatgtggaagaaactttattccaagtggctcatgatcccgactgtggagatgtggtgcgactaggtacgtttatgaatttgatgttgaggaaatgccagccatggggaaaagcagactttgtttgtgattggaatgtattatttcttcctttttgtttagcgagatagagagattgcctctcagaagaagaaagcactaaaaatttgagggttttctaaatctgcatttttatttgtttgaagtaagatggtgaaaatacttctgtttttaaattcctggatcctaaatcactgtcaaagggagaaacaatgtttcttttggttcctagagcacaacttctagaatttatttaaaagatgtgtctgtgttttgtggtggtctgagaaaagagattggtggcatttttttgtgcttttataacatcgagaacacagctttcctcaatcaactccatttgatgtgtctcatacattgttgagtacattccctcagacatggcccacgttccacagcattttccccagcactgccctgatgtttatccaaaactctgaacccaggccaggtgcagtggctcacgcctgtactcccaacactttaggaagtccaggagggagaatcacttgaggccaggagtttgagaccagcttgggcaacagagcaagaccctgtctctgcaaaaattacaaaagtagctgggcatggtggcacatgcctataatctcagctaacttgggagtctgaggtgggaggatcgcttgagcagttggaggctgcaatgagctaggatcgcaccactacactccaggcttggtgatagagcagcccgtatctcttaaaaaacaaacaaaaaaaagagcctgaaccttatcttcagagactaacttccctttaaggtgctaaagtaaatatttactgagctcctccgcgtgccagatagaatttccagtaatgctttgcaaagaccatcgcactgcagtggatgagctgcagcaggcgctccacgcccactctcctcctgggcctgcactaggtttgcagagtgtgtgtttaggtcaccagctccccatcctgaagatagctctgtacgaggcacactgttgtttgtttgaacatgatcctggcaacagtgtgatctgggccgtctctttgagggctttcagcaatcgtgagaccgtctagtataagacagagcacgaaaggcatttttactgctggcctgaagaagtcagtgatttatagttcactaaaactgcacaaaatgtggaaagggtggctgaggaaaacatcctgattttgcttgcttttatatatgttatgtgtagatgaataaagtgtttgatcctttttgac

SEQ ID NO: 189086 - DNA, 1078 bp, Homo sapiens; identical to SEQ ID NO: 189082
  Payload ID: 17342
  Gene Symbol: TAMM41
  Gene Name: TAM41 mitochondrial translocator assembly and maintenance homolog
  ENST ID: ENST00000625087
  CDS Start-End: 257-712

SEQ ID NO: 189087 - DNA, 1102 bp, Homo sapiens
  Payload ID: 17342
  Gene Symbol: TAMM41
  Gene Name: TAM41 mitochondrial translocator assembly and maintenance homolog
  ENST ID: ENST00000623275
  CDS Start-End: 246-701
aagctctgcctgtgcgaccgccgcccacccgagcctatctgggctgcgtcttctcgccgctgctcttcgtggcccaacgccccaatccttgcgtgtgcttgcagtcccaccccacactcagccttgtgtccctcgatccagtctccgacttccatttcccaccctaaaccgcctacccggtgtctgttccccgcccggttgtcctcgccctgctgcgctgagtgtcccctgttagcctcgaccccatggcgctgcagacgctgcagagctcgtgggtgaccttccgcaagatcctgtctcacttccccgaggagctgagtctggctttcgtctacggctccggggtgtaccgccaggcagggccgagttcagaccagaagaatgctatgctggactttgtgttcacagtagatgaccctgtcgcatggcattcaaagaacctgaagaaaaattggagtcactactctttcctaaaagttttagggcccaagattatcacgtccatccagaataactatggcgctggagtttactacaattcattgatcatgtgtaatggtaggcttatcaaatatggagttattagcactaacgttctgattgaagatctcctcaactggaataacttatacattgctggacgactccaaaaaccggcctctctggcagtgtcccaagagttcactggcttttcactctgaacaacaaataacagtgctgctgagacaagttcctagttcacctttcattgaagaaccagatcagcacagtagcagaatcttccgaactgacatttttcctttgagtgaaaattatctcagtgaacgaggatgtcactcttagatcagccctcgatagaaatctgaagagtgctgtgaccgctgctttcctcatgctccccgaaagcttttctgaagaagacctcttcatagagattgccggtctctcctattcaggtgactttcggatggtggttggagaagataaaacaaaagtgttgaatattgtgaagcccaatatagcccactttcgagagctctatggcagcatactacaggaaaatcctcaagtggtgtataaaagccagcaaggctggctggag

SEQ ID NO: 189088 - DNA, 992 bp, Homo sapiens; identical to SEQ ID NO: 189081
  Payload ID: 17342
  Gene Symbol: TAMM41
  Gene Name: TAM41 mitochondrial translocator assembly and maintenance homolog
  ENST ID: ENST00000623389
  CDS Start-End: 250-573

SEQ ID NO: 189089 - DNA, 258 bp, Homo sapiens
  Payload ID: 17342
  Gene Symbol: TAMM41
  Gene Name: TAM41 mitochondrial translocator assembly and maintenance homolog
  ENST ID: ENST00000624342
  CDS Start-End: 1-167
gtgactttcggatggtggttggagaagataaaacaaaagtgttgaatattgtgaagcccaatatagcccactttcgagagctctatggcagcatactacaggaaaatcctcaagtggtgtataaaagccagcaaggctggctggaggtaactgtatgtggaaaatagcttgtattgtttctaagacaaaggctatttgcaggaagaaagtcaggggtagaacagcatgactggtgtgagaacatttatagtttaaaaa

SEQ ID NO: 189090 - DNA, 844 bp, Homo sapiens
  Payload ID: 17342
  Gene Symbol: TAMM41
  Gene Name: TAM41 mitochondrial translocator assembly and maintenance homolog
  ENST ID: ENST00000623848
  CDS Start-End: 137-844
ccccacactcagccttgtgtccctcgatccagtctccgacttccatttcccaccctaaaccgcctacccggtgtctgttccccgcccggttgtcctcgccctgctgcgctgagtgtcccctgttagcctcgaccccatggcgctgcagacgctgcagagctcgtgggtgaccttccgcaagatcctgtctcacttccccgaggagctgagtctggctttcgtctacggctccggggtgtaccgccaggcagggccgagttcagaccagaagaatgctatgctggactttgtgttcacagtagatgaccctgtcgcatggcattcaaagaacctgaagaaaaattggagtcactactctttcctaaaagttttagggcccaagattatcacgtccatccagaataactatggcgctggagtttactacaattcattgatcatgtgtaatggtaggcttatcaaatatggagttattagcactaacgttctgattgaagatctcctcaactggaataacttatacattgctggacgactccaaaaaccggtgaaaattatctcagtgaacgaggatgtcactcttagatcagccctcgatagaaatctgaagagtgctgtgaccgctgctttcctcatgctccccgaaagcttttctgaagaagacctcttcatagagattgccggtctctcctattcaggtgactttcggatggtggttggagaagataaaacaaaagtgttgaatattgtgaagcccaatatagcccactttcgagagctctatggcagcatactacaggaaaatcctcaagtggtgtataaaagccagcaaggctggctggag

SEQ ID NO: 189091 - DNA, 851 bp, Homo sapiens
  Payload ID: 17342
  Gene Symbol: TAMM41
  Gene Name: TAM41 mitochondrial translocator assembly and maintenance homolog
  ENST ID: ENST00000624236
  CDS Start-End: 144-851
agtcccaccccacactcagccttgtgtccctcgatccagtctccgacttccatttcccaccctaaaccgcctacccggtgtctgttccccgcccggttgtcctcgccctgctgcgctgagtgtcccctgttagcctcgaccccatggcgctgcagacgctgcagagctcgtgggtgaccttccgcaagatcctgtctcacttccccgaggagctgagtctggctttcgtctacggctccggggtgtaccgccaggcagggccgagttcagaccagaagaatgctatgctggactttgtgttcacagtagatgaccctgtcgcatggcattcaaagaacctgaagaaaaattggagtcactactctttcctaaaagttttagggcccaagattatcacgtccatccagaataactatggcgctggagtttactacaattcattgatcatgtgtaatggtaggcttatcaaatatggagttattagcactaacgttctgattgaagatctcctcaactggaataacttatacattgctggacgactccaaaaaccggtgaaaattatctcagtgaacgaggatgtcactcttagatcagccctcgatagaaatctgaagagtgctgtgaccgctgctttcctcatgctccccgaaagcttttctgaagaagacctcttcatagagattgccggtctctcctattcaggtgactttcggatggtggttggagaagataaaacaaaagtgttgaatattgtgaagcccaatatagcccactttcgagagctctatggcagcatactacaggaaaatcctcaagtggtgtataaaagccagcaaggctggctggag

SEQ ID NO: 189092 - DNA, 991 bp, Homo sapiens
  Payload ID: 17342
  Gene Symbol: TAMM41
  Gene Name: TAM41 mitochondrial translocator assembly and maintenance homolog
  ENST ID: ENST00000624386
  CDS Start-End: 284-991
gaagcgcctgtgcgtgcgtggggcgtagcaagggacggaagctctgcctgtgcgaccgccgcccacccgagcctatctgggctgcgtcttctcgccgctgctcttcgtggcccaacgccccaatccttgcgtgtgcttgcagtcccaccccacactcagccttgtgtccctcgatccagtctccgacttccatttcccaccctaaaccgcctacccggtgtctgttccccgcccggttgtcctcgccctgctgcgctgagtgtcccctgttagcctcgaccccatggcgctgcagacgctgcagagctcgtgggtgaccttccgcaagatcctgtctcacttccccgaggagctgagtctggctttcgtctacggctccggggtgtaccgccaggcagggccgagttcagaccagaagaatgctatgctggactttgtgttcacagtagatgaccctgtcgcatggcattcaaagaacctgaagaaaaattggagtcactactctttcctaaaagttttagggcccaagattatcacgtccatccagaataactatggcgctggagtttactacaattcattgatcatgtgtaatggtaggcttatcaaatatggagttattagcactaacgttctgattgaagatctcctcaactggaataacttatacattgctggacgactccaaaaaccggtgaaaattatctcagtgaacgaggatgtcactcttagatcagccctcgatagaaatctgaagagtgctgtgaccgctgctttcctcatgctccccgaaagcttttctgaagaagacctcttcatagagattgccggtctctcctattcaggtgactttcggatggtggttggagaagataaaacaaaagtgttgaatattgtgaagcccaatatagcccactttcgagagctctatggcagcatactacaggaaaatcctcaagtggtgtataaaagccagcaaggctggctggag

SEQ ID NO: 189093 - DNA, 607 bp, Homo sapiens
  Payload ID: 17342
  Gene Symbol: TAMM41
  Gene Name: TAM41 mitochondrial translocator assembly and maintenance homolog
  ENST ID: ENST00000630288
  CDS Start-End: 284-607
gaagcgcctgtgcgtgcgtggggcgtagcaagggacggaagctctgcctgtgcgaccgccgcccacccgagcctatctgggctgcgtcttctcgccgctgctcttcgtggcccaacgccccaatccttgcgtgtgcttgcagtcccaccccacactcagccttgtgtccctcgatccagtctccgacttccatttcccaccctaaaccgcctacccggtgtctgttccccgcccggttgtcctcgccctgctgcgctgagtgtcccctgttagcctcgaccccatggcgctgcagacgctgcagagctcgtgggtgaccttccgcaagatcctgtctcacttccccgaggagctgagtctggctttcgtctacggctccggggtgtaccgccaggcagggccgagttcagaccagaagtcatatctgacggcagcttccagaacatgctggctcccatatccacagagcactttcctccaacacggctccctacccttccctgtgcttcccccagtgcttccagcaagtctgtttaactcacgtgtccttcaagactcagatttgtcatctctaggagaatttctccctcctgtgcccctgatctga

SEQ ID NO: 189094 - DNA, 4708 bp, Homo sapiens
  Payload ID: 17343
  Gene Symbol: TC2N
  Gene Name: tandem C2 domains, nuclear
  Uniprot ID: Q8N9U0
  ENST ID: ENST00000340892
  CDS Start-End: 315-1787
ggccgcgcgaggtgaccggagtcacagttcccgcaggcggcgacagcagagcgcccactgcctccagcaggtaaccggccgcggccgcgcggcgccggcccagcgcgggcgtgggacgtggagacccggaggagggcggcgggacccgggcggggaaaggcgcggcgtggcttggctcaggtgcgcttctcccacctggcagctcgctcagggctgtggggggtgcctgtgagggcggccccgccttgcgggctggagattaatattaagattggaagtttgtgtcttttgctggatattggaaattgaatgtaatggcaacagaatttataaagagttgctgtggaggatgtttctatggtgaaacagaaaaacacaacttttctgtggaaagagattttaaagcagcagtcccaaatagtcaaaatgctactatctctgtacctccattgacttctgtttctgtaaagcctcagcttggctgtactgaggattatttgctttccaaattaccatctgatggcaaagaagtaccatttgtggtgcccaagtttaagttatcttacattcaacccaggacacaagaaactccttcacatctggaagaacttgaaggatctgccagagcatcttttggagatcgaaaggtagaactttccagttcatcccagcacggacctagctatgatgtgtataacccattctatatgtatcagcacatttcacctgatttgagtcgacgctttcctccccgttcagaagtgaagagactgtatggatcggtttgtgatttaaggacgaacaaacttcccggttcccctgggctaagcaaatctatgtttgatcttacaaactcatctcagcgattcatccagagacatgattcattgtccagtgtacccagtagttcttcttcaaggaaaaattctcaggggagtaacagaagcctggatacaattactctatcaggagatgaaagggactttgggagactgaatgtgaaattgttttataattcttcagtagaacagatctggatcacagttttacagtgcagagatttaagttggccctctagttatggagacactcctactgtttctataaaaggaatacttacattgcccaaaccagtgcatttcaaatcttcagccaaggaaggttccaacgctattgaatttatggaaacgtttgtatttgctattaaacttcaaaatctacaaactgtaagacttgtatttaagattcaaacccagactcccaggaagaaaaccattggagaatgctcaatgtcactcagaacccttagcacacaggaaatggattactctttggatataacaccaccttcaaaaatttctgtttgccatgcagaacttgaattggggacttgttttcaagcagtaaatagcagaattcagttacaaattcttgaggcacggtaccttccaagctcatcaacacctctgactttgagttttttcgtgaaggtgggaatgtttagctcgggagagttgatttataagaaaaagacacgcttactgaaggcctccaatggaagagtcaagtggggagagactatgatttttccacttatacagagtgaaaaagaaattgtttttctcattaagctttacagtcgaagctctgtaagaagaaaacactttgtgggccagatttggataagtgaagacagtaataacattgaagcagtgaaccagtggaaagagacagtaataaatccagaaaaggttgttatcaggtggcacaaattaaatccatcttgaagacttcacacattaatttggtgaagaacttgacattcttttagaagacttatgatttcaatttgctaccaatgagaagaggcaaatcaacaaatttgtcaatttatgggggctataattatggtatataatgtatctgatagaaaatttgataagaaaatgtaatgaattttatcagatatccaaagtaaaggaaatgttttaaaactgcaacaagagacacagacagtaaaatcaaagtattattaggatgactaaataaattataaagtctgtgagaatatcaaccatagatagttctttctatattatgttttcgcttttgtattttaagctttacttagatattcaaaacctggtatatcaagtctctgttagtactattggcatttagaagactttaccattatttcagtgctaggcattattgattaggtcttggctccactgtttacctcttgctatgtattttctcccggtaaaaatgaattgaaccatttcaactattttctatatttggagaaagtttgtgccctgtgttttataatttttttacccataagacatcacattatccctttgtaagctacttatctccaaaaaacttcagaaatagaaaactacattttggcaggaataattgaaaacaccagaaggttgaagtttaattggaaacccagaatatacatactttgctgttttcttccctcaaatattttactatttgttttatttggagttaaaataagagtatcatccatatggtccatcctaattcacagaattaaatgagcttaaatagaaaattcagtattttatgataatcacttcgtttttagtttttaaaatttagattattctataatttaccgtgtttgagtattttctcatttttttcataaccatacctgattatactgtgtaacaaatattttctattgcagttttctttccagtacttattagaactcagtatttggaaataatttcagcttaattgaccataagaactgtggccaaaaagaacagttttttggagaggcagatgacattatacctgattttagaaaatctcactttatttttgctaataagtagactaagtgctctgtgttctcagtcttccctttttttctgcccccattcttactttgtcccaggcatgcagagaaagatggtgatattttaggccaggagtataccttgctataacctaagcatgccttctttattccagctcctatgttctgtgtatatcattaacattttcccaaataaacacttaattctcttttccctaggtgccatctcctcaagctacaaaatgtccacatcttatatcccctttgcttctactgctctgattttgtggtaccagtactctctgccactgaacattttgaaatatttttgttttagatttgcaaaaaatgacatataggtcagtactcacatggatttttaagataaatcacctgtgtgataatattttgaatctgagacgaatacaacttttaaaaattgtttttaaaaatagacttttttttttagagcagttgtaggttaacagaaaaattgagaggaagatagagatttcctttctcccctgacaaagccctcaacagcctcccaggctatcagtatcctgcaccacaatggtacatttgttacaatcaatgaacctactctgaaacatcattatcatccaaagttcatggtttacattagagtcccctcttggtgttatacatgctagaggacaaatatatgatgatatgtatgcatcattataatatagtatagtttcgctgccctaaacatcctctgcaaatgcaactattttaatgggtaccaaagaagtaaatgtatttactggcttttagataataaataacgggctttattgtttattttaaaagctacaatttgttttagctggtttctctgttctattaatgctttgaatttccaaatttaatatatgtagtcatgcatttaacttaatatttaattatttgatttatttaattttctatattcttacaatgtatgtatgatgtataatttaagggaaagctatgacttctcagtttcttagaatcctaggtaaataaaacaataaaaagaaaacccttacatttaaaagagctttcaggtacagaagtattgatacaactaagatcctaaatgttttaattagtgtttacttaagcctttttcaggtgaggaggtactaatgctggttatttccttgaagctttatgtggacctataaataaaaatccaatctcctgctaataggtatgcatattgtgagaaaaacgttaggagctggtagtaaaaaatgagattctatgccaaaataacttctcttcatatttgcctaggcatttcttgacctttacccacttacgcaaggagaaggaaatcataatgatgtcatgtgatcaaaggaaaccatggaagggttcacgctgatagctgatagcttttacagtgctcattcctaacagtggatttacttgtaagctttcagatcaacacaaatagctgcagcctgggttaaaatataacatcactatttggcttttgttttgcatgatttttaaaagcagtactcctagggaaatggcctctgaagtatatcagtttcatctcttaccaagactgttaagaagaaactagtgggattttgaacaagttatataattgtggtctgaaaagaccctaaactgaagttctgtttaaatatagttacatgaatttctctgatactaatgtactcaacagccaggtataaactatatctcctagtaacattttccatttttgtttaatcaaatacttgcttatgaaggatttcagaaatttgtaataaatgtcagcttttgatagcatagcagtaattgacatttcaaaaa

SEQ ID NO: 189095 - DNA, 3751 bp, Homo sapiens
  Payload ID: 17343
  Gene Symbol: TC2N
  Gene Name: tandem C2 domains, nuclear
  Uniprot ID: Q8N9U0
  ENST ID: ENST00000360594
  CDS Start-End: 134-1606
gaggcgcggccgcgcgaggtgaccggagtcacagttcccgcaggcggcgacagcagagcgcccactgcctccagcagattaatattaagattggaagtttgtgtcttttgctggatattggaaattgaatgtaatggcaacagaatttataaagagttgctgtggaggatgtttctatggtgaaacagaaaaacacaacttttctgtggaaagagattttaaagcagcagtcccaaatagtcaaaatgctactatctctgtacctccattgacttctgtttctgtaaagcctcagcttggctgtactgaggattatttgctttccaaattaccatctgatggcaaagaagtaccatttgtggtgcccaagtttaagttatcttacattcaacccaggacacaagaaactccttcacatctggaagaacttgaaggatctgccagagcatcttttggagatcgaaaggtagaactttccagttcatcccagcacggacctagctatgatgtgtataacccattctatatgtatcagcacatttcacctgatttgagtcgacgctttcctccccgttcagaagtgaagagactgtatggatcggtttgtgatttaaggacgaacaaacttcccggttcccctgggctaagcaaatctatgtttgatcttacaaactcatctcagcgattcatccagagacatgattcattgtccagtgtacccagtagttcttcttcaaggaaaaattctcaggggagtaacagaagcctggatacaattactctatcaggagatgaaagggactttgggagactgaatgtgaaattgttttataattcttcagtagaacagatctggatcacagttttacagtgcagagatttaagttggccctctagttatggagacactcctactgtttctataaaaggaatacttacattgcccaaaccagtgcatttcaaatcttcagccaaggaaggttccaacgctattgaatttatggaaacgtttgtatttgctattaaacttcaaaatctacaaactgtaagacttgtatttaagattcaaacccagactcccaggaagaaaaccattggagaatgctcaatgtcactcagaacccttagcacacaggaaatggattactctttggatataacaccaccttcaaaaatttctgtttgccatgcagaacttgaattggggacttgttttcaagcagtaaatagcagaattcagttacaaattcttgaggcacggtaccttccaagctcatcaacacctctgactttgagttttttcgtgaaggtgggaatgtttagctcgggagagttgatttataagaaaaagacacgcttactgaaggcctccaatggaagagtcaagtggggagagactatgatttttccacttatacagagtgaaaaagaaattgtttttctcattaagctttacagtcgaagctctgtaagaagaaaacactttgtgggccagatttggataagtgaagacagtaataacattgaagcagtgaaccagtggaaagagacagtaataaatccagaaaaggttgttatcaggtggcacaaattaaatccatcttgaagacttcacacattaatttggtgaagaacttgacattcttttagaagacttatgatttcaatttgctaccaatgagaagaggcaaatcaacaaatttgtcaatttatgggggctataattatggtatataatgtatctgatagaaaatttgataagaaaatgtaatgaattttatcagatatccaaagtaaaggaaatgttttaaaactgcaacaagagacacagacagtaaaatcaaagtattattaggatgactaaataaattataaagtctgtgagaatatcaaccatagatagttctttctatattatgttttcgcttttgtattttaagctttacttagatattcaaaacctggtatatcaagtctctgttagtactattggcatttagaagactttaccattatttcagtgctaggcattattgattaggtcttggctccactgtttacctcttgctatgtattttctcccggtaaaaatgaattgaaccatttcaactattttctatatttggagaaagtttgtgccctgtgttttataatttttttacccataagacatcacattatccctttgtaagctacttatctccaaaaaacttcagaaatagaaaactacattttggcaggaataattgaaaacaccagaaggttgaagtttaattggaaacccagaatatacatactttgctgttttcttccctcaaatattttactatttgttttatttggagttaaaataagagtatcatccatatggtccatcctaattcacagaattaaatgagcttaaatagaaaattcagtattttatgataatcacttcgtttttagtttttaaaatttagattattctataatttaccgtgtttgagtattttctcatttttttcataaccatacctgattatactgtgtaacaaatattttctattgcagttttctttccagtacttattagaactcagtatttggaaataatttcagcttaattgaccataagaactgtggccaaaaagaacagttttttggagaggcagatgacattatacctgattttagaaaatctcactttatttttgctaataagtagactaagtgctctgtgttctcagtcttccctttttttctgcccccattcttactttgtcccaggcatgcagagaaagatggtgatattttaggccaggagtataccttgctataacctaagcatgccttctttattccagctcctatgttctgtgtatatcattaacattttcccaaataaacacttaattctcttttccctaggtgccatctcctcaagctacaaaatgtccacatcttatatcccctttgcttctactgctctgattttgtggtaccagtactctctgccactgaacattttgaaatatttttgttttagatttgcaaaaaatgacatataggtcagtactcacatggatttttaagataaatcacctgtgtgataatattttgaatctgagacgaatacaacttttaaaaattgtttttaaaaatagacttttttttttagagcagttgtaggttaacagaaaaattgagaggaagatagagatttcctttctcccctgacaaagccctcaacagcctcccaggctatcagtatcctgcaccacaatggtacatttgttacaatcaatgaacctactctgaaacatcattatcatccaaagttcatggtttacattagagtcccctcttggtgttatacatgctagaggacaaatatatgatgatatgtatgcatcattataatatagtatagtttcgctgccctaaacatcctctgcaaatgcaactattttaatgggtaccaaagaagtaaatgtatttactggcttttagataataaataacgggctttattgtttattttaaaagctacaatttgttttagctggtttctctgttctattaatgctttgaatttccaaatttaatatatgtagtcatgcatttaacttaatatttaattatttgatttatttaattttctatattcttacaatgtatgtatgatgtataatttaagggaaagctatgacttctcagtttcttagaatcctaggtaaataaaacaataaaaagaaaacccttacatttaaaa

SEQ ID NO: 189096 - DNA, 5146 bp, Homo sapiens
  Payload ID: 17343
  Gene Symbol: TC2N
  Gene Name: tandem C2 domains, nuclear
  Uniprot ID: Q8N9U0
  ENST ID: ENST00000435962
  CDS Start-End: 325-1797
gtcaagtggtgttagcaatcacatcagcaccaaatggctcaggatgctctggtttcaaagcttataaaacagagggtgattcccttgggactcactcagctcggctccgaaaagcaaaggccagaaggcagcagtgagcctgggtccctgctgtgtagggagactcaggggctgggaagaaggatggaatcagaaatgctgaaggtttacgtgagctttgcaccgagcgcctccgaaccactgcctctgggctcaacagaacacagggattaatattaagattggaagtttgtgtcttttgctggatattggaaattgaatgtaatggcaacagaatttataaagagttgctgtggaggatgtttctatggtgaaacagaaaaacacaacttttctgtggaaagagattttaaagcagcagtcccaaatagtcaaaatgctactatctctgtacctccattgacttctgtttctgtaaagcctcagcttggctgtactgaggattatttgctttccaaattaccatctgatggcaaagaagtaccatttgtggtgcccaagtttaagttatcttacattcaacccaggacacaagaaactccttcacatctggaagaacttgaaggatctgccagagcatcttttggagatcgaaaggtagaactttccagttcatcccagcacggacctagctatgatgtgtataacccattctatatgtatcagcacatttcacctgatttgagtcgacgctttcctccccgttcagaagtgaagagactgtatggatcggtttgtgatttaaggacgaacaaacttcccggttcccctgggctaagcaaatctatgtttgatcttacaaactcatctcagcgattcatccagagacatgattcattgtccagtgtacccagtagttcttcttcaaggaaaaattctcaggggagtaacagaagcctggatacaattactctatcaggagatgaaagggactttgggagactgaatgtgaaattgttttataattcttcagtagaacagatctggatcacagttttacagtgcagagatttaagttggccctctagttatggagacactcctactgtttctataaaaggaatacttacattgcccaaaccagtgcatttcaaatcttcagccaaggaaggttccaacgctattgaatttatggaaacgtttgtatttgctattaaacttcaaaatctacaaactgtaagacttgtatttaagattcaaacccagactcccaggaagaaaaccattggagaatgctcaatgtcactcagaacccttagcacacaggaaatggattactctttggatataacaccaccttcaaaaatttctgtttgccatgcagaacttgaattggggacttgttttcaagcagtaaatagcagaattcagttacaaattcttgaggcacggtaccttccaagctcatcaacacctctgactttgagttttttcgtgaaggtgggaatgtttagctcgggagagttgatttataagaaaaagacacgcttactgaaggcctccaatggaagagtcaagtggggagagactatgatttttccacttatacagagtgaaaaagaaattgtttttctcattaagctttacagtcgaagctctgtaagaagaaaacactttgtgggccagatttggataagtgaagacagtaataacattgaagcagtgaaccagtggaaagagacagtaataaatccagaaaaggttgttatcaggtggcacaaattaaatccatcttgaagacttcacacattaatttggtgaagaacttgacattcttttagaagacttatgatttcaatttgctaccaatgagaagaggcaaatcaacaaatttgtcaatttatgggggctataattatggtatataatgtatctgatagaaaatttgataagaaaatgtaatgaattttatcagatatccaaagtaaaggaaatgttttaaaactgcaacaagagacacagacagtaaaatcaaagtattattaggatgactaaataaattataaagtctgtgagaatatcaaccatagatagttctttctatattatgttttcgcttttgtattttaagctttacttagatattcaaaacctggtatatcaagtctctgttagtactattggcatttagaagactttaccattatttcagtgctaggcattattgattaggtcttggctccactgtttacctcttgctatgtattttctcccggtaaaaatgaattgaaccatttcaactattttctatatttggagaaagtttgtgccctgtgttttataatttttttacccataagacatcacattatccctttgtaagctacttatctccaaaaaacttcagaaatagaaaactacattttggcaggaataattgaaaacaccagaaggttgaagtttaattggaaacccagaatatacatactttgctgttttcttccctcaaatattttactatttgttttatttggagttaaaataagagtatcatccatatggtccatcctaattcacagaattaaatgagcttaaatagaaaattcagtattttatgataatcacttcgtttttagtttttaaaatttagattattctataatttaccgtgtttgagtattttctcatttttttcataaccatacctgattatactgtgtaacaaatattttctattgcagttttctttccagtacttattagaactcagtatttggaaataatttcagcttaattgaccataagaactgtggccaaaaagaacagttttttggagaggcagatgacattatacctgattttagaaaatctcactttatttttgctaataagtagactaagtgctctgtgttctcagtcttccctttttttctgcccccattcttactttgtcccaggcatgcagagaaagatggtgatattttaggccaggagtataccttgctataacctaagcatgccttctttattccagctcctatgttctgtgtatatcattaacattttcccaaataaacacttaattctcttttccctaggtgccatctcctcaagctacaaaatgtccacatcttatatcccctttgcttctactgctctgattttgtggtaccagtactctctgccactgaacattttgaaatatttttgttttagatttgcaaaaaatgacatataggtcagtactcacatggatttttaagataaatcacctgtgtgataatattttgaatctgagacgaatacaacttttaaaaattgtttttaaaaatagacttttttttttagagcagttgtaggttaacagaaaaattgagaggaagatagagatttcctttctcccctgacaaagccctcaacagcctcccaggctatcagtatcctgcaccacaatggtacatttgttacaatcaatgaacctactctgaaacatcattatcatccaaagttcatggtttacattagagtcccctcttggtgttatacatgctagaggacaaatatatgatgatatgtatgcatcattataatatagtatagtttcgctgccctaaacatcctctgcaaatgcaactattttaatgggtaccaaagaagtaaatgtatttactggcttttagataataaataacgggctttattgtttattttaaaagctacaatttgttttagctggtttctctgttctattaatgctttgaatttccaaatttaatatatgtagtcatgcatttaacttaatatttaattatttgatttatttaattttctatattcttacaatgtatgtatgatgtataatttaagggaaagctatgacttctcagtttcttagaatcctaggtaaataaaacaataaaaagaaaacccttacatttaaaagagctttcaggtacagaagtattgatacaactaagatcctaaatgttttaattagtgtttacttaagcctttttcaggtgaggaggtactaatgctggttatttccttgaagctttatgtggacctataaataaaaatccaatctcctgctaataggtatgcatattgtgagaaaaacgttaggagctggtagtaaaaaatgagattctatgccaaaataacttctcttcatatttgcctaggcatttcttgacctttacccacttacgcaaggagaaggaaatcataatgatgtcatgtgatcaaaggaaaccatggaagggttcacgctgatagctgatagcttttacagtgctcattcctaacagtggatttacttgtaagctttcagatcaacacaaatagctgcagcctgggttaaaatataacatcactatttggcttttgttttgcatgatttttaaaagcagtactcctagggaaatggcctctgaagtatatcagtttcatctcttaccaagactgttaagaagaaactagtgggattttgaacaagttatataattgtggtctgaaaagaccctaaactgaagttctgtttaaatatagttacatgaatttctctgatactaatgtactcaacagccaggtataaactatatctcctagtaacattttccatttttgtttaatcaaatacttgcttatgaaggatttcagaaatttgtaataaatgtcagcttttgatagcatagcagtaattgacatttcaaaaatatatatttctttctgtgtttggttgggtgtaatgaggaaaatacctgataaaatgtctgaagacactttctaatgttatcttggtgcataagctgtaatttttattcaaaattaaatttcaaatgtttgcagttttggctaaaacattgagttgaaagaattatgaaaagtgggcccatatgaagtaccatgttcattttgaaatatagatttaagatttagaaatatattaaaagagttaatggagcctcctaaattggattttattttgtgggtgaagaattgtaggaagatgaatgtggcctacagttttagtaatctcctagtggagttttttttaacttagtacttttttagttttaagttttttaatctataaaaaatgtgatttctataaaccatgattacaataaataattatattaaa

SEQ ID NO: 189097 - DNA, 902 bp, Homo sapiens
  Payload ID: 17343
  Gene Symbol: TC2N
  Gene Name: tandem C2 domains, nuclear
  ENST ID: ENST00000556590
  CDS Start-End: 1-729
agaagcctggatacaattactctatcaggagatgaaagggactttgggagactgaatgtgaaattgttttataattcttcagtagaacagatctggatcacagttttacaggctattgaatttatggaaacgtttgtatttgctattaaacttcaaaatctacaaactgtaagacttgtatttaagattcaaacccagactcccaggaagaaaaccattggagaatgctcaatgtcactcagaacccttagcacacaggaaatggattactctttggatataacaccaccttcaaaaatttctgtttgccatgcagaacttgaattggggacttgttttcaagcagtaaatagcagaattcagttacaaattcttgaggcacggtaccttccaagctcatcaacacctctgactttgagttttttcgtgaaggtgggaatgtttagctcgggagagttgatttataagaaaaagacacgcttactgaaggcctccaatggaagagtcaagtggggagagactatgatttttccacttatacagagtgaaaaagaaattgtttttctcattaagctttacagtcgaagctctgtaagaagaaaacactttgtgggccagatttggataagtgaagacagtaataacattgaagcagtgaaccagtggaaagagacagtaataaatccagaaaaggttgttatcaggtggcacaaattaaatccatcttgaagacttcacacattaatttggtgaagaacttgacattcttttagaagacttatgatttcaatttgctaccaatgagaagaggcaaatcaacaaatttgtcaatttatgggggctataattatggtatataatgtatctgatagaaaatttgataagaaaatgtaatgaatttt

SEQ ID NO: 189098 - DNA, 1770 bp, Homo sapiens
  Payload ID: 17343
  Gene Symbol: TC2N
  Gene Name: tandem C2 domains, nuclear
  Uniprot ID: Q8N9U0
  ENST ID: ENST00000556018
  CDS Start-End: 213-1493
gggagtgggtacggggagggaagtggaggggagggggtaagtgatagggtaggggaggccctgggaaaggcaggacctcgaggcgcggccgcgcgaggtgaccggagtcacagttcccgcaggcggcgacagcagagcgcccactgcctccagcagattaatattaagattggaagtttgtgtcttttgctggatattggaaattgaatgtaatggcaacagaatttataaagagttgctgtggaggatgtttctatggtgaaacagaaaaacacaacttttctgtggaaagagattttaaagcagcagtcccaaatagtcaaaatgctactatctctgtacctccattgacttctgtttctgtaaagcctcagcttggctgtactgaggattatttgctttccaaattaccatctgatggcaaagaagtaccatttgtggtgcccaagtttaagttatcttacattcaacccaggacacaagaaactccttcacatctggaagaacttgaaggatctgccagagcatcttttggagatcgaaaggtagaactttccagttcatcccagcacggacctagctatgatgtgtataacccattctatatgtatcagcacatttcacctgatttgagtcgacgctttcctccccgttcagaagtgaagagactgtatggatcggtttgtgatttaaggacgaacaaacttcccggttcccctgggctaagcaaatctatgtttgatcttacaaactcatctcagcgattcatccagagacatgattcattgtccagtgtacccagtagttcttcttcaaggaaaaattctcaggggagtaacagaagcctggatacaattactctatcaggagatgaaagggactttgggagactgaatgtgaaattgttttataattcttcagtagaacagatctggatcacagttttacagtgcagagatttaagttggccctctagttatggagacactcctactgtttctataaaaggaatacttacattgcccaaaccagtgcatttcaaatcttcagccaaggaaggttccaacgtttgccatgcagaacttgaattggggacttgttttcaagcagtaaatagcagaattcagttacaaattcttgaggcacggtaccttccaagctcatcaacacctctgactttgagttttttcgtgaaggtgggaatgtttagctcgggagagttgatttataagaaaaagacacgcttactgaaggcctccaatggaagagtcaagtggggagagactatgatttttccacttatacagagtgaaaaagaaattgtttttctcattaagctttacagtcgaagctctgtaagaagaaaacactttgtgggccagatttggataagtgaagacagtaataacattgaagcagtgaaccagtggaaagagacagtaataaatccagaaaaggttgttatcaggtggcacaaattaaatccatcttgaagacttcacacattaatttggtgaagaacttgacattcttttagaagacttatgatttcaatttgctaccaatgagaagaggcaaatcaacaaatttgtcaatttatgggggctataattatggtatataatgtatctgatagaaaatttgataagaaaatgtaatgaattttatcagatatccaaagtaaaggaaatgttttaaaactgcaacaagagacacagacagtaaaatcaaagtattattaggatgactaaataaattataaagtctgtg

SEQ ID NO: 189099 - DNA, 4708 bp, Homo sapiens; identical to SEQ ID NO: 189094
  Payload ID: 17343
  Gene Symbol: TC2N
  Gene Name: tandem C2 domains, nuclear
  Uniprot ID: Q8N9U0
  ENST ID: ENST00000620359
  CDS Start-End: 315-1787

SEQ ID NO: 189100 - DNA, 4878 bp, Homo sapiens
  Payload ID: 17343
  Gene Symbol: TC2N
  Gene Name: tandem C2 domains, nuclear
  Uniprot ID: Q8N9U0
  ENST ID: ENST00000610758
  CDS Start-End: 57-1529
attaatattaagattggaagtttgtgtcttttgctggatattggaaattgaatgtaatggcaacagaatttataaagagttgctgtggaggatgtttctatggtgaaacagaaaaacacaacttttctgtggaaagagattttaaagcagcagtcccaaatagtcaaaatgctactatctctgtacctccattgacttctgtttctgtaaagcctcagcttggctgtactgaggattatttgctttccaaattaccatctgatggcaaagaagtaccatttgtggtgcccaagtttaagttatcttacattcaacccaggacacaagaaactccttcacatctggaagaacttgaaggatctgccagagcatcttttggagatcgaaaggtagaactttccagttcatcccagcacggacctagctatgatgtgtataacccattctatatgtatcagcacatttcacctgatttgagtcgacgctttcctccccgttcagaagtgaagagactgtatggatcggtttgtgatttaaggacgaacaaacttcccggttcccctgggctaagcaaatctatgtttgatcttacaaactcatctcagcgattcatccagagacatgattcattgtccagtgtacccagtagttcttcttcaaggaaaaattctcaggggagtaacagaagcctggatacaattactctatcaggagatgaaagggactttgggagactgaatgtgaaattgttttataattcttcagtagaacagatctggatcacagttttacagtgcagagatttaagttggccctctagttatggagacactcctactgtttctataaaaggaatacttacattgcccaaaccagtgcatttcaaatcttcagccaaggaaggttccaacgctattgaatttatggaaacgtttgtatttgctattaaacttcaaaatctacaaactgtaagacttgtatttaagattcaaacccagactcccaggaagaaaaccattggagaatgctcaatgtcactcagaacccttagcacacaggaaatggattactctttggatataacaccaccttcaaaaatttctgtttgccatgcagaacttgaattggggacttgttttcaagcagtaaatagcagaattcagttacaaattcttgaggcacggtaccttccaagctcatcaacacctctgactttgagttttttcgtgaaggtgggaatgtttagctcgggagagttgatttataagaaaaagacacgcttactgaaggcctccaatggaagagtcaagtggggagagactatgatttttccacttatacagagtgaaaaagaaattgtttttctcattaagctttacagtcgaagctctgtaagaagaaaacactttgtgggccagatttggataagtgaagacagtaataacattgaagcagtgaaccagtggaaagagacagtaataaatccagaaaaggttgttatcaggtggcacaaattaaatccatcttgaagacttcacacattaatttggtgaagaacttgacattcttttagaagacttatgatttcaatttgctaccaatgagaagaggcaaatcaacaaatttgtcaatttatgggggctataattatggtatataatgtatctgatagaaaatttgataagaaaatgtaatgaattttatcagatatccaaagtaaaggaaatgttttaaaactgcaacaagagacacagacagtaaaatcaaagtattattaggatgactaaataaattataaagtctgtgagaatatcaaccatagatagttctttctatattatgttttcgcttttgtattttaagctttacttagatattcaaaacctggtatatcaagtctctgttagtactattggcatttagaagactttaccattatttcagtgctaggcattattgattaggtcttggctccactgtttacctcttgctatgtattttctcccggtaaaaatgaattgaaccatttcaactattttctatatttggagaaagtttgtgccctgtgttttataatttttttacccataagacatcacattatccctttgtaagctacttatctccaaaaaacttcagaaatagaaaactacattttggcaggaataattgaaaacaccagaaggttgaagtttaattggaaacccagaatatacatactttgctgttttcttccctcaaatattttactatttgttttatttggagttaaaataagagtatcatccatatggtccatcctaattcacagaattaaatgagcttaaatagaaaattcagtattttatgataatcacttcgtttttagtttttaaaatttagattattctataatttaccgtgtttgagtattttctcatttttttcataaccatacctgattatactgtgtaacaaatattttctattgcagttttctttccagtacttattagaactcagtatttggaaataatttcagcttaattgaccataagaactgtggccaaaaagaacagttttttggagaggcagatgacattatacctgattttagaaaatctcactttatttttgctaataagtagactaagtgctctgtgttctcagtcttccctttttttctgcccccattcttactttgtcccaggcatgcagagaaagatggtgatattttaggccaggagtataccttgctataacctaagcatgccttctttattccagctcctatgttctgtgtatatcattaacattttcccaaataaacacttaattctcttttccctaggtgccatctcctcaagctacaaaatgtccacatcttatatcccctttgcttctactgctctgattttgtggtaccagtactctctgccactgaacattttgaaatatttttgttttagatttgcaaaaaatgacatataggtcagtactcacatggatttttaagataaatcacctgtgtgataatattttgaatctgagacgaatacaacttttaaaaattgtttttaaaaatagacttttttttttagagcagttgtaggttaacagaaaaattgagaggaagatagagatttcctttctcccctgacaaagccctcaacagcctcccaggctatcagtatcctgcaccacaatggtacatttgttacaatcaatgaacctactctgaaacatcattatcatccaaagttcatggtttacattagagtcccctcttggtgttatacatgctagaggacaaatatatgatgatatgtatgcatcattataatatagtatagtttcgctgccctaaacatcctctgcaaatgcaactattttaatgggtaccaaagaagtaaatgtatttactggcttttagataataaataacgggctttattgtttattttaaaagctacaatttgttttagctggtttctctgttctattaatgctttgaatttccaaatttaatatatgtagtcatgcatttaacttaatatttaattatttgatttatttaattttctatattcttacaatgtatgtatgatgtataatttaagggaaagctatgacttctcagtttcttagaatcctaggtaaataaaacaataaaaagaaaacccttacatttaaaagagctttcaggtacagaagtattgatacaactaagatcctaaatgttttaattagtgtttacttaagcctttttcaggtgaggaggtactaatgctggttatttccttgaagctttatgtggacctataaataaaaatccaatctcctgctaataggtatgcatattgtgagaaaaacgttaggagctggtagtaaaaaatgagattctatgccaaaataacttctcttcatatttgcctaggcatttcttgacctttacccacttacgcaaggagaaggaaatcataatgatgtcatgtgatcaaaggaaaccatggaagggttcacgctgatagctgatagcttttacagtgctcattcctaacagtggatttacttgtaagctttcagatcaacacaaatagctgcagcctgggttaaaatataacatcactatttggcttttgttttgcatgatttttaaaagcagtactcctagggaaatggcctctgaagtatatcagtttcatctcttaccaagactgttaagaagaaactagtgggattttgaacaagttatataattgtggtctgaaaagaccctaaactgaagttctgtttaaatatagttacatgaatttctctgatactaatgtactcaacagccaggtataaactatatctcctagtaacattttccatttttgtttaatcaaatacttgcttatgaaggatttcagaaatttgtaataaatgtcagcttttgatagcatagcagtaattgacatttcaaaaatatatatttctttctgtgtttggttgggtgtaatgaggaaaatacctgataaaatgtctgaagacactttctaatgttatcttggtgcataagctgtaatttttattcaaaattaaatttcaaatgtttgcagttttggctaaaacattgagttgaaagaattatgaaaagtgggcccatatgaagtaccatgttcattttgaaatatagatttaagatttagaaatatattaaaagagttaatggagcctcctaaattggattttattttgtgggtgaagaattgtaggaagatgaatgtggcctacagttttagtaatctcctagtggagttttttttaacttagtacttttttagttttaagttttttaatctataaaaaatgtgatttctataaaccatgattacaataaataattatattaaa

SEQ ID NO: 189101 - DNA, 3751 bp, Homo sapiens; identical to SEQ ID NO: 189095
  Payload ID: 17343
  Gene Symbol: TC2N
  Gene Name: tandem C2 domains, nuclear
  Uniprot ID: Q8N9U0
  ENST ID: ENST00000632584
  CDS Start-End: 134-1606

SEQ ID NO: 189102 - DNA, 902 bp, Homo sapiens; identical to SEQ ID NO: 189097
  Payload ID: 17343
  Gene Symbol: TC2N
  Gene Name: tandem C2 domains, nuclear
  ENST ID: ENST00000633527
  CDS Start-End: 1-729

SEQ ID NO: 189103 - DNA, 1770 bp, Homo sapiens; identical to SEQ ID NO: 189098
  Payload ID: 17343
  Gene Symbol: TC2N
  Gene Name: tandem C2 domains, nuclear
  Uniprot ID: Q8N9U0
  ENST ID: ENST00000634120
  CDS Start-End: 213-1493

SEQ ID NO: 189104 - DNA, 3256 bp, Homo sapiens
  Payload ID: 17344
  Gene Symbol: TBK1
  Gene Name: TANK-binding kinase 1
  Uniprot ID: Q9UHD2
  ENST ID: ENST00000331710
  CDS Start-End: 340-2529
aatcccaattactgtgttcgctgctcagggctcctcattcccctttagagtaaagggcgagggcaacagtggacggggtgtctccagacatccccctcattaccgtggccgcggaagccgactcggcagttgccgccgcggctgtggtgactaccagacgggccataggcgtgcgcacgcgcacccgcaccggcgcgccggccgtcggtcacgtggcctccggccagggcttgcgaagccggaagtgtcctgagtctcgaggaggccgcgggagcccgccggcggtggcgcggcggagacccggctggtataacaagaggattgcctgatccagccaagatgcagagcacttctaatcatctgtggcttttatctgatattttaggccaaggagctactgcaaatgtctttcgtggaagacataagaaaactggtgatttatttgctatcaaagtatttaataacataagcttccttcgtccagtggatgttcaaatgagagaatttgaagtgttgaaaaaactcaatcacaaaaatattgtcaaattatttgctattgaagaggagacaacaacaagacataaagtacttattatggaattttgtccatgtgggagtttatacactgttttagaagaaccttctaatgcctatggactaccagaatctgaattcttaattgttttgcgagatgtggtgggtggaatgaatcatctacgagagaatggtatagtgcaccgtgatatcaagccaggaaatatcatgcgtgttataggggaagatggacagtctgtgtacaaactcacagattttggtgcagctagagaattagaagatgatgagcagtttgtttctctgtatggcacagaagaatatttgcaccctgatatgtatgagagagcagtgctaagaaaagatcatcagaagaaatatggagcaacagttgatctttggagcattggggtaacattttaccatgcagctactggatcactgccatttagaccctttgaagggcctcgtaggaataaagaagtgatgtataaaataattacaggaaagccttctggtgcaatatctggagtacagaaagcagaaaatggaccaattgactggagtggagacatgcctgtttcttgcagtctttctcggggtcttcaggttctacttacccctgttcttgcaaacatccttgaagcagatcaggaaaagtgttggggttttgaccagttttttgcagaaactagtgatatacttcaccgaatggtaattcatgttttttcgctacaacaaatgacagctcataagatttatattcatagctataatactgctactatatttcatgaactggtatataaacaaaccaaaattatttcttcaaatcaagaacttatctacgaagggcgacgcttagtcttagaacctggaaggctggcacaacatttccctaaaactactgaggaaaaccctatatttgtagtaagccgggaacctctgaataccataggattaatatatgaaaaaatttccctccctaaagtacatccacgttatgatttagacggggatgctagcatggctaaggcaataacaggggttgtgtgttatgcctgcagaattgccagtaccttactgctttatcaggaattaatgcgaaaggggatacgatggctgattgaattaattaaagatgattacaatgaaactgttcacaaaaagacagaagttgtgatcacattggatttctgtatcagaaacattgaaaaaactgtgaaagtatatgaaaagttgatgaagatcaacctggaagcggcagagttaggtgaaatttcagacatacacaccaaattgttgagactttccagttctcagggaacaatagaaaccagtcttcaggatatcgacagcagattatctccaggtggatcactggcagacgcatgggcacatcaagaaggcactcatccgaaagacagaaatgtagaaaaactacaagtcctgttaaattgcatgacagagatttactatcagttcaaaaaagacaaagcagaacgtagattagcttataatgaagaacaaatccacaaatttgataagcaaaaactgtattaccatgccacaaaagctatgacgcactttacagatgaatgtgttaaaaagtatgaggcatttttgaataagtcagaagaatggataagaaagatgcttcatcttaggaaacagttattatcgctgactaatcagtgttttgatattgaagaagaagtatcaaaatatcaagaatatactaatgagttacaagaaactctgcctcagaaaatgtttacagcttccagtggaatcaaacataccatgaccccaatttatccaagttctaacacattagtagaaatgactcttggtatgaagaaattaaaggaagagatggaaggggtggttaaagaacttgctgaaaataaccacattttagaaaggtttggctctttaaccatggatggtggccttcgcaacgttgactgtctttagctttctaatagaagtttaagaaaagtttccgtttgcacaagaaaataacgcttgggcattaaatgaatgcctttatagatagtcacttgtttctacaattcagtatttgatgtggtcgtgtaaatatgtacaatattgtaaatacataaaaaatatacaaatttttggctgctgtgaagatgtaattttatcttttaacatttataattatatgaggaaatttgacctcagtgatcacgagaagaaagccatgaccgaccaatatgttgacatactgatcctctactctgagtggggctaaataagttattttctctgaccgcctactggaaatatttttaagtggaaccaaaataggcatccttacaaatcaggaagactgacttgacacgtttgtaaatggtagaacggtggctactgtgagtggggagcagaaccgcaccactgttatactgggataacaatttttttgagaaggataaagtggcattattttattttacaaggtgcccagatcccagttatccttgtatccatgtaatttcagatgaattattaagcaaacattttaaagtgaattcattattaaaaactattcatttttttcctttggccataaatgtgtaattgtcattaaaattctaaggtcatttcaactgttttaagctgtatatttctttaattctgcttactatttcatggaaaaaaataaatttctcaattttaa

SEQ ID NO: 189105 - DNA, 419 bp, Homo sapiens
  Payload ID: 17344
  Gene Symbol: TBK1
  Gene Name: TANK-binding kinase 1
  ENST ID: ENST00000539810
  CDS Start-End: 275-419
ggtcctcgacctgcatcccgtccggcggctttgggcataaagaggacgactccgttaccgggcctgggccctggctgcctggggaggcaggggcacctctttcccttagactcgctgttttctaccctctttccgagcgtcgacacaacgggcagtttttaaatgccaaggagctactgcaaatgtctttcgtggaagacataagaaaactggtgatttatttgctatcaaagtatttaataacataagcttccttcgtccagtggatgttcaaatgagagaatttgaagtgttgaaaaaactcaatcacaaaaatattgtcaaattatttgctattgaagaggagacaacaacaagacataaagtacttattatggaattttgtccatgtgggagtttatacactgttttagaagaac

SEQ ID NO: 189106 - DNA, 513 bp, Homo sapiens
  Payload ID: 17344
  Gene Symbol: TBK1
  Gene Name: TANK-binding kinase 1
  ENST ID: ENST00000540417
  CDS Start-End: 220-513
atccccgctccgcgccgcgcggccggtcctcgacctgcatcccgtccggcggctttgggcataaagaggacgactccgttaccgggcctgggccctggctgcctggggaggcaggggcacctctttcccttagactcgctgttttctaccctctttccgagcgtcgacacaacgggcagtttttaaattataacaagaggattgcctgatccagccaagatgcagagcacttctaatcatctgtggcttttatctgatattttaggccaaggagctactgcaaatgtctttcgtggaagacataagaaaactggtgatttatttgctatcaaagtatttaataacataagcttccttcgtccagtggatgttcaaatgagagaatttgaagtgttgaaaaaactcaatcacaaaaatattgtcaaattatttgctattgaagaggagacaacaacaagacataaagtacttattatggaattttgtccatgtgggagtttatacactgtttta

SEQ ID NO: 189107 - DNA, 547 bp, Homo sapiens
  Payload ID: 17344
  Gene Symbol: TBK1
  Gene Name: TANK-binding kinase 1
  ENST ID: ENST00000538890
  CDS Start-End: 238-547
aagtgagacggccgcgggctgaggggccaaggcggcgcggggcgcggtcggtcaggcctgcgccgcccggcggggagcgctcccgccccctgtgggaggctgggatgctgagtcagagcgggggcgggggcgggcgcaccgagaagccccggacgacccgaggccaagccatccaggaccccggctgcgtggacactgcctctgggtataacaagaggattgcctgatccagccaagatgcagagcacttctaatcatctgtggcttttatctgatattttaggccaaggagctactgcaaatgtctttcgtggaagacataagaaaactggtgatttatttgctatcaaagtatttaataacataagcttccttcgtccagtggatgttcaaatgagagaatttgaagtgttgaaaaaactcaatcacaaaaatattgtcaaattatttgctattgaagaggagacaacaacaagacataaagtacttattatggaattttgtccatgtgggagtttatacactgttttagaagaaccttctaatg

SEQ ID NO: 189108 - DNA, 5795 bp, Homo sapiens
  Payload ID: 17345
  Gene Symbol: TNKS1BP1
  Gene Name: tankyrase 1 binding protein 1, 182kDa
  Uniprot ID: Q9C0C2
  ENST ID: ENST00000358252
  CDS Start-End: 154-5343
gcggcggcggcggcggtagcagcggcggcggcggcggggactggcatcggggccccgagccgagcggagccggaccccgggcgagcgcgtctgcagccaccccagctcatacctctctgcctccccgctctcaaggagggtctgccgcatgtgatgaaagtgtctactctcagggaaagctcagccatggcttccccactgccccgggagatggaggaggagctggtgcctactggctctgagccaggtgacactcgggccaaaccccctgtcaagcccaaaccccgggccctgcctgccaagccagccctgcctgccaaacccagcctgctggtgcctgttgggcctcggcctccccggggtcccctggctgagttgccttctgccaggaagatgaacatgctggcaggaccccagccctatggtggcagcaagcgcccccttccctttgcaccaaggcctgcggttgaggcctccactggaggagaagccacccaagagactgggaaagaggaggctgggaaagaggagccaccccctttgacacccccagctcgatgtgcagccccagggggtgtacggaaggcccctgcccctttccgcccagcctcagagcgcttcgcggccaccacggtggaagagatcctggccaagatggagcagcctcggaaggaggtccttgccagccccgaccgcctgtggggttcccgcctcacctttaaccacgatggcagctcgcgatatggccccaggacctatggcacgaccactgctcccagggatgaggatggcagcaccctcttcaggggatggtcccaggaggggccagtaaagtctccagcagagtgccgggaagagcacagcaagacccctgaggagaggagccttccttccgacctggccttcaacggggacctggctaaggcagccagctcggagctacctgctgatatttccaagccctggattccctcaagtccagccccctcctcagagaatggaggccctgccagcccaggcctccccgcagaagcctcaggctcaggccctggctctccccatcttcacccgcctgataagagttctccctgccactcacagcttctggaagcccagactcctgaagcttcccaggcttctccctgccccgctgtgactccatcagctccaagtgcagccctgcctgacgagggctcccgccacacccccagcccggggctccctgccgagggggctccagaggcccccagacccagcagcccaccccctgaggtcttggagccccatagcctggatcagccccctgccacctcaccccggcccctgatcgaggtgggtgagttgctggatctcactcggacgtttccatctggcggggaggaggaggccaagggtgacgcacacctccgccccaccagcctggttcagcgccgattctctgaaggtgtgctccagtcacccagtcaggaccaggagaagctggggggctcgctggctgccctgccccaaggccaggggagccagttggccctggatcgtccctttggggcagagtccaactggagcttatcacagtccttcgaatggaccttccccacgaggccctcgggtctgggcgtgtggcggctggactccccgcctccctcccccatcactgaagccagtgaggccgccgaggctgctgaggctggcaacttggccgtttccagcagggaagaaggagtgtctcagcaggggcaaggggctgggtcagctccaagtgggtcaggaagttcctgggtgcagggggatgatccaagcatgtccctcacccagaagggcgatggggagagtcaacctcaattcccagctgttccccttgagcccctgcctacaactgagggcacacctggattacctttgcagcaggcagaggagagatacgagtcgcaggagcccttggctggacaggagtcccctctccccctggctaccagggaggcagccttgcccatcctggagccagtcctggggcaggagcagccagcagcccctgaccagccctgtgttctctttgctgatgcccctgagcctggacaggcactgcctgttgaggaggaggccgtgaccctagcccgggctgagaccacccaagccaggacagaggctcaagacttgtgtagggcatcccccgagcctccaggccctgaaagcagctcccgctggctggacgacctcctggcttcaccaccacccagtggtggcggtgcaaggcggggagctggagctgagctgaaggacacacagtccccaagtacctgctctgagggactccttggctggtcccagaaagatctgcagagtgaatttgggatcacaggagacccacagcccagcagtttcagtccttccagctggtgtcaaggtgcttctcaggactatggccttgggggtgcaagccctagaggagacccaggtctcggagagagggactggaccagcaagtatgggcaaggagcaggggaagggagcaccagggagtgggccagcaggtgtggcatcggccaggaggagatggaggccagcagcagccaagaccagagtaaagtgtctgccccaggggtgctcacagcccaggaccgggtagttggaaagccagcccagcttggcactcagcggagccaggaggcagatgttcaggactgggagttcagaaagagggattcccagggcacttactccagccgggatgcagaactccaggaccaggaattcggaaagagagattcactgggtacctacagtagtcgagatgtaagccttggggactgggaatttgggaagagagattctctgggtgcttatgccagccaagatgccaacgagcagggccaagatttggggaagagggaccaccatggtaggtacagcagccaggatgccgatgagcaggactgggagtttcagaagagagatgtgtcactcggcacctatggcagccgggctgcggagccacaggaacaggagtttgggaagagcgcttggataagggactacagcagtggtggcagctccaggacccttgacgcccaggacagaagctttggaacgagacccctgagctctgggttcagccccgaggaagcccagcaacaggatgaggaatttgagaagaagattccaagtgtggaagacagccttggagagggcagcagggatgctggccggccaggagagagaggatccgggggcttgttcagtcctagcactgcccacgtgccggatggggcactcgggcagagagaccagagcagctggcaaaacagtgatgctagccaggaggtgggagggcatcaggagagacagcaggcaggggctcagggccctggcagtgctgacctggaagatggggagatgggaaagcgaggctgggtcggtgagtttagcctcagtgttggcccccagcgagaggcagcatttagcccagggcagcaggactggagccgggacttctgcatcgaggccagtgagaggagctatcagtttggcatcattggcaacgacagagtgagtggtgctggctttagcccttctagcaagatggaaggtggtcactttgtgcctcctgggaagaccacagctggctcggtggactggactgaccagctgggtctcaggaacttggaagtgtccagctgtgtgggttctgggggctcgagcgaggccagggagagtgccgtgggacagatgggctggtcaggtggcctgagcttgagagacatgaacctgaccggctgtttggaaagtggagggtctgaagagccggggggaatcggagttggggagaaggactggacttctgatgttaatgtgaagagcaaagatttggctgaggtcggggagggaggaggccacagccaggccagagagagtggcgtggggcagactgactggtcaggtgtggaggccggagagttccttaaatcaagggagcgtggagttggacaggcagactggacacctgaccttgggctgagaaacatggccccaggggcagtctgcagtcctggagagtccaaagagcttggggtgggccagatggactggggtaacaatctgggcctgagggatttggaggtgacctgtgacccagactctggaggttctcaggggctacggggatgtggagtggggcagatggactggacccaggacttggcgccccagaatgtggagctctttggggctccaagtgaagccagggagcatggggtgggcggggtgagccagtgcccagagcccggcctgaggcacaatggcagcttgtctcctggcctggaggccagagaccccttggaggccagggagctgggggttggtgagacaagtgggccagagacccagggtgaagattactcctcgtcttccttggagccacaccctgcagaccctggaatggagacaggagaagccctcagcttcggagcaagccctggcaggtgcccggcccgccccccaccctccggctcccagggcctgctggaggagatgctggcagccagcagctccaaggcggtggctcggagggagtcagcggcctcgggccttgggggcctgttggaggaggaaggagccggggcaggtgctgcccaagaggaggtgctggagcctggcagggactctccaccctcctggaggccgcagcctgatggtgaggccagccagacagaagacgtggatggcacctggggctcttcagcagccaggtggagcgatcaggggccagcacagacttctcggcgaccctcccaaggccctcctgccagatcccccagtcaggacttctccttcattgaggacaccgagatcctcgacagtgccatgtatcggagccgtgccaacttggggcgcaagcgtgggcaccgggccccggtcattcggcctgggggtaccttgggcctgtcggaggcagcagactcggatgcacacctgttccaggactctacagagccacgggcatctcgggtgccatcttcagatgaagaggtagtggaggaacctcagagccgccggacacggatgtcgttgggcaccaaggggctgaaagtcaacctctttcctggcctgagcccctcagccctgaaggccaagctgcgcccccggaatcgctcagctgaggagggagagctggctgagagcaagtcgagccagaaggagtccgcggtccagcgttcgaaatcctgcaaggtcccaggactgggaaagcccctcacgttacctcccaagccagagaaatcctcagggtcagaaggatcgtcgcccaactggcttcaagccctgaaactgaagaagaagaaggtctgagaagtcactgaggttcttcccacctggcagtctcaggcagtgcccattcctgtggggtccctgggtgaggagacggctggagccccaccatgccccaggctgcagcctctgtcccctccacctctgaggagcgtctggggaggcacatttatgcactttgtatcaccctccgaactccccccacaccttcccttccctggatttcatcactagtggttgaaggttttgtcccttcctctcctccttccctctccctctctgcttcctcctccagcctcccttgggttttcttttgataccaatttatagcattttttataaaagcctttgatttttataatgggtgggactgtatccctgcctcaccccaggtctccgtctgccccgccaggtaccccacagagaccaatgacattttgccacttgaaacaataaataaagttttttgggaa

SEQ ID NO: 189109 - DNA, 4336 bp, Homo sapiens
  Payload ID: 17345
  Gene Symbol: TNKS1BP1
  Gene Name: tankyrase 1 binding protein 1, 182kDa
  ENST ID: ENST00000528882
  CDS Start-End: 179-910
gcagtggcttcgtcccgcggtgacggcggcggcggcggcggtagcagcggcggcggcggcggggactggcatcggggccccgagccgagcggagccggaccccgggcgagcgcgtctgcagccaccccagctcatacctctctgcctccccgctctcaaggagggtctgccgcatgtgatgaaagtgtctactctcagggaaagctcagccatggcttccccactgccccgggagatggaggaggagctggtgcctactggctctgagccaggtgacactcgggccaaaccccctgtcaagcccaaaccccgggccctgcctgccaagccagccctgcctgccaaacccagcctgctggtgcctgttgggcctcggcctccccggggtcccctggctgagttgccttctgccaggaagatgaacatgctggcaggaccccagccctatggtggcagcaagcgcccccttccctttgcaccaaggcctgcggttgaggcctccactggaggagaagccacccaagagactgggaaagaggaggctgggaaagaggagccaccccctttgacacccccagctcgatgtgcagccccagggggtgtacggaaggcccctgcccctttccgcccagcctcagagcgcttcgcggccaccacggtggaagagatcctggccaagatggagcagcctcggaaggaggtccttgccagccccgaccgcctgtggggttcccgcctcacctttaaccacgatggcagctcgcgatatggccccaggacctatggcacgaccactgctcccagggatgaggatggcagcaccctcttcaggggatggtcccaggaggggccagtaaagtctccagcagagtgccgggaagagcacagcaagacccctgaggagaggtgaagggtgggaggagccttccttccgacctggccttcaacggggacctggctaaggcagccagctcggagctacctgctgatatttccaagccctggattccctcaagtccagccccctcctcagagaatggaggccctgccagcccaggcctccccgcagaagcctcaggctcaggccctggctctccccatcttcacccgcctgataagagttctccctgccactcacagcttctggaagcccagactcctgaagcttcccaggcttctccctgccccgctgtgactccatcagctccaagtgcagccctgcctgacgagggctcccgccacacccccagcccggggctccctgccgagggggctccagaggcccccagacccagcagcccaccccctgaggtcttggagccccatagcctggatcagccccctgccacctcaccccggcccctgatcgaggtgggtgagttgctggatctcactcggacgtttccatctggcggggaggaggaggccaagggtgacgcacacctccgccccaccagcctggttcagcgccgattctctgaaggtgtgctccagtcacccagtcaggaccaggagaagctggggggctcgctggctgccctgccccaaggccaggggagccagttggccctggatcgtccctttggggcagagtccaactggagcttatcacagtccttcgaatggaccttccccacgaggccctcgggtctgggcgtgtggcggctggactccccgcctccctcccccatcactgaagccagtgaggccgccgaggctgctgaggctggcaacttggccgtttccagcagggaagaaggagtgtctcagcaggggcaaggggctgggtcagctccaagtgggtcaggaagttcctgggtgcagggggatgatccaagcatgtccctcacccagaagggcgatggggagagtcaacctcaattcccagctgttccccttgagcccctgcctacaactgagggcacacctggattacctttgcagcaggcagaggagagatacgagtcgcaggagcccttggctggacaggagtcccctctccccctggctaccagggaggcagccttgcccatcctggagccagtcctggggcaggagcagccagcagcccctgaccagccctgtgttctctttgctgatgcccctgagcctggacaggcactgcctgttgaggaggaggccgtgaccctagcccgggctgagaccacccaagccaggacagaggctcaagacttgtgtagggcatcccccgagcctccaggccctgaaagcagctcccgctggctggacgacctcctggcttcaccaccacccagtggtggcggtgcaaggcggggagctggagctgagctgaaggacacacagtccccaagtacctgctctgagggactccttggctggtcccagaaagatctgcagagtgaatttgggatcacaggagacccacagcccagcagtttcagtccttccagctggtgtcaaggtgcttctcaggactatggccttgggggtgcaagccctagaggagacccaggtctcggagagagggactggaccagcaagtatgggcaaggagcaggggaagggagcaccagggagtgggccagcaggtgtggcatcggccaggaggagatggaggccagcagcagccaagaccagagtaaagtgtctgccccaggggtgctcacagcccaggaccgggtagttggaaagccagcccagcttggcactcagcggagccaggaggcagatgttcaggactgggagttcagaaagagggattcccagggcacttactccagccgggatgcagaactccaggaccaggaattcggaaagagagattcactgggtacctacagtagtcgagatgtaagccttggggactgggaatttgggaagagagattctctgggtgcttatgccagccaagatgccaacgagcagggccaagatttggggaagagggaccaccatggtaggtacagcagccaggatgccgatgagcaggactgggagtttcagaagagagatgtgtcactcggcacctatggcagccgggctgcggagccacaggaacaggagtttgggaagagcgcttggataagggactacagcagtggtggcagctccaggacccttgacgcccaggacagaagctttggaacgagacccctgagctctgggttcagccccgaggaagcccagcaacaggatgaggaatttgagaagaagattccaagtgtggaagacagccttggagagggcagcagggatgctggccggccaggagagagaggatccgggggcttgttcagtcctagcactgcccacgtgccggatggggcactcgggcagagagaccagagcagctggcaaaacagtgatgctagccaggaggtgggagggcatcaggagagacagcaggcaggggctcagggccctggcagtgctgacctggaagatggggagatgggaaagcgaggctgggtcggtgagtttagcctcagtgttggcccccagcgagaggcagcatttagcccagggcagcaggactggagccgggacttctgcatcgaggccagtgagaggagctatcagtttggcatcattggcaacgacagagtgagtggtgctggctttagcccttctagcaagatggaaggtggtcactttgtgcctcctgggaagaccacagctggctcggtggactggactgaccagctgggtctcaggaacttggaagtgtccagctgtgtgggttctgggggctcgagcgaggccagggagagtgccgtgggacagatgggctggtcaggtggcctgagcttgagagacatgaacctgaccggctgtttggaaagtggagggtctgaagagccggggggaatcggagttggggagaaggactggacttctgatgttaatgtgaagagcaaagatttggctgaggtcggggagggaggaggccacagccaggccagagagagtggcgtggggcagactgactggtcaggtgtggaggccggagagttccttaaatcaagggagcgtctggggaggcacatttatgcactttgtatcaccctccgaactccccccacaccttcccttccctggatttcatcactagtggttgaaggttttgtcccttcctctcctccttccctctccctctctgcttcctcctccagcctcccttgggttttcttttgataccaatttatagcattttttataaaagcctttgatttttataatgggtgggactgtatccctgcctcaccccaggtctccgtctgccccgccaggtaccccacagagaccaatgacattttgccacttgaaacaataaataaagttttttgggaattgg

SEQ ID NO: 189110 - DNA, 594 bp, Homo sapiens
  Payload ID: 17345
  Gene Symbol: TNKS1BP1
  Gene Name: tankyrase 1 binding protein 1, 182kDa
  ENST ID: ENST00000527207
  CDS Start-End: 165-594
gtgattcacagacagacttcatactttgcagctctctagctctgctttgagtagacacctccagcggggccgtcctacccaaggggcactgtggggactgtctgcagccaccccagctcatacctctctgcctccccgctctcaaggagggtctgccgcatgtgatgaaagtgtctactctcagggaaagctcagccatggcttccccactgccccgggagatggaggaggagctggtgcctactggctctgagccaggtgacactcgggccaaaccccctgtcaagcccaaaccccgggccctgcctgccaagccagccctgcctgccaaacccagcctgctggtgcctgttgggcctcggcctccccggggtcccctggctgagttgccttctgccaggaagatgaacatgctggcaggaccccagccctatggtggcagcaagcgcccccttccctttgcaccaaggcctgcggttgaggcctccactggaggagaagccacccaagagactgggaaagaggaggctgggaaagaggagccaccccctttgacacccccagctcgatgtgcagccccagggggtgtacgga

SEQ ID NO: 189111 - DNA, 5952 bp, Homo sapiens
  Payload ID: 17345
  Gene Symbol: TNKS1BP1
  Gene Name: tankyrase 1 binding protein 1, 182kDa
  Uniprot ID: Q9C0C2
  ENST ID: ENST00000532437
  CDS Start-End: 313-5502
cagtgagtgactccctgaagcgctaggactttggggttaggagataagagttggggaggatctttgaagagttgaggatatggctgttgggaacctcccttgacctcctcctacccccccccccccactccaagttctctcttcctgtcccacactctgcctctgttagaaataggagacttctctctgctaaacctactggcaacgcccaactctttttttccttctcttctctctcttttcctaggtctgcagccaccccagctcatacctctctgcctccccgctctcaaggagggtctgccgcatgtgatgaaagtgtctactctcagggaaagctcagccatggcttccccactgccccgggagatggaggaggagctggtgcctactggctctgagccaggtgacactcgggccaaaccccctgtcaagcccaaaccccgggccctgcctgccaagccagccctgcctgccaaacccagcctgctggtgcctgttgggcctcggcctccccggggtcccctggctgagttgccttctgccaggaagatgaacatgctggcaggaccccagccctatggtggcagcaagcgcccccttccctttgcaccaaggcctgcggttgaggcctccactggaggagaagccacccaagagactgggaaagaggaggctgggaaagaggagccaccccctttgacacccccagctcgatgtgcagccccagggggtgtacggaaggcccctgcccctttccgcccagcctcagagcgcttcgcggccaccacggtggaagagatcctggccaagatggagcagcctcggaaggaggtccttgccagccccgaccgcctgtggggttcccgcctcacctttaaccacgatggcagctcgcgatatggccccaggacctatggcacgaccactgctcccagggatgaggatggcagcaccctcttcaggggatggtcccaggaggggccagtaaagtctccagcagagtgccgggaagagcacagcaagacccctgaggagaggagccttccttccgacctggccttcaacggggacctggctaaggcagccagctcggagctacctgctgatatttccaagccctggattccctcaagtccagccccctcctcagagaatggaggccctgccagcccaggcctccccgcagaagcctcaggctcaggccctggctctccccatcttcacccgcctgataagagttctccctgccactcacagcttctggaagcccagactcctgaagcttcccaggcttctccctgccccgctgtgactccatcagctccaagtgcagccctgcctgacgagggctcccgccacacccccagcccggggctccctgccgagggggctccagaggcccccagacccagcagcccaccccctgaggtcttggagccccatagcctggatcagccccctgccacctcaccccggcccctgatcgaggtgggtgagttgctggatctcactcggacgtttccatctggcggggaggaggaggccaagggtgacgcacacctccgccccaccagcctggttcagcgccgattctctgaaggtgtgctccagtcacccagtcaggaccaggagaagctggggggctcgctggctgccctgccccaaggccaggggagccagttggccctggatcgtccctttggggcagagtccaactggagcttatcacagtccttcgaatggaccttccccacgaggccctcgggtctgggcgtgtggcggctggactccccgcctccctcccccatcactgaagccagtgaggccgccgaggctgctgaggctggcaacttggccgtttccagcagggaagaaggagtgtctcagcaggggcaaggggctgggtcagctccaagtgggtcaggaagttcctgggtgcagggggatgatccaagcatgtccctcacccagaagggcgatggggagagtcaacctcaattcccagctgttccccttgagcccctgcctacaactgagggcacacctggattacctttgcagcaggcagaggagagatacgagtcgcaggagcccttggctggacaggagtcccctctccccctggctaccagggaggcagccttgcccatcctggagccagtcctggggcaggagcagccagcagcccctgaccagccctgtgttctctttgctgatgcccctgagcctggacaggcactgcctgttgaggaggaggccgtgaccctagcccgggctgagaccacccaagccaggacagaggctcaagacttgtgtagggcatcccccgagcctccaggccctgaaagcagctcccgctggctggacgacctcctggcttcaccaccacccagtggtggcggtgcaaggcggggagctggagctgagctgaaggacacacagtccccaagtacctgctctgagggactccttggctggtcccagaaagatctgcagagtgaatttgggatcacaggagacccacagcccagcagtttcagtccttccagctggtgtcaaggtgcttctcaggactatggccttgggggtgcaagccctagaggagacccaggtctcggagagagggactggaccagcaagtatgggcaaggagcaggggaagggagcaccagggagtgggccagcaggtgtggcatcggccaggaggagatggaggccagcagcagccaagaccagagtaaagtgtctgccccaggggtgctcacagcccaggaccgggtagttggaaagccagcccagcttggcactcagcggagccaggaggcagatgttcaggactgggagttcagaaagagggattcccagggcacttactccagccgggatgcagaactccaggaccaggaattcggaaagagagattcactgggtacctacagtagtcgagatgtaagccttggggactgggaatttgggaagagagattctctgggtgcttatgccagccaagatgccaacgagcagggccaagatttggggaagagggaccaccatggtaggtacagcagccaggatgccgatgagcaggactgggagtttcagaagagagatgtgtcactcggcacctatggcagccgggctgcggagccacaggaacaggagtttgggaagagcgcttggataagggactacagcagtggtggcagctccaggacccttgacgcccaggacagaagctttggaacgagacccctgagctctgggttcagccccgaggaagcccagcaacaggatgaggaatttgagaagaagattccaagtgtggaagacagccttggagagggcagcagggatgctggccggccaggagagagaggatccgggggcttgttcagtcctagcactgcccacgtgccggatggggcactcgggcagagagaccagagcagctggcaaaacagtgatgctagccaggaggtgggagggcatcaggagagacagcaggcaggggctcagggccctggcagtgctgacctggaagatggggagatgggaaagcgaggctgggtcggtgagtttagcctcagtgttggcccccagcgagaggcagcatttagcccagggcagcaggactggagccgggacttctgcatcgaggccagtgagaggagctatcagtttggcatcattggcaacgacagagtgagtggtgctggctttagcccttctagcaagatggaaggtggtcactttgtgcctcctgggaagaccacagctggctcggtggactggactgaccagctgggtctcaggaacttggaagtgtccagctgtgtgggttctgggggctcgagcgaggccagggagagtgccgtgggacagatgggctggtcaggtggcctgagcttgagagacatgaacctgaccggctgtttggaaagtggagggtctgaagagccggggggaatcggagttggggagaaggactggacttctgatgttaatgtgaagagcaaagatttggctgaggtcggggagggaggaggccacagccaggccagagagagtggcgtggggcagactgactggtcaggtgtggaggccggagagttccttaaatcaagggagcgtggagttggacaggcagactggacacctgaccttgggctgagaaacatggccccaggggcagtctgcagtcctggagagtccaaagagcttggggtgggccagatggactggggtaacaatctgggcctgagggatttggaggtgacctgtgacccagactctggaggttctcaggggctacggggatgtggagtggggcagatggactggacccaggacttggcgccccagaatgtggagctctttggggctccaagtgaagccagggagcatggggtgggcggggtgagccagtgcccagagcccggcctgaggcacaatggcagcttgtctcctggcctggaggccagagaccccttggaggccagggagctgggggttggtgagacaagtgggccagagacccagggtgaagattactcctcgtcttccttggagccacaccctgcagaccctggaatggagacaggagaagccctcagcttcggagcaagccctggcaggtgcccggcccgccccccaccctccggctcccagggcctgctggaggagatgctggcagccagcagctccaaggcggtggctcggagggagtcagcggcctcgggccttgggggcctgttggaggaggaaggagccggggcaggtgctgcccaagaggaggtgctggagcctggcagggactctccaccctcctggaggccgcagcctgatggtgaggccagccagacagaagacgtggatggcacctggggctcttcagcagccaggtggagcgatcaggggccagcacagacttctcggcgaccctcccaaggccctcctgccagatcccccagtcaggacttctccttcattgaggacaccgagatcctcgacagtgccatgtatcggagccgtgccaacttggggcgcaagcgtgggcaccgggccccggtcattcggcctgggggtaccttgggcctgtcggaggcagcagactcggatgcacacctgttccaggactctacagagccacgggcatctcgggtgccatcttcagatgaagaggtagtggaggaacctcagagccgccggacacggatgtcgttgggcaccaaggggctgaaagtcaacctctttcctggcctgagcccctcagccctgaaggccaagctgcgcccccggaatcgctcagctgaggagggagagctggctgagagcaagtcgagccagaaggagtccgcggtccagcgttcgaaatcctgcaaggtcccaggactgggaaagcccctcacgttacctcccaagccagagaaatcctcagggtcagaaggatcgtcgcccaactggcttcaagccctgaaactgaagaagaagaaggtctgagaagtcactgaggttcttcccacctggcagtctcaggcagtgcccattcctgtggggtccctgggtgaggagacggctggagccccaccatgccccaggctgcagcctctgtcccctccacctctgaggagcgtctggggaggcacatttatgcactttgtatcaccctccgaactccccccacaccttcccttccctggatttcatcactagtggttgaaggttttgtcccttcctctcctccttccctctccctctctgcttcctcctccagcctcccttgggttttcttttgataccaatttatagcattttttataaaagcctttgatttttataatgggtgggactgtatccctgcctcaccccaggtctccgtctgccccgccaggtaccccacagagaccaatgacattttgccacttgaaacaataaataaagttttttggg

SEQ ID NO: 189112 - DNA, 9620 bp, Homo sapiens
  Payload ID: 17346
  Gene Symbol: TNKS
  Gene Name: tankyrase, TRF1-interacting ankyrin-related ADP-ribose polymerase
  Uniprot ID: O95271
  ENST ID: ENST00000310430
  CDS Start-End: 27-4010
agtgacagtgctaggggagtccgaagatggcggcgtcgcgtcgctctcagcatcatcaccaccatcatcaacaacagctccagcccgccccaggggcttcagcgccgccgccgccacctcctcccccactcagccctggcctggccccggggaccaccccagcctctcccacggccagcggcctggcccccttcgcctccccgcggcacggcctagcgctgccggagggggatggcagtcgggatccgcccgacaggccccgatccccggacccggttgacggtaccagctgttgcagtaccaccagcacaatctgtaccgtcgccgccgctcccgtggtcccagcggtttctacttcatctgccgctggggtcgctcccaacccagccggcagtggcagtaacaattcaccgtcgtcctcttcttccccgacttcttcctcatcttcctctccatcctcccctggatcgagcttggcggagagccccgaggcggccggagttagcagcacagcaccactggggcctggggcagcaggacctgggacaggggtcccagcagtgagcggggccctacgggaactgctggaggcctgtcgcaatggggacgtgtcccgggtaaagaggctggtggacgcggcaaacgtaaatgcaaaggacatggccggccggaagtcttctcccctgcacttcgctgcaggttttggaaggaaggatgttgtagaacacttactacagatgggtgctaatgtccacgctcgtgatgatggaggtctcatcccgcttcataatgcctgttcttttggccatgctgaggttgtgagtctgttattgtgccaaggagctgatccaaatgccagggataactggaactatacacctctgcatgaagctgctattaaagggaagatcgatgtgtgcattgtgctgctgcagcacggagctgacccaaacattcggaacactgatgggaaatcagccctggacctggcagatccttcagcaaaagctgtccttacaggtgaatacaagaaagacgaactcctagaagctgctaggagtggtaatgaagaaaaactaatggctttactgactcctctaaatgtgaattgccatgcaagtgatgggcgaaagtcgactcctttacatctagcagcgggctacaacagagttcgaatagttcagcttcttcttcagcatggtgctgatgttcatgcaaaagacaaaggtggacttgtgcctcttcataatgcatgttcatatggacattatgaagtcacagaactgctactaaagcatggagcttgtgttaatgccatggatctctggcagtttactccactgcacgaggctgcttccaagaaccgtgtagaagtctgctctttgttacttagccatggcgctgatcctacattagtcaactgccatggcaaaagtgctgtggatatggctccaactccggagcttagggagagattgacttatgaatttaaaggtcattctttactacaagcagccagagaagcagacttagctaaagttaaaaaaacactcgctctggaaatcattaatttcaaacaaccgcagtctcatgaaacagcactgcactgtgctgtggcctctctgcatcccaaacgtaaacaagtgacagaattgttacttagaaaaggagcaaatgttaatgaaaaaaataaagatttcatgactcccctgcatgttgcagccgaaagagcccataatgatgtcatggaagttctgcataagcatggcgccaagatgaatgcactggacacccttggtcagactgctttgcatagagccgccctagcaggtcacctgcagacctgccgcctcctgctgagttacggctctgacccctccatcatctccttacaaggcttcacagcagcacagatgggcaatgaagcagtgcagcagattctgagtgagagtacacctatacgtacttctgatgttgattatcgactcttagaggcatctaaagctggagacttggaaactgtgaagcaactttgcagctctcaaaatgtgaattgtagagacttagagggccggcattccacgcccttacacttcgcagcaggctacaaccgcgtgtctgttgtagagtacctgctacaccacggtgccgatgtccatgccaaagacaagggtggcttggtgccccttcataatgcctgttcatatggacactatgaggtggctgagcttttagtaaggcatggggcttctgtcaatgtggcggacttatggaaatttacccctctccatgaagcagcagctaaaggaaagtatgaaatctgcaagctccttttaaaacatggagcagatccaactaaaaagaacagagatggaaatacacctttggatttggtaaaggaaggagacacagatattcaggacttactgagaggggatgctgctttgttggatgctgccaagaagggctgcctggcaagagtgcagaagctctgtaccccagagaatatcaactgcagagacacccagggcagaaattcaacccctctgcacctggcagcaggctataataacctggaagtagctgaatatcttctagagcatggagctgatgttaatgcccaggacaagggtggtttaattcctcttcataatgcggcatcttatgggcatgttgacatagcggctttattgataaaatacaacacgtgtgtaaatgcaacagataagtgggcgtttactcccctccatgaagcagcccagaaaggaaggacgcagctgtgcgccctcctcctagcgcatggtgcagaccccaccatgaagaaccaggaaggccagacgcctctggatctggcaacagctgacgatatcagagctttgctgatagatgccatgcccccagaggccttacctacctgttttaaacctcaggctactgtagtgagtgcctctctgatctcaccagcatccaccccctcctgcctctcggctgccagcagcatagacaacctcactggccctttagcagagttggccgtaggaggagcctccaatgcaggggatggcgccgcgggaacagaaaggaaggaaggagaagttgctggtcttgacatgaatatcagccaatttctaaaaagccttggccttgaacaccttcgggatatctttgaaacagaacagattacactagatgtgttggctgatatgggtcatgaagagttgaaagaaataggcatcaatgcatatgggcaccgccacaaattaatcaaaggagtagaaagactcttaggtggacaacaaggcaccaatccttatttgacttttcactgtgttaatcagggaacgattttgctggatcttgctccagaagataaagaatatcagtcagtggaagaagagatgcaaagtactattcgagaacacagagatggtggtaatgctggcggcatcttcaacagatacaatgtcattcgaattcaaaaagttgtcaacaagaagttgagggagcggttctgccaccgacagaaggaagtgtctgaggagaatcacaaccatcacaatgagcgcatgttgtttcatggttctcctttcattaatgccattattcataaagggtttgatgagcgacatgcatacataggaggaatgtttggggccgggatttattttgctgaaaactcctcaaaaagcaaccaatatgtttatggaattggaggaggaacaggctgccctacacacaaggacaggtcatgctatatatgtcacagacaaatgctcttctgtagagtgacccttgggaaatcctttctgcagtttagcaccatgaaaatggcccacgcgcctccagggcaccactcagtcattggtagaccgagcgtcaatgggctggcatatgctgaatatgtcatctacagaggagaacaggcatacccagagtatcttatcacttaccagatcatgaagccagaagccccttcccagaccgcaacagccgcagagcagaagacctagtgaatgcctgctggtgaaggccagatcagatttcaacctgggactggattacagaggattgtttctaataacaacatcaatattctagaagtccctgacagcctagaaataagctgtttgtcttctataaagcattgctatagtgatgaatagtatgagtaactgatacatactcaactgctactgttccctttgaggaaatgtttacaggggcggccttttaacatatctcaggctcattttcattgcaattatccatttctaaaacaagattgcttcgatctagacttggaaatggaaaataagaaaaccaatgctttttcaaatgttcacaattcacacactacatttgttttgttatgcatgacgtgtctataacaaatatacacatacgacaggcaacaagcttgtttttgatttgccagacatgcatcattggctattgtttgtttgttttttgtttttttgtgttttttgggttactttgaaaatgagccagagccttcttgaggatattttgcacaaagtcacgctgacaaaatcattagcagtgcaacccaagcttctggctgagcaagattcagtttccactttttaaaatttttttattttgctctgtagctgcacttctcgttatcataaattgagatgaaaaggaaaaaacatcaagttttagtacctttttatgaattggcctatcttacaagagaagggcacaaacaccaacctgacttaggaacgcctaaattcagagaagtcaaagccggtgaaggccacttgctctttccaacacaagcctgccacagaggtcttcgggacagtactggagatgcaggttgacacgggcttgagttccaaggtgaaaaaactggggaggctgtgaaggaagagctgcattaaggagggtgaggagcgtgtggttctgtatcatggcagccccaatggatccaggggatgcctccaaaaaatacatgcttcccttcccttaatctgtactgttgggattgttacccctccaaattagctgccttatttcaaaagtcagtgaaattactgcacttgatgagggtcacaaaaataccacttgattgtttctttagttgagaatgctgggattcagactcgaatagtggatagatacacacaaatgcaaggacttttttgtttactccagatttggggtttattttgagtggcatgcttcaaatagttcataaagatccttgcattaaatttctgaaccatttcttcaaacttcttagtgtgtttagacaaggagaacaaaaattgaaaccaaagccctttctgttattttttcaatgaaggtgagaaagaaataccatacaattttctttgtgaaattactgtttattttcatcaacatttaccaagtgccattgacatttataaaaaaaaatgatcctttatagttcttacacttgcccttttcaccttaactgaatatgaattgagtgcactaacttatttacttgatatactgtgcatctactctgctttgaagcgaaagaaatataaacacgaggaggaataggaaagacagtgtgacacaaacttgccattgcaattcaaagccctgaaaacgatgggtttaatgcaaggtgattaagctgtgacctcctttaatctcctgaagcaaaataaaatggttacatgcaaaacttctagaaatagactcttaaaatatatacattttgctttgattttggcttcaacccagtgctggaactaggcatccagactagtttgaatgtttgtagctgaatttttatgggtcctcaaaattaaatcgagaattagcctcagttgttgcttcttttgaagtttcagtgacccaagctgggtgtttgtgtcttggctacttgtttaatagcactagaattccaggtgaagctttgagagttgatattcattaagagggctttttttccccttctttccttctcttttgctgtaacaaagggttgaagaaattgccatctgtgtagttttcagtagctgtcaagtgtgtcttacttaccttcccccagacgtagtttaaaatggtaaacacagctgtgatttttagttaagtaaaagagttaatatgatatagatatggaaagctttatggcttcattaaaaagataaaccactacctaactgtggttgtatgttgtttccatcatactaactagatgaatggatgcgccagttttcatcttggtccttacacttgagaagttaaactgtggttcagtatttaaactgccagtgttatacgtctcatgctctgtgtgccaggtgaaggtactgtgtaaggaagacatttgcggtgcttcttgtcctataatgattcaagtatatagtagttcttgaaagagtgtgcatatattactcatctgcttaagagagtgggttaatggatatatcagaggagccaaatacatttttttcagaacttgaaaaccaaaggtcatcatgagtgcactcaaaagttaggacaagtttattacatttgggattttcatctgtagccgtatgaagaaccctttccaatataaaagcatggcattaaattaggctgaagtcttttattttttgtatatgtactatatagaaatactagcaagttaggatcatccaatatggcctaccccgaaatggcccctctgtttccctaaccacatggaagaaagaatctgaacgtctccaccggctctacccgagttccaaaactaaagggcttctccagacctgatggttccagtttacctgctgttggcctgctggatacttgactcaggcataaattaagtgccctggtcccgaactttctccctgtatttgacctccttccctctttcctaaattactagtctggaattaaaattagctccagcaatgacctttgactccattcattttctcctcatcttgggtcttaaaaaaggagaccagatacctcctagcttttgtatcacaaccaggaatgggtattaggcctcatgcgctttgctcagaacactgccgctttgttaacaaatgacagcatggaacccagagttttgattcgatgcaaaataacagcagtgcaaccaggattcttgttttccttttccttcttggagtttggaatttctagcttttcaagcagcataagtagaatcaacattaggatgttttcatgaaatagcatccttatacttctttgagcttgatgttagtggctagactgatttccctttgctctcaaaatacaaagtgcattgaagtatacagagaaatgcctgaatatggcaagcaaataatgtagattaacattctattattgtatccgttttacaaaaaataaaattttgatatatgccggagaacggcattagaatgcaataagttgtctaggtttttctgtttcagtgtctctcccaatggcacgaagggttattgggcattgtccccacccccgcctttttaacatgtgcactatctggattcctgtaaatggccttgcaaacagaagtggtgtgtattttcaagcacctttcccccattgtatccgaatccctcttgtgtgatatctgtgacaaatagccttcttcttgtgttttctgttggactaattgtctcacgtaaagctatagaccttactaatttggcaggtattcaaaactgccattaagataggatttcatgtcagatacgtatttaaagagtaaagtcaaatttgtttaatgtcagatcagtgacagaagtgaaaagaaagtaattgtgaaagtgatgtttgagctattgtacacatctagcatatggaaagcaaatgcactcgaaaactactattctagaacatgaggcttcttcagcaacttgtgcactctgccattaataaattaaatttttcccctctagaaagccttaactatggcggaaactttttaaccttttatattttaataaataaaacattgtagtcccatttcttagtgtttgaaaggtgtgtcagtgagtcggccatgtctccatgtgtttcagacctgttcatcttattttatgatggtatatttcataagtaatattcccttacatgcaatggagctgattaaaattaatccatttcaatttctccatattggaacttcctcagctaccagatttctggtttggagaagtgctggaaagatttcaaagcctattcagttgtgtatgtggggatacgacagcaactgtgataccttgtagaatatgagtgatatgcaagctgtgttttttaattgttttaaaatgtaaattatggttatgctaaagtgaaaacctagaggaagctaatgattttatatactttgcacgaccaaatatggtcgtagtatgacgagttttatacattgccagagagttctgcctcctctgaaataacattcgcactgtagattgcatttcggcttttcctcctttcacattcttttttgctttacacttcacgtcttcgcacctgccctacctcccatcctttcaaagaggtttctttcacgttccagaattcagattgttctgtgatttcttttacatcagtctacccatttctgcaggcagccctgaaagcccttgtgttgattcagagtgtttgcagagaaatgcagttgaaccctggtagtggggtgtccctcacacacccgcgcacccctcccaaagttcaggatgaaaggctagaaaacccattcaaagttaggaaagaacacagatctttgaggccgatagcctagacctagaagatgaccttgagtatgtaaacattgtctccgtgacacaaaacactgaaactcttcatgtgcatataacacctgcttctgctcccattgtttcaagctcatcttatctttgtagtagtaatgtttgtctttgatacctacaaactaaaaaggtacttttatcaaggtttctcaaaacatttacaaaaccagctttgagaaaatgttatgttgcctggcaacagcactcggagtagtaattgtgttttctcattgtgatgttggtctgtgtgagcaaccagtgtagtgactctttggttcattattcgtgttgtttttatttttagtctctgtgtgacccaacagtggcaggggttacaaccccctctcctttcttttttgtatttatctatttgtaggattgtcagatcaagtacaagatgcccagttaagtttgaatttcagagaaacaatttcacgttaagaatgtttcatgcaatatttggcatatatttacagtaaaagcattcattatttgtctgaaattcaaatttaactgagcatgctggtttttctcattgtttggtttttctaaatctggcaatcctacagctgtggtcatgggaaatcacctacagcatgttaaagtcctctagtcatcatctcgtcacctgaaatggaagtcctttttccctcaccctccacttctttccaaaggagggcatcaaggaacttaacctgcctgcctggtgggtttctatttaagacatctttgtgattatatttaacctgcaattgtgctttggcttaatgtctagctcactgtacttgtaaatgattaatattcaataaaaccatttttaaagta

SEQ ID NO: 189113 - DNA, 574 bp, Homo sapiens
  Payload ID: 17346
  Gene Symbol: TNKS
  Gene Name: tankyrase, TRF1-interacting ankyrin-related ADP-ribose polymerase
  ENST ID: ENST00000517770
  CDS Start-End: 1-186
cttgggaaatcctttctgcagtttagcaccatgaaaatggcccacgcgcctccagggcaccactcagtcattggtagaccgagcgtcaatgggctggcatatgctgaatatgtcatctacagaggagaacaggtggatactctaaaggcacgacatctctgcagcattccagccaaaaatacatgatgcatacccagagtatcttatcacttaccagatcatgaagccagaagccccttcccagaccgcaacagccgcagagcagaagacctagtgaatgcctgctggtgaaggccagatcagatttcaacctgggactggattacagaggattgtttctaataacaacatcaatattctagaagtccctgacagcctagaaataagctgtttgtcttctataaagcattgctatagtgatgaatagtatgagtaactgatacatactcaactgctactgttccctttgaggaaatgtttacaggggcggccttttaacatatctcaggctcattttcattgcaattatccatttctaaaacaagattgcttcgatctagacttggaaatggaa

SEQ ID NO: 189114 - DNA, 1964 bp, Homo sapiens
  Payload ID: 17346
  Gene Symbol: TNKS
  Gene Name: tankyrase, TRF1-interacting ankyrin-related ADP-ribose polymerase
  ENST ID: ENST00000520408
  CDS Start-End: 27-1880
agtgacagtgctaggggagtccgaagatggcggcgtcgcgtcgctctcagcatcatcaccaccatcatcaacaacagctccagcccgccccaggggcttcagcgccgccgccgccacctcctcccccactcagccctggcctggccccggggaccaccccagcctctcccacggccagcggcctggcccccttcgcctccccgcggcacggcctagcgctgccggagggggatggcagtcgggatccgcccgacaggccccgatccccggacccggttgacggtaccagctgttgcagtaccaccagcacaatctgtaccgtcgccgccgctcccgtggtcccagcggtttctacttcatctgccgctggggtcgctcccaacccagccggcagtggcagtaacaattcaccgtcgtcctcttcttccccgacttcttcctcatcttcctctccatcctcccctggatcgagcttggcggagagccccgaggcggccggagttagcagcacagcaccactggggcctggggcagcaggacctgggacaggggtcccagcagtgagcggggccctacgggaactgctggaggcctgtcgcaatggggacgtgtcccgggtaaagaggctggtggacgcggcaaacgtaaatgcaaaggacatggccggccggaagtcttctcccctgcacttcgctgcaggttttggaaggaaggatgttgtagaacacttactacagatgggtgctaatgtccacgctcgtgatgatggaggtctcatcccgcttcataatgcctgttcttttggccatgctgaggttgtgagtctgttattgtgccaaggagctgatccaaatgccagggataactggaactatacacctctgcatgaagctgctattaaagggaagatcgatgtgtgcattgtgctgctgcagcacggagctgacccaaacattcggaacactgatgggaaatcagccctggacctggcagatccttcagcaaaagctgtccttacaggtgaatacaagaaagacgaactcctagaagctgctaggagtggtaatgaagaaaaactaatggctttactgactcctctaaatgtgaattgccatgcaagtgatgggcgaaagtcgactcctttacatctagcagcgggctacaacagagttcgaatagttcagcttcttcttcagcatggtgctgatgttcatgcaaaagacaaaggtggacttgtgcctcttcataatgcatgttcatatggacattatgaagtcacagaactgctactaaagcatggagcttgtgttaatgccatggatctctggcagtttactccactgcacgaggctgcttccaagaaccgtgtagaagtctgctctttgttacttagccatggcgctgatcctacattagtcaactgccatggcaaaagtgctgtggatatggctccaactccggagcttagggagagattgacttatgaatttaaaggtcattctttactacaagcagccagagaagcagacttagctaaagttaaaaaaacactcgctctggaaatcattaatttcaaacaaccgcagtctcatgaaacagcactgcactgtgctgtggcctctctgcatcccaaacgtaaacaagtgacagaattgttacttagaaaaggagcaaatgttaatgaaaaaaataaagatttcatgactcccctgcatgttgcagccgaaagagcccataatgatgtcatggaagttctgcataagcatggcgccaaggtgaggcacacacctgagcagagtgccagactcagcactgagcagccagctgctcttaacactgcttctctctctccgatttttctgaagaaactaattttataaaggactattagttcgtacttaaattcatggattctcctataaagctgatttagatcttgtttctaataaaaataattacccgtg

SEQ ID NO: 189115 - DNA, 3897 bp, Homo sapiens
  Payload ID: 17346
  Gene Symbol: TNKS
  Gene Name: tankyrase, TRF1-interacting ankyrin-related ADP-ribose polymerase
  ENST ID: ENST00000518281
  CDS Start-End: 432-3704
aataccgttgataaactgctatgtgtgcctggattgcctttgtcttgacaaattgtgtgagacaagtgaatctctccattatctttttattttcttttgacacggagtctcgctctgttgcccaggctggagtataggggcgcgatctcggctcattgcaagctccgcctcccgggttcacgccattctcctgcctcagcctccggagtagctgggactacaggcgcccgccaccacgcagggctaattttttgtatatttagtagagacgggtttcaccatgttagctaggatggtctcgatttcctgacctcgtgatccgcctgcttcggcctccctaaattacaggtgtgagccaccgcgcccggcggataattttttaagaggaacaaggttttggaaggaaggatgttgtagaacacttactacagatgggtgctaatgtccacgctcgtgatgatggaggtctcatcccgcttcataatgcctgttcttttggccatgctgaggttgtgagtctgttattgtgccaaggagctgatccaaatgccagggataactggaactatacacctctgcatgaagctgctattaaagggaagatcgatgtgtgcattgtgctgctgcagcacggagctgacccaaacattcggaacactgatgggaaatcagccctggacctggcagatccttcagcaaaagctgtccttacaggtgaatacaagaaagacgaactcctagaagctgctaggagtggtaatgaagaaaaactaatggctttactgactcctctaaatgtgaattgccatgcaagtgatgggcgaaagtcgactcctttacatctagcagcgggctacaacagagttcgaatagttcagcttcttcttcagcatggtgctgatgttcatgcaaaagacaaaggtggacttgtgcctcttcataatgcatgttcatatggacattatgaagtcacagaactgctactaaagcatggagcttgtgttaatgccatggatctctggcagtttactccactgcacgaggctgcttccaagaaccgtgtagaagtctgctctttgttacttagccatggcgctgatcctacattagtcaactgccatggcaaaagtgctgtggatatggctccaactccggagcttagggagagattgacttatgaatttaaaggtcattctttactacaagcagccagagaagcagacttagctaaagttaaaaaaacactcgctctggaaatcattaatttcaaacaaccgcagtctcatgaaacagcactgcactgtgctgtggcctctctgcatcccaaacgtaaacaagtgacagaattgttacttagaaaaggagcaaatgttaatgaaaaaaataaagatttcatgactcccctgcatgttgcagccgaaagagcccataatgatgtcatggaagttctgcataagcatggcgccaagatgaatgcactggacacccttggtcagactgctttgcatagagccgccctagcaggtcacctgcagacctgccgcctcctgctgagttacggctctgacccctccatcatctccttacaaggcttcacagcagcacagatgggcaatgaagcagtgcagcagattctgagtgagagtacacctatacgtacttctgatgttgattatcgactcttagaggcatctaaagctggagacttggaaactgtgaagcaactttgcagctctcaaaatgtgaattgtagagacttagagggccggcattccacgcccttacacttcgcagcaggctacaaccgcgtgtctgttgtagagtacctgctacaccacggtgccgatgtccatgccaaagacaagggtggcttggtgccccttcataatgcctgttcatatggacactatgaggtggctgagcttttagtaaggcatggggcttctgtcaatgtggcggacttatggaaatttacccctctccatgaagcagcagctaaaggaaagtatgaaatctgcaagctccttttaaaacatggagcagatccaactaaaaagaacagagatggaaatacacctttggatttggtaaaggaaggagacacagatattcaggacttactgagaggggatgctgctttgttggatgctgccaagaagggctgcctggcaagagtgcagaagctctgtaccccagagaatatcaactgcagagacacccagggcagaaattcaacccctctgcacctggcagcaggctataataacctggaagtagctgaatatcttctagagcatggagctgatgttaatgcccaggacaagggtggtttaattcctcttcataatgcggcatcttatgggcatgttgacatagcggctttattgataaaatacaacacgtgtgtaaatgcaacagataagtgggcgtttactcccctccatgaagcagcccagaaaggaaggacgcagctgtgcgccctcctcctagcgcatggtgcagaccccaccatgaagaaccaggaaggccagacgcctctggatctggcaacagctgacgatatcagagctttgctgatagatgccatgcccccagaggccttacctacctgttttaaacctcaggctactgtagtgagtgcctctctgatctcaccagcatccaccccctcctgcctctcggctgccagcagcatagacaacctcactggccctttagcagagttggccgtaggaggagcctccaatgcaggggatggcgccgcgggaacagaaaggaaggaaggagaagttgctggtcttgacatgaatatcagccaatttctaaaaagccttggccttgaacaccttcgggatatctttgaaacagaacagattacactagatgtgttggctgatatgggtcatgaagagttgaaagaaataggcatcaatgcatatgggcaccgccacaaattaatcaaaggagtagaaagactcttaggtggacaacaaggcaccaatccttatttgacttttcactgtgttaatcagggaacgattttgctggatcttgctccagaagataaagaatatcagtcagtggaagaagagatgcaaagtactattcgagaacacagagatggtggtaatgctggcggcatcttcaacagatacaatgtcattcgaattcaaaaagttgtcaacaagaagttgagggagcggttctgccaccgacagaaggaagtgtctgaggagaatcacaaccatcacaatgagcgcatgttgtttcatggttctcctttcattaatgccattattcataaagggtttgatgagcgacatgcatacataggaggaatgtttggggccgggatttattttgctgaaaactcctcaaaaagcaaccaatatgtttatggaattggaggaggaacaggctgccctacacacaaggacaggtcatgctatatatgtcacagacaaatgctcttctgtagagtgacccttgggaaatcctttctgcagtttagcaccatgaaaatggcccacgcgcctccagggcaccactcagtcattggtagaccgagcgtcaatgggctggcatatgctgaatatgtcatctacagaggagaacaggcatacccagagtatcttatcacttaccagatcatgaagccagaagccccttcccagaccgcaacagccgcagagcagaagacctagtgaatgcctgctggtgaaggccagatcagatttcaacctgggactggattacagaggattgtttctaataacaacatcaatattctagaagtccctgacagcctagaaataagctgtttgtcttctataaagcattgctatagtgatgaatagtatgagtaactgatacatactcaactgctactgttccctt

SEQ ID NO: 189116 - DNA, 2900 bp, Homo sapiens
  Payload ID: 17346
  Gene Symbol: TNKS
  Gene Name: tankyrase, TRF1-interacting ankyrin-related ADP-ribose polymerase
  ENST ID: ENST00000522110
  CDS Start-End: 9-740
gtccgaagatggcggcgtcgcgtcgctctcagcatcatcaccaccatcatcaacaacagctccagcccgccccaggggcttcagcgccgccgccgccacctcctcccccactcagccctggcctggccccggggaccaccccagcctctcccacggccagcggcctggcccccttcgcctccccgcggcacggcctagcgctgccggagggggatggcagtcgggatccgcccgacaggccccgatccccggacccggttgacggtaccagctgttgcagtaccaccagcacaatctgtaccgtcgccgccgctcccgtggtcccagcggtttctacttcatctgccgctggggtcgctcccaacccagccggcagtggcagtaacaattcaccgtcgtcctcttcttccccgacttcttcctcatcttcctctccatcctcccctggatcgagcttggcggagagccccgaggcggccggagttagcagcacagcaccactggggcctggggcagcaggacctgggacaggggtcccagcagtgagcggggccctacgggaactgctggaggcctgtcgcaatggggacgtgtcccgggtaaagaggctggtggacgcggcaaacgtaaatgcaaaggacatggccggccggaagtcttctcccctgcacttcgctgcaggtcagagacttttgaattgtttattaagggttatgggtttgggtgcagggtccggttaggacaagaaaacaggttattgtgatgggacaaagtgggggcgtggttatggttcttcatcacctcaccagaagactggaggttcctttcttttggtggtgcctgggtgatgggggcgtggttgggggggataagtgaatccaaggaattcttcagtggttgcacagtactcattacaaaactcactgtagttggtagtctctgcatatggatatatttacactttagtttttggtgtgcaggaatacagttagatttggacagctttagagtagttttgtcgtttgtgtgctagtttattttgtttttacaagggtatgtcctttgaggacagtccagaccaaaagaggtttaatacaacccaacacatgtttgaggatctattgtagccttaataacccaatgaaagacataaatgaagtgtttgaaagtttcccttcttctaaagaagtttgcagtctagacggggagaccaaaatatgccaatgtgaaacaactggagaagaatatttggatgcattatatgatgatggaagaaatataggctttgatgttgtggccactattatttgttgtctagcagaccatttacctcgtgtcagttgcctcagttttctcatgggcaaaaatcataaaatgatgttgtgcgagcatttggtgagaagtatctggcacaaagttctccctcaaaaagtgtgaatttcttaagctctggaccccacacttgtctttttttttttttttgcaagtagttgatgattttctctcaaagacacctaataatatgtttataaaataaagagaactgtaaaataaaaacaaaggaccataatctcactgcctggatacctattgttgatattttaaaaatgtaggtaataatgttttatacattagaaacattatattggaaatacatatattgtacgttatacaattcaaataggacagaaaaatacaaaatgaaaggcatcacacagaaacatcagagataacacaccagagataacttctgttaagtttctcctatatttctaatatatatatatatcacttcttcagtttgttctgttaacagtaaaacatgtgttgacccactgtagtatttatttttaccacacttgggagatatgattaaccattttacagatgacaaaagtgaagcatatatcgatcgcttaaataagtccaaattcagtcaggaaatagtggaaattgagtttgaattcaggcagtttgattttagagcttgtgaaatcaaacttaaactgtcagaaccctggattaaggtcacttttcatttttgtgagtaattgaagtgtagagttcccaatttttgggagaagtagtaatgcggaggggcttatatgcaagagagtagctttcacatgttttttattgtagcccatacttagaaatacattttacattgtcacatacgcaactgaatcaaaagtttctggaaacaatactttcccttaatacatgtgttgtcctctgatattttatattttattctgtttcatttttagcaaatgctgcttgtgatccattaatgggtcgtgaccagtggtatgagaaacacttaaaggaaatcattgttaggtcactggattcattattgatatacagacactacttattaggaatgcagtgaattgaatcagaaacagacttttgcctatttgtttgctcaagggtcttgcttgttttagatgaaatagcatttctttttccttaggctaaatgaaaggcctaagtctgattttattaatcaacagaggtgtctacttttgcatactttattccaagtttgcctattttaacaaattgcgtcacaaatcatgtcatttctcaccatcccactttatgcgtaatcaccaataaatgatagttatatttatgtgtattaatgtatttaggataagtcacacaaaatagtgcttgtttctcaaatcacgtgtcttctatttgccacaatagttacttgttattctgtttcagagttttatgtatatccagataagctagaagataaacaatcaaacagtaccgtaattatgttgtagttatgacaagctaaccttgaattggctttttaagaaagtttttagctcagttgtggaaaacacagtaataaaattctcgatatgaaaacataa

SEQ ID NO: 189117 - DNA, 503 bp, Homo sapiens
  Payload ID: 17346
  Gene Symbol: TNKS
  Gene Name: tankyrase, TRF1-interacting ankyrin-related ADP-ribose polymerase
  ENST ID: ENST00000518635
  CDS Start-End: 1-207
ggctgcctggcaagagtgcagaagctctgtaccccagagaatatcaactgcagagacacccagggcagaaattcaacccctctgcacctggcagcaggctataataacctggaagtagctgaatatcttctagagcatggagctgatgttaatgcccaggacaagggtggtttaattcctcttcataatgcggcatcttatgggtagtaaaagttggattccaagacctcctttccagcttgttgtaatgattaaatgagaccatgcatgtggaaattgcattaactaatgtaaggcattataaaaatgcaagcatgttgacatagcggctttattgataaaatacaacacgtgtgtaaatgcaacagataagtgggcgtttactcccctccatgaagcagcccagaaaggaaggacgcagctgtgcgccctcctcctagcgcatggtgcagaccccaccatgaagaaccaggaaggccagacgcctctggatctggcaacag

SEQ ID NO: 189118 - DNA, 6157 bp, Homo sapiens
  Payload ID: 17347
  Gene Symbol: TNKS2
  Gene Name: tankyrase, TRF1-interacting ankyrin-related ADP-ribose polymerase 2
  Uniprot ID: Q9H2K2
  ENST ID: ENST00000371627
  CDS Start-End: 380-3880
cgcgccgcctcgctagccgaaacctgcccagccggtgcccggccactgcgcacgcgcgggacgacgtcacgtgcgctcccggggctggacggagctggcaggaggggccttgccagcttccgccgccgcgtcgtttcaggacccggacggcggattcgcgctgcctccgccgccgcggggcagccggggggcagggagcccagcgaggggcgcgcgtgggcgcggccatgggactgcgccggatccggtgacagcagggagccaagcggcccgggccctgagcgcgtcttctccggggggcctcgccctcctgctcgcggggccggggctcctgctccggttgctggcgctgttgctggctgtggcggcggccaggatcatgtcgggtcgccgctgcgccggcgggggagcggcctgcgcgagcgccgcggccgaggccgtggagccggccgcccgagagctgttcgaggcgtgccgcaacggggacgtggaacgagtcaagaggctggtgacgcctgagaaggtgaacagccgcgacacggcgggcaggaaatccaccccgctgcacttcgccgcaggttttgggcggaaagacgtagttgaatatttgcttcagaatggtgcaaatgtccaagcacgtgatgatgggggccttattcctcttcataatgcatgctcttttggtcatgctgaagtagtcaatctccttttgcgacatggtgcagaccccaatgctcgagataattggaattatactcctctccatgaagctgcaattaaaggaaagattgatgtttgcattgtgctgttacagcatggagctgagccaaccatccgaaatacagatggaaggacagcattggatttagcagatccatctgccaaagcagtgcttactggtgaatataagaaagatgaactcttagaaagtgccaggagtggcaatgaagaaaaaatgatggctctactcacaccattaaatgtcaactgccacgcaagtgatggcagaaagtcaactccattacatttggcagcaggatataacagagtaaagattgtacagctgttactgcaacatggagctgatgtccatgctaaagataaaggtgatctggtaccattacacaatgcctgttcttatggtcattatgaagtaactgaacttttggtcaagcatggtgcctgtgtaaatgcaatggacttgtggcaattcactcctcttcatgaggcagcttctaagaacagggttgaagtatgttctcttctcttaagttatggtgcagacccaacactgctcaattgtcacaataaaagtgctatagacttggctcccacaccacagttaaaagaaagattagcatatgaatttaaaggccactcgttgctgcaagctgcacgagaagctgatgttactcgaatcaaaaaacatctctctctggaaatggtgaatttcaagcatcctcaaacacatgaaacagcattgcattgtgctgctgcatctccatatcccaaaagaaagcaaatatgtgaactgttgctaagaaaaggagcaaacatcaatgaaaagactaaagaattcttgactcctctgcacgtggcatctgagaaagctcataatgatgttgttgaagtagtggtgaaacatgaagcaaaggttaatgctctggataatcttggtcagacttctctacacagagctgcatattgtggtcatctacaaacctgccgcctactcctgagctatgggtgtgatcctaacattatatcccttcagggctttactgctttacagatgggaaatgaaaatgtacagcaactcctccaagagggtatctcattaggtaattcagaggcagacagacaattgctggaagctgcaaaggctggagatgtcgaaactgtaaaaaaactgtgtactgttcagagtgtcaactgcagagacattgaagggcgtcagtctacaccacttcattttgcagctgggtataacagagtgtccgtggtggaatatctgctacagcatggagctgatgtgcatgctaaagataaaggaggccttgtacctttgcacaatgcatgttcttatggacattatgaagttgcagaacttcttgttaaacatggagcagtagttaatgtagctgatttatggaaatttacacctttacatgaagcagcagcaaaaggaaaatatgaaatttgcaaacttctgctccagcatggtgcagaccctacaaaaaaaaacagggatggaaatactcctttggatcttgttaaagatggagatacagatattcaagatctgcttaggggagatgcagctttgctagatgctgccaagaagggttgtttagccagagtgaagaagttgtcttctcctgataatgtaaattgccgcgatacccaaggcagacattcaacacctttacatttagcagctggttataataatttagaagttgcagagtatttgttacaacacggagctgatgtgaatgcccaagacaaaggaggacttattcctttacataatgcagcatcttacgggcatgtagatgtagcagctctactaataaagtataatgcatgtgtcaatgccacggacaaatgggctttcacacctttgcacgaagcagcccaaaagggacgaacacagctttgtgctttgttgctagcccatggagctgacccgactcttaaaaatcaggaaggacaaacacctttagatttagtttcagcggatgatgtcagcgctcttctgacagcagccatgcccccatctgctctgccctcttgttacaagcctcaagtgctcaatggtgtgagaagcccaggagccactgcagatgctctctcttcaggtccatctagcccatcaagcctttctgcagccagcagtcttgacaacttatctgggagtttttcagaactgtcttcagtagttagttcaagtggaacagagggtgcttccagtttggagaaaaaggaggttccaggagtagattttagcataactcaattcgtaaggaatcttggacttgagcacctaatggatatatttgagagagaacagatcactttggatgtattagttgagatggggcacaaggagctgaaggagattggaatcaatgcttatggacataggcacaaactaattaaaggagtcgagagacttatctccggacaacaaggtcttaacccatatttaactttgaacacctctggtagtggaacaattcttatagatctgtctcctgatgataaagagtttcagtctgtggaggaagagatgcaaagtacagttcgagagcacagagatggaggtcatgcaggtggaatcttcaacagatacaatattctcaagattcagaaggtttgtaacaagaaactatgggaaagatacactcaccggagaaaagaagtttctgaagaaaaccacaaccatgccaatgaacgaatgctatttcatgggtctccttttgtgaatgcaattatccacaaaggctttgatgaaaggcatgcgtacataggtggtatgtttggagctggcatttattttgctgaaaactcttccaaaagcaatcaatatgtatatggaattggaggaggtactgggtgtccagttcacaaagacagatcttgttacatttgccacaggcagctgctcttttgccgggtaaccttgggaaagtctttcctgcagttcagtgcaatgaaaatggcacattctcctccaggtcatcactcagtcactggtaggcccagtgtaaatggcctagcattagctgaatatgttatttacagaggagaacaggcttatcctgagtatttaattacttaccagattatgaggcctgaaggtatggtcgatggataaatagttattttaagaaactaattccactgaacctaaaatcatcaaagcagcagtggcctctacgttttactcctttgctgaaaaaaaatcatcttgcccacaggcctgtggcaaaaggataaaaatgtgaacgaagtttaacattctgacttgataaagctttaataatgtacagtgttttctaaatatttcctgttttttcagcactttaacagatgccattccaggttaaactgggttgtctgtactaaattataaacagagttaacttgaaccttttatatgttatgcattgattctaacaaactgtaatgccctcaacagaactaattttactaatacaatactgtgttctttaaaacacagcatttacactgaatacaatttcatttgtaaaactgtaaataagagcttttgtactagcccagtatttatttacattgctttgtaatataaatctgttttagaactgcagcggtttacaaaattttttcatatgtattgttcatctatacttcatcttacatcgtcatgattgagtgatctttacatttgattccagaggctatgttcagttgttagttgggaaagattgagttatcagatttaatttgccgatgggagcctttatctgtcattagaaatctttctcatttaagaacttatgaatatgctgaagatttaatttgtgatacctttgtatgtatgagacacattccaaagagctctaactatgataggtcctgattactaaagaagcttctttactggcctcaatttctagctttcatgttggaaaattttctgcagtccttctgtgaaaattagagcaaagtgctcctgttttttagagaaactaaatcttgctgttgaacaattattgtgttcttttcatggaacataagtaggatgttacatttccagggtgggaagggtaatcctaaatcatttcccaatctattctaattaccttaaatctaaaggggaaaaaaaaaatcacaaacaggactgggtagttttttatcctaagtatattttttcctgttctttttacttggttttattgctgtatttatagccaatctatacatcatgggtaaacttaacccagaactataaaatgtagttgtctcagtcccctccaggcctcctgaatgggcaagtgcagtgaaacaggtgcttcttgctcctgggttttctctccatgatgttatgcccaattggaaatatgctgtcagtttgtgcaccatatggtgaccacgcctgtgctcagtttggcagctatagaaggaaatgctgtcccataaaatgccattcctattttctaatataaaactcttttccaggaagcatgcttaagcatcttgttacagagacatacatccattatggcttggcaatctcttttatttgttgactctagctcccttcaaagtcgaggaaagatctttactcacttaatgaggacattccccatcactgtctgtaccagttcacctttattttacgttttattcagtctgtaaattaactggccctttgcagtaacttgtacataaagtgctagaaaatcatgttccttgtcctgagtaagagttaatcagagtaaatgcatttctggagttgtttctgtgatgtaaattatgatcattatttaagaagtcaaatcctgatcttgaagtgctttttatacagctctctaataattacaaatatccgaaagtcatttcttggaacacaagtggagtatgccaaattttatatgaatttttcagattatctaagcttccaggttttataattagaagataatgagagaattaatggggtttatatttacattatctctcaactatgtagcccatattactcaccctatgagtgaatctggaattgcttttcatgtgaaatcattgtggtctatgagtttacaatactgcaaactgtgttattttatctaatccattgcttaatgagtgtgtttttccatgaatgaatataccgtggttcatatgttagcatggcagcattttcagatagctttttgtttgttgggaagttggggttttggggggagggggagtattagtacgttgcatgaaatagcttactttataatgatggaattgctttttcttttgtcttgtgatttttttttttgaagtgaaatttaactttttgtgcaagtagtactattatacccatcttcagtgtcttacttgtactgtatcacattccataccctcatttaattcttaataaaactgttcacttgtt

SEQ ID NO: 189119 - DNA, 12407 bp, Homo sapiens
  Payload ID: 17348
  Gene Symbol: TAOK1
  Gene Name: TAO kinase 1
  Uniprot ID: Q7L7X3
  ENST ID: ENST00000261716
  CDS Start-End: 520-3525
cttaccaggggtggtgttggtggcggagggctgcgcgtgggcccgcccgccgaggggccgcggcgggggaccgagagggcctcggctgtgtgaggactagaggcggccgaggcccgggccggttcccccgaggcggcgacggagacggctcccggcacttccccgcgccatcttaactgagcccaagcgctgagggcgcctcctcgaccccggtcgtcccctcgcccccccccccaccccccgccgccgccgccccttgttgcagagcttgggctgggcggcttgctggggctcgggggtggggggcggcgatctgtcgccgggccccctcctcctcctcactcctcaccctccagggtagcggctaccggagcgctgcagggggctgcgcctgcctgctccgccccagacctgtcggcgaaaggtagtttatgccaacgtgacttcattcatacagatgaaccaaggatcgggatagcagtataaaattagaatcaagacagctgactgctcagcaggatgccatcaactaacagagcaggcagcctgaaggaccctgaaattgcagagctcttcttcaaagaagatccagagaagctcttcacagatctcagagaaattggccatggaagctttggagcagtgtattttgcacgagatgtgcgtaccaatgaagtggtggccatcaagaaaatgtcttatagtggaaagcagtctactgagaaatggcaggatattattaaggaagtcaagtttctacaaagaataaaacatcccaacagtatagaatacaaaggctgttatttacgtgaacacacagcatggcttgtaatggaatattgtttaggatctgcttcggatttactagaagttcacaaaaagccattacaagaagtggaaatagcagcaattacacatggtgctcttcagggattagcctacttacattctcatactatgattcatagagatatcaaagcaggaaatatccttctgacagaaccaggccaggtgaaacttgctgactttggctctgcttccatggcatcacctgccaattcctttgtgggaacgccgtattggatggccccagaagtaattttagccatggatgaaggacaatatgatggcaaagtagatgtgtggtctcttggaataacatgtattgaactagcggaaaggaagcctcctttatttaatatgaatgcaatgagtgccttatatcacatagcccaaaatgaatcccctacactacagtctaatgaatggtctgattattttcgcaactttgtagattcttgcctccagaaaatccctcaagatcgacctacatcagaggaacttttaaagcacatatttgttcttcgggagcgccctgaaaccgtgttaatagatctcattcagaggacaaaggatgcagtaagagagctggacaatctgcagtatcgaaagatgaagaaactccttttccaggaggcacataatggaccagcagtagaagcacaggaagaagaagaggaacaagatcatggtgttggccggacaggaacagttaatagtgttggaagtaatcaatccattcccagcatgtccatcagtgccagcagccaaagcagtagtgttaacagtcttccagatgtctcagatgacaagagtgagctagacatgatggagggagaccacacagtgatgtctaacagttctgttatccatttaaaaccagaggaagaaaattacagagaagagggagatcctagaacaagagcatcagatccacaatctccaccccaagtatctcgtcacaaatcacactatcgtaatcgagaacactttgctactatacggacagcatcactggttacgaggcaaatgcaagaacatgagcaggactctgagcttagagaacaaatgtctggctataagcgaatgaggcgacaacatcaaaagcaactgatgactctggaaaacaagctaaaggctgagatggatgaacatcgcctcagattagacaaagatcttgaaactcagcgtaacaattttgctgcagaaatggagaaacttatcaagaaacaccaggctgccatggagaaagaggctaaagtgatgtccaatgaagagaaaaaatttcagcaacatattcaggcccaacagaagaaagaactgaatagttttctcgagtcccagaaaagagagtataaacttcgaaaagagcagcttaaagaggagctaaatgaaaaccagagtacccccaaaaaagaaaaacaggagtggctttcaaagcagaaggagaatatacagcatttccaagcagaagaagaagctaaccttcttcgacgtcaaagacaatacctagagctggaatgccgtcgcttcaagagaagaatgttacttgggcgtcataacttagagcaggaccttgtcagggaggagttaaacaaaagacagactcagaaggacttagagcatgccatgctactccgacagcatgaatctatgcaagaactggagttccgccacctcaacacaattcagaagatgcgctgtgagttgatcagattacagcatcaaactgagctcactaaccagctggaatataataagcgaagagaacgagaactaagacgaaagcatgtcatggaagttcgacaacagcctaagagtttgaagtctaaagaactccaaataaaaaagcagtttcaggatacctgcaaaatccaaaccagacagtacaaagcattaagaaatcacctgctggagactacaccaaagagtgagcacaaagctgttctgaaacggctcaaggaggaacagacccggaaattagctatcttggctgagcagtatgatcacagcattaatgaaatgctctccacacaagccctgcgtttggatgaagcacaggaagcagagtgccaggttttgaagatgcagctgcagcaggaactggagctgttgaatgcgtatcagagcaaaatcaagatgcaagctgaggcacaacatgatcgagagcttcgcgagcttgaacagagggtctccctccggagggcactcttagaacaaaagattgaagaagagatgttggctttgcagaatgagcgcacagaacgaatacgaagcctgttggaacgtcaagccagagagattgaagcttttgactctgaaagcatgagactaggttttagtaatatggtcctttctaatctctcccctgaggcattcagccacagctacccgggagcttctggttggtcacacaaccctactgggggtccaggacctcactggggtcatcccatgggtggcccaccacaagcttggggccatccaatgcaaggtggaccccagccatggggtcacccttcagggccaatgcaaggggtacctcgaggtagcagtatgggagtccgcaatagcccccaggctctgaggcggacagcttctgggggacggacggagcagggcatgagcagaagcacgagtgtcacttcacaaatatccaatgggtcacacatgtcttatacataacttaataattgagagtggcaattccgctggagctgtctgccaaaagaaactgcctacagacatcatcacagcagcctcctcacttgggtactacagtgtggaagctgagtgcatatggtatattttattcatttttgtaaagcgttctgttttgtgtttactaattgggatgtcatagtacttggctgccgggtttgtttgtttttggggaaattttgaaaagtggagttgatattaaaaataaatgtgtatgtgtgtacatatatatacacacacatacacatatattatgcatgtggtgaaaagaattggctagataggggatttttctgaacactgcaaaaatagaacgtagcaaaatggcttcagttatcacttttgggtgtctgtatcctaagaagtttctgaaaagatctaaagcctttttatcccatatcccaaattcttatgagccactcacagcaggcagcatatgttgaaataagttattactggtacacacctgcattgcctcaccagtgtatttatttgttattaaattgatctgacttctcagcctcatttggactaaaaaaagaaagcagaaatccatgaacacattgcttctcggccttttggctaagatcaagtgtagaaatccatgaacactaaaggacttcattgattttttcagagagtagaaaacaacttagtttttcttttttcctgaatgcgtcataggcttgtgagtgatttttgtccattcaattgtgccttctttgtattatgataagatgggggtacttaaggagatcacaagttgtgtgaggattgcattaacaaacctatgagccttcaatggggaagaccagaagggtgagaggggccctgaaagttcatatggtgggtatgtcccgcagcagagtgaggagatgaagcttacgtgtcctgacgttttgttgcttatactgtgatatctcatcctagctaagctctataatgcccaagaccccaaacagtacttttactttgtttgtacaaaaacaaagacatatagccaatacaaatcaaatgccggaggtgtttgatgccatatttgcaaattgccatctattgaaattctcgtcacactacatagacataattgttatctccttttggcttatgtgattttctgtttacaagtagaatagccaattatttaaatgtttagttgccacagtgaaccaggagtcactgagccaatgactttaccagctgctgactaatcttcatcaccactgtagattttgctgcatgtgcaggtcctctatttttaattgctgttttcgttgctgcagtactttacaaacttctagttcgttgagacttagtgaccatttggcatcaagttaacatcacacaataggaaacaccacttccacaagtctcaagcctcagtgctaaagtactactgaaaaggaactaggaagtttggccaattaaaaaaaaaaagtaaaataagttatagtggtcagggaatctcttgacgaaagctaactcttatttttcagggggcacatgttttgttttgttatgttttgttgtacaatgaaggatgaacccaatgctaaaaagtcagttattttcttggttttccatttcttgtatataaattgtgttggaggtgggtaggaagctgtgagtatgacttgaagaaaaatatccttttcagtgacaaatcagagtttcttacaagttattgtcctgctcccttccaagttgtcttgaagaatccttgctgctaactctggatcctgcttttcctatagtcagagggctccaaggtagaactctctaagtccctctcaatggcactctttgcctagaccaaactaatgaccaaacagtaatcaatctatcactgttgaagtcctggttttctcaaccaaattttaagtctttcccaggtatgtcagtcgagttgccatgaatcctcacctgtaggagtttctgggattcattttaaggaaactggaagaaaattaatgttttaatgtaaatgtttttaaaaccaagatcaccatagagttcacacaaaattttaggcagtgtttcaagaagcactcttatgtgttgttctttcagcccatgctccaggtcaccggtttttaggtaaacatgacatgacatgtacttgtaatatcagtgaaaggggcttttagtcgtctcagtatcttttttgcattcaggtattatagcgtttccaacaaattgagaaattacttatttggtgtaaaatgacgagagagctttagaatttaataaaatgtcaaaaatacaatttgatacccttaaaaattattcatagatctggctgctctgtactactggatgggtggaatagggaagcagatcacttttgcatacaaaaactctttcaaacccaaaatattattggtggtacattttaaagtccaattgtggacttaaattagtcaaattgagagttactgagtccattcagatctccagtagggttttgtatctaatgtatttggccaccagttttacatgtaggtcatgactatacctggattttatcattaagttaactttaaagtatatacagtttgcaaaaaatgattcaaattaattggtttgtatatgtttgtgagatctagcttctgaggaatctcatacatagtaggaaccatcatagagtaaagcttgtagcagaaaaattggaagggttttgagatatcctagagaaagagcaagcactttctgaatcagtggggaaatatcaatatttgatcaaattaacactacctccttcccagtgttggtgttcactcactatatgtctttaagaaaattaaaactatggaaaatttgtctagcatatcagaagttgtaaatgctatatctggtatccagaggctggctgtaaaaagttccttggggtcactctatctcacattttttttggttagcattttaaaaatgcaaagccacatactttgaaatatattattccaaattgagctcccttccctttgcacatattttttcctccccttattgaagtcagctctaaccccaaattctagtatccaaaagtatttttatttgtataatgctatctgaaaaatgtgtttatattatattttcagagctgcaattcttattcgccatttcaatacctagagatagagagtcttgtatttgaagccacacacactggtgtaatatgcttagtactctaggtcaaggatttgttggtaaatggaacattttagcatagtcatgatttttggttgcctagacatcaggtaaacattcagtacactaaagaaactatcctggacactccctcctgcttccaccaatttttttctcacccccttttcaaaaattgaaaactctatgagtgtctttttgagaccataaagcagactttagtaactttctatttctgtaagtactaaatgtctggcattttaaacttttgtagaatacattatgttggacactggaataatactatttattttcacctgtgaaaaatgacttcattgtacttgaaacacctcctttgcatttctccatttgtgccattcactagtggaaataaattgtattataccatgatctactggctttttaaaactgtattaaatatgcacatttttggtatagctattatcatttgtatgtatatattgtatatacatatgagtgtctgtatgtgtgtatagatggatggatgtaactcatactgtacatttccatcagggcacttaaaagttctgttatttttgtttggttttgttatttcagtcctcagttaaggcaagaatgcatgtgtttcttaagaatgagtactctgcgttgatgtttatgagaaggtggtcattagatgcagtcttttcctttttaatcccctcttagcacttctgtgagtggagaggacattaagtaaaatttggaatcataagttgcaatgcagtaaaatggtgctggggaaggagccagttagtgtttctgtgagtttgtgttgtgatgcaataagagataagtaatgcagagagaaatgaaccatggaaagtaagaacactgatggtgattcctctgcaaagatgataagaaaaagaaccaataaatcacacaatctttatgtgctttctatatgtatttcttagtagtgataccattgatcctcttactttttttactccattaatactaataattatatactttgctgaggatcaaaacagccaagaaaggaattactgctaaagcatctaagattctcctgaactgtaaaatcaacaggaaatggccactgggagagaaggatttggtattgggtgaggggctttctccctttacctgcctcttcttgcttgctaatagtaagttctttgtgcaccttccaccacttctgagccactactattcaagtagagatttgccccaacacattaactttttccttggagatttatatggtcctgcattttgtcctgtgctcacaatgtgaagtgtcttctgtattcaaatcaaaaaataatatatttaaggtatataagtgtgaatctcctataatgatggaagaagaggttctcttgtcttagatagaaaagagccttctccaagagcaatgtcaaaacttgggctgtcatctttgagctgtttaccaaaatacagaccattattgaagaaaaacaaattatctattttgttttcccccatctaacatgatagtgcccccaaccaggttgtagcattgccttttaaaagagactcactcactcttagtttttaagaactggaaatttcccatcctcagatcccttaaaggatgaagagttggctgtacacttagcggacttgcctcttgtatgcaaggactactgattgaagtctgttttgctgtgtctggttatgttgtctgcacttttatgaaatcactacaataggtctgcattggaaatgactattaatttgtaaagaagtaagttttattaaacactgtctagaaaaagaaagtgaagctgagaactcttcctttattgtgcatttatattttctgctgaattccggtagttccctttaaagtcatgttgactaatgttttcctccttgtttgtattcagatttccaaaatttcactcatacaagggaagagactccatttagcttaacggtagtctttagatcataagaaatatataaattagtatgcaccttatctgcctgttgtgggtttcttaaacttgcacttcctacccacccaaagatagatatcctttaaagaaaataaaggcagagaattaaaactggggagccatttactatgtcaccatcactgttaactgtttcccagcaatctaaactttttgaagtttcagaggtgtattttttttttgtatatatgtctgtgtgattgtattgttttgtttctaaatatacaaggaattctttaaatagagaaaaaggttaatcctcactgaaacaccaggatgcccactggatatactaatctgaacatctgtaggtagtttgtcatgaaaaagtggagagaagatgagacttttgaatgaatgaaaaagggtatcttgatacccagaattccccccaaagtacgggtaattcaacctgcacagttttctttcactcaaagtgttcagcacttgtgagtgaaaaatcatgtaattatctgtaaatatgtagctaacaaattgacctagtttctgtatttttttgtttttgtactaaagtttataggtctgtgccagctagagagaagttgctgtcattaccagttgtggtcctagcatctaaccctgaaaccatcctaggtgacatttttagaattaatacttaaatgttaaacagggggaaatgaagcttaatcatggtcaggtttgagatcttttgcagtgaaataattttatttaatataaatgatcacatgtcctcaatcatgaatgaggtagggagcctctctcccccagtggccatgtttacaaaagtgtgttttgtctataaagtgcaagtgttttaatgtttatgtaaattatgcaggtgataacatggtttggaactgtttattgggctctttaactgaattttcaaatgaaatgaactatgcttattgctggcacattgatcccatttctggaacatttttcctatttccagagttacatatgttcttttgtcattacccaatttaacctccctttctctgatatgccttgtagccaaagtattaaaggctgatgaacatagacaagggaaatgcatttcttagaaatccgtgaaccctcagttgtatgctttcagtactcgtgttaatatgtttctatggcaactctgaggtcagtggtttagaaatgagataccagtgttaatgaaaagtgtgtgctctttgcttttgcatggcttggcttagtatccaaggtatattagggccacttgaaagcatgaagaccagttatatagggaacaggtttctctcagtggcacattttgctttttctgagccccaaatacattgcctgggcatgaacattgttaccgtaaattgcacatggtcatggactgaattatgtgactttaaaggatgtaactgcccaacatttgcagattctgggtggtctatgtgaccatttgtctcgtatccaaaaaccccggggctattggaacccttccaacactttttcctttgtcatagacaagtttatatataacttaccaagatgttggctgtcctggtgtattgccagacagctctcttttggttcccattccaaatgtgctgctgtccttctttgcatttcacaatatcaaagaaaccaccacccttcttcctaacagcattttatgccttttattccacattaaatgggaattgtgcctacttaggagtgcccctccaattaattacatgtgtccaagaataatccaagctagagacacaaggtgggaaaacatttcaaaaaaaaaaagtcctcttaaggccagtaatttatctgaaaaggtattttatcacaccttgacaccttatatatgagcctattaggagctgcaggtggtttcatagggtaaaatccaagaaaagagaaggatgtgtggggtttctattagaagataattttgttctcattttaccttttcttttatgatccttctctgctagaacaggttaattctccaaatttgttttgttttgttttgttattttttagggaactcttttgcaaaagcaatggtcggatgtaaataacatttaaagtatagtgcacataacttccccggactgttccaatctgataatttgtaaatgctttagagtttttttaattaacacttgtgttgctaaattctatttatgtaagtctgctaaagttttttagcccacttaaaacttaagacaaccatttaaaataatggatgggttactatgagcaatttcgctttcagaacccccttgttttagtatatgaaaaagcctaatgcgcattaatgaggttgaagagactatgagaaatatgtatagtgtatattttaaaacagctttgcttgtattgtgaagatttaaaaacaaacttgagatttttaacgtaactattaacacagttttaacataagttatcccactgggtttaagagcatcttgaatgtataatcctttttgtaacccaggttggtttctacttttaccagtcacccaaacatatttatgtttttagttttatgtactcatttccctttgttttcctcaaacagcatgatttttttgcacatgtagaaattttttaaaagaaagaaattagtacatcattttctctggattttcttcacttccctcttcctttctactaactccttccttaaaggccatatcactccatttgcattatttgtgcaaatgccagggttggtttttatttttatttttgctatttacctaaaaaaagaaaatgcttcagtcaattgcttttttatttaaaaaaaaaaagaaaaaaagctgtaaccttatcatttctgagtagaccattgagcgatgaatgcacacctgtagtagcccaggaccagctgtggtggctaaagggaatatgttaattaagcaagaggttcttttctaaaagtggtatctgttatccacaatgtattttagttattcccacaagtcaggggtccagataaaatgagggttatcagctaactgatatgctatcattgaggttcatcaatgaatttgtacatttctagttccctttggtgaagggaaaaatgatgattttgcaagacctagattttggcttggtttcttgcctccttttttggcagccttcatcttctcatctcccaaaccccctgagcccgtagggttttcatagtggacaaagaacttgtggtcttttaaaactgggactgatacttttttgagagagtatcgtgtcgaaagtgtgatgttctaccactttaccaataactaattttaaatacacattgtcctctcgatttttggaccaaacagacgctcacagtggaggcttatcaagggttgcattggggaagaagcctctccctctctgtcagcaccagctggtaaaggtgactgtacagatgtgcattttccttttggtataaatggtccacagcactaactggtaaggcttattgtacagtatattgtcagtattcttctggttcagcataccttatagttcatatataacctgtattaattgtatagattgtgcattaaaagctgttaccaagttgtcagaacataagagcgaaaacaaggtcatatgtaatattttgtttgtaagtatcctttgtatcatagcaaaggaaatgtttaaaaaaatcaactgtaataaagtaattttagtacacag

SEQ ID NO: 189120 - DNA, 4068 bp, Homo sapiens
  Payload ID: 17348
  Gene Symbol: TAOK1
  Gene Name: TAO kinase 1
  Uniprot ID: Q7L7X3
  ENST ID: ENST00000536202
  CDS Start-End: 189-2750
ctcctcctcactcctcaccctccagggtagcggctaccggagcgctgcagggggctgcgcctgcctgctccgccccagacctgtcggcgaaaggtagtttatgccaacgtgacttcattcatacagatgaaccaaggatcgggatagcagtataaaattagaatcaagacagctgactgctcagcaggatgccatcaactaacagagcaggcagcctgaaggaccctgaaattgcagagctcttcttcaaagaagatccagagaagctcttcacagatctcagagaaattggccatggaagctttggagcagtgtattttgcacgagatgtgcgtaccaatgaagtggtggccatcaagaaaatgtcttatagtggaaagcagtctactgagaaatggcaggatattattaaggaagtcaagtttctacaaagaataaaacatcccaacagtatagaatacaaaggctgttatttacgtgaacacacagcatggcttgtaatggaatattgtttaggatctgcttcggatttactagaagttcacaaaaagccattacaagaagtggaaatagcagcaattacacatggtgctcttcagggattagcctacttacattctcatactatgattcatagagatatcaaagcaggaaatatccttctgacagaaccaggccaggtgaaacttgctgactttggctctgcttccatggcatcacctgccaattcctttgtgggaacgccgtattggatggccccagaagtaattttagccatggatgaaggacaatatgatggcaaagtagatgtgtggtctcttggaataacatgtattgaactagcggaaaggaagcctcctttatttaatatgaatgcaatgagtgccttatatcacatagcccaaaatgaatcccctacactacagtctaatgaatggtctgattattttcgcaactttgtagattcttgcctccagaaaatccctcaagatcgacctacatcagaggaacttttaaagcacatatttgttcttcgggagcgccctgaaaccgtgttaatagatctcattcagaggacaaaggatgcagtaagagagctggacaatctgcagtatcgaaagatgaagaaactccttttccaggaggcacataatggaccagcagtagaagcacaggaagaagaagaggaacaagatcatggtgttggccggacaggaacagttaatagtgttggaagtaatcaatccattcccagcatgtccatcagtgccagcagccaaagcagtagtgttaacagtcttccagatgtctcagatgacaagagtgagctagacatgatggagggagaccacacagtgatgtctaacagttctgttatccatttaaaaccagaggaagaaaattacagagaagagggagatcctagaacaagagcatcagatccacaatctccaccccaagtatctcgtcacaaatcacactatcgtaatcgagaacactttgctactatacggacagcatcactggttacgaggcaaatgcaagaacatgagcaggactctgagcttagagaacaaatgtctggctataagcgaatgaggcgacaacatcaaaagcaactgatgactctggaaaacaagctaaaggctgagatggatgaacatcgcctcagattagacaaagatcttgaaactcagcgtaacaattttgctgcagaaatggagaaacttatcaagaaacaccaggctgccatggagaaagaggctaaagtgatgtccaatgaagagaaaaaatttcagcaacatattcaggcccaacagaagaaagaactgaatagttttctcgagtcccagaaaagagagtataaacttcgaaaagagcagcttaaagagtctaaagaactccaaataaaaaagcagtttcaggatacctgcaaaatccaaaccagacagtacaaagcattaagaaatcacctgctggagactacaccaaagagtgagcacaaagctgttctgaaacggctcaaggaggaacagacccggaaattagctatcttggctgagcagtatgatcacagcattaatgaaatgctctccacacaagccctgcgtttggatgaagcacaggaagcagagtgccaggttttgaagatgcagctgcagcaggaactggagctgttgaatgcgtatcagagcaaaatcaagatgcaagctgaggcacaacatgatcgagagcttcgcgagcttgaacagagggtctccctccggagggcactcttagaacaaaagattgaagaagagatgttggctttgcagaatgagcgcacagaacgaatacgaagcctgttggaacgtcaagccagagagattgaagcttttgactctgaaagcatgagactaggttttagtaatatggtcctttctaatctctcccctgaggcattcagccacagctacccgggagcttctggttggtcacacaaccctactgggggtccaggacctcactggggtcatcccatgggtggcccaccacaagcttggggccatccaatgcaaggtggaccccagccatggggtcacccttcagggccaatgcaaggggtacctcgaggtagcagtatgggagtccgcaatagcccccaggctctgaggcggacagcttctgggggacggacggagcagggcatgagcagaagcacgagtgtcacttcacaaatatccaatgggtcacacatgtcttatacataacttaataattgagagtggcaattccgctggagctgtctgccaaaagaaactgcctacagacatcatcacagcagcctcctcacttgggtactacagtgtggaagctgagtgcatatggtatattttattcatttttgtaaagcgttctgttttgtgtttactaattgggatgtcatagtacttggctgccgggtttgtttgtttttggggaaattttgaaaagtggagttgatattaaaaataaatgtgtatgtgtgtacatatatatacacacacatacacatatattatgcatgtggtgaaaagaattggctagataggggatttttctgaacactgcaaaaatagaacgtagcaaaatggcttcagttatcacttttgggtgtctgtatcctaagaagtttctgaaaagatctaaagcctttttatcccatatcccaaattcttatgagccactcacagcaggcagcatatgttgaaataagttattactggtacacacctgcattgcctcaccagtgtatttatttgttattaaattgatctgacttctcagcctcatttggactaaaaaaagaaagcagaaatccatgaacacattgcttctcggccttttggctaagatcaagtgtagaaatccatgaacactaaaggacttcattgattttttcagagagtagaaaacaacttagtttttcttttttcctgaatgcgtcataggcttgtgagtgatttttgtccattcaattgtgccttctttgtattatgataagatgggggtacttaaggagatcacaagttgtgtgaggattgcattaacaaacctatgagccttcaatggggaagaccagaagggtgagaggggccctgaaagttcatatggtgggtatgtcccgcagcagagtgaggagatgaagcttacgtgtcctgacgttttgttgcttatactgtgatatctcatcctagctaagctctataatgcccaagaccccaaacagtacttttactttgtttgtacaaaaacaaagacatatagccaatacaaatcaaatgccggaggtgtttgatgccatatttgcaaattgccatctattgaaattctcgtcacactacatagacataattgttatctccttttggcttatgtgattttctgtttacaagtagaatagccaattatttaaatgtttagttgccacagtgaaccaggagtcactgagccaatgactttaccagctgctgactaatcttcatcaccactgtagattttgctgcatgtgcaggtcctctatttttaattgctgttttcgttgctgca

SEQ ID NO: 189121 - DNA, 526 bp, Homo sapiens
  Payload ID: 17348
  Gene Symbol: TAOK1
  Gene Name: TAO kinase 1
  ENST ID: ENST00000583121
  CDS Start-End: 289-526
gtcccgctcgccctgcgcccttcgcgggccgaaagcactaggcactcgcgaacatctgaggcctcccggccccgggggaccccgccccgccgtccgccggccggcccgcggcctctcttccctttggtagcggctaccggagcgctgcagggggctgcgcctgcctgctccgccccagacctgtcggcgaaaggtagtttatgccaacgtgacttcattcatacagatgaaccaaggatcgggatagcagtataaaattagaatcaagacagctgactgctcagcaggatgccatcaactaacagagcaggcagcctgaaggaccctgaaattgcagagctcttcttcaaagaagatccagagaagctcttcacagatctcagagaaattggccatggaagctttggagcagtgtattttgcacgagatgtgcgtaccaatgaagtggtggccatcaagaaaatgtcttatagtggaaagcagtctactgagaaatggcaggatattattaaggaagtcaagtttc

SEQ ID NO: 189122 - DNA, 4246 bp, Homo sapiens
  Payload ID: 17349
  Gene Symbol: TAOK2
  Gene Name: TAO kinase 2
  Uniprot ID: Q9UL54
  ENST ID: ENST00000279394
  CDS Start-End: 404-3553
agaatttcaaatatcaggttcaggcccctgcgtgcaccagtatccggggttcattccccgggcgttcaaatatcggattcagtctccatcccgttcagatattcggggttcagaccccacaatcagaaatccggaattcggcagctgtcgccctcgacgagggggaggactggaccgcgaggtcagattaggttgtcaccccctcccctccaggggaggcttcccgggcccgcccctcaggaagggcgaaagccgaggaagaggtggcaaggggaaaggtctccttgcccctctccctgcttggcagagccgctggaggaccccaggcggaagcggaggcgctggggcaccatagtgacccctaccaggccaggccccactctcagggcccccaggggccaccatgccagctgggggccgggccgggagcctgaaggacccagatgtggctgagctcttcttcaaggatgacccagaaaagctcttctctgacctccgggaaattggccatggcagctttggagccgtatactttgcccgggatgtccggaatagtgaggtggtggccatcaagaagatgtcctacagtgggaagcagtccaatgagaaatggcaagacatcatcaaggaggtgcggttcttacagaagctccggcatcccaacaccattcagtaccggggctgttacctgagggagcacacggcttggctggtaatggagtattgcctgggctcagcttctgaccttctagaagtgcacaagaaaccccttcaggaggtagagatcgcagctgtgacccacggggcgcttcagggcctggcatatctgcactcccacaacatgatccatagggatgtgaaggctggaaacatcctgctgtcagagccagggttagtgaagctaggggactttggttctgcgtccatcatggcacctgccaactccttcgtgggcaccccatactggatggcacccgaggtgatcctggccatggatgaggggcagtacgatggcaaagtggacgtctggtccttggggataacctgcatcgagctggctgaacggaaaccaccgctctttaacatgaatgcgatgagtgccttataccacattgcacagaacgaatcccccgtgctccagtcaggacactggtctgagtacttccggaattttgtcgactcctgtcttcagaaaatccctcaagacagaccaacctcagaggttctcctgaagcaccgctttgtgctccgggagcggccacccacagtcatcatggacctgatccagaggaccaaggatgccgtgcgggagctggacaacctgcagtaccgcaagatgaagaagatcctgttccaagaggcacccaacggccctggtgccgaggccccagaggaggaagaggaggccgagccctacatgcaccgggccgggactctgaccagcctcgagagtagccactcagtgcccagcatgtccatcagcgcctccagccagagcagctccgtcaacagcctagcagatgcctcagacaacgaggaagaggaggaggaggaggaggaagaggaggaggaggaagaaggccctgaagcccgggagatggccatgatgcaggagggggagcacacagtcacctctcacagctccattatccaccggctgccgggctctgacaacctatatgatgacccctaccagccagagataacccccagccctctccagccgcctgcagccccagctcccacttccaccacctcttccgcccgccgccgggcctactgccgtaaccgagaccactttgccaccatccgaaccgcctccctggtcagccgtcagatccaggagcatgagcaggactctgcgctgcgggagcagctgagcggctataagcggatgcgacgacagcaccagaagcagctgctggccctggagtcacggctgaggggtgaacgggaggagcacagtgcacggctgcagcgggagcttgaggcgcagcgggctggctttggggcagaggcagaaaagctggcccggcggcaccaggccataggtgagaaggaggcacgagctgcccaggccgaggagcggaagttccagcagcacatccttgggcagcagaagaaggagctggctgccctgctggaggcacagaagcggacctacaaacttcgcaaggaacagctgaaggaggagctccaggagaaccccagcactcccaagcgggagaaggccgagtggctgctgcggcagaaggagcagctccagcagtgccaggcggaggaggaagcagggctgctgcggcggcagcgccagtactttgagctgcagtgtcgccagtacaagcgcaagatgttgctggctcggcacagcctggaccaggacctgctgcgggaggacctgaacaagaagcagacccagaaggacttggagtgtgcactgctgcttcggcagcacgaggccacgcgggagctggagctgcggcagctccaggccgtgcagcgcacgcgggctgagctcacccgcctgcagcaccagacggagctgggcaaccagctggagtacaacaagcggcgtgagcaagagttgcggcagaagcatgcggcccaggttcgccagcagcccaagagcctcaaatctaaggagctgcagatcaagaagcagttccaggagacgtgtaagatccagactcggcagtacaaggctctgcgagcacacttgctggagaccacgcccaaagctcagcacaagagcctccttaagcggctcaaggaagagcagacccgcaagctggcgatcttggcggagcagtatgaccagtccatctcagagatgctcagctcacaggcgctgcggcttgatgagacccaggaggcagagttccaggcccttcggcagcagcttcaacaggagctggagctgctcaacgcttaccagagcaagatcaagatccgcacagagagccagcacgagagggagctgcgggagctggagcagagggtcgcgctgcggcgggcactgctggagcagcgggtggaagaggagctgctggccctgcagacaggacgctccgagcgaatccgcagtctgcttgagcggcaggcccgtgagatcgaggccttcgatgcggaaagcatgaggctgggcttctccagcatggctctggggggcatcccggctgaagctgctgcccagggctatcctgctccaccccctgccccagcctggccctcccgtcccgttccccgttctggggcacactggagccatggccctcctccaccaggcatgccccctccagcctggcgtcagccgtctctgctggctcccccaggccccccaaactggctggggccccccacacaaagtgggacaccccgtggcggagccctgctgctgctaagaaacagcccccagcccctgcggcgggcagcctcggggggcagtggcagtgagaatgtgggcccccctgctgccgcggtgcccgggcccctgagccgcagcaccagtgtcgcttcccacatcctcaatggttcttcccacttctattcctgaggtgcagcggggaggagcagatgagctgggcagggcaggggtgggtggagcctgaccctggagggcactgagctggaggcccctgcaagggtaggggacaagatgtaggctccagctcccctcagacctcctcatctcatgagcttcttggggctggccagtggcccagggccagcttggcgataggtgcctcaaggctgcctgggagccccgcctccctaccatggtgccaggggtctccctccgccacctaggaaaggagggagatgtgcgtgtcaaatattcatctagtcccctgggggaggggaagggtgggtctagacatactatattcagagaactatactaccctcacagtgaggccctcagacctgccacagggcagagcaggtctggggcctgaggcagggagaatgagaggccaccttactggcaggaaggatcaggatggggtcttggggtcaggatgcctgggtctcttcccgtaactgtctgacgtcctgtgccgtcttgtcctttatctttttttttttttttttaattgggatcagggctggggcggggaaacaagggaaggaccttggaaggggctgctcccaggcctggggggcagtcgtgggagcccctctcagctgtggggctggcacagagccccaggcaagcttttaataaactgttggttattctaacaga

SEQ ID NO: 189123 - DNA, 5169 bp, Homo sapiens
  Payload ID: 17349
  Gene Symbol: TAOK2
  Gene Name: TAO kinase 2
  Uniprot ID: Q9UL54
  ENST ID: ENST00000308893
  CDS Start-End: 1044-4751
accgccagtcgtgggacagagtgccgggctcctccccttgcaagtctagctcttctccccgcctcctccggcctggggtccgcgtggcggggcgggcgcgcactcgggcttggcggctgccggtctcccaggccgcggcagtgaggagagagggcggggctgagtcctctgcgcccccgccccctttagcccggcgtccctaccgcgcctgcgcgctcccgcccggtctccatcttggaattgggaggaagagggagagggagaccgggacgagaccggggctgtggtgcggagagaggctgagacggagaagaggagaggcagagagggcgcggggaccgtcagcagcaccttagctacaatcgttcagctattctcggaagagagaagggagagggaggaggccggggcgggagtgggggctgtcaccctcggaccccggcgtgagaggggccgtgcggccggacgtcctcggggtgggcccccagtcggtggccgaagacctacagctcaggcccctgggtcccaaatttccaggctttgcccctcctcctttctcagatacccgggtaacagtcctcatagtccagatatccgggactcgggtcccaacctctctaaacctgggtctctgtttcatagaatttcaaatatcaggttcaggcccctgcgtgcaccagtatccggggttcattccccgggcgttcaaatatcggattcagtctccatcccgttcagatattcggggttcagaccccacaatcagaaatccggaattcggcagctgtcgccctcgacgagggggaggactggaccgcgaggtcagattaggttgtcaccccctcccctccaggggaggcttcccgggcccgcccctcaggaagggcgaaagccgaggaagaggtggcaaggggaaaggtctccttgcccctctccctgcttggcagagccgctggaggaccccaggcggaagcggaggcgctggggcaccatagtgacccctaccaggccaggccccactctcagggcccccaggggccaccatgccagctgggggccgggccgggagcctgaaggacccagatgtggctgagctcttcttcaaggatgacccagaaaagctcttctctgacctccgggaaattggccatggcagctttggagccgtatactttgcccgggatgtccggaatagtgaggtggtggccatcaagaagatgtcctacagtgggaagcagtccaatgagaaatggcaagacatcatcaaggaggtgcggttcttacagaagctccggcatcccaacaccattcagtaccggggctgttacctgagggagcacacggcttggctggtaatggagtattgcctgggctcagcttctgaccttctagaagtgcacaagaaaccccttcaggaggtagagatcgcagctgtgacccacggggcgcttcagggcctggcatatctgcactcccacaacatgatccatagggatgtgaaggctggaaacatcctgctgtcagagccagggttagtgaagctaggggactttggttctgcgtccatcatggcacctgccaactccttcgtgggcaccccatactggatggcacccgaggtgatcctggccatggatgaggggcagtacgatggcaaagtggacgtctggtccttggggataacctgcatcgagctggctgaacggaaaccaccgctctttaacatgaatgcgatgagtgccttataccacattgcacagaacgaatcccccgtgctccagtcaggacactggtctgagtacttccggaattttgtcgactcctgtcttcagaaaatccctcaagacagaccaacctcagaggttctcctgaagcaccgctttgtgctccgggagcggccacccacagtcatcatggacctgatccagaggaccaaggatgccgtgcgggagctggacaacctgcagtaccgcaagatgaagaagatcctgttccaagaggcacccaacggccctggtgccgaggccccagaggaggaagaggaggccgagccctacatgcaccgggccgggactctgaccagcctcgagagtagccactcagtgcccagcatgtccatcagcgcctccagccagagcagctccgtcaacagcctagcagatgcctcagacaacgaggaagaggaggaggaggaggaggaagaggaggaggaggaagaaggccctgaagcccgggagatggccatgatgcaggagggggagcacacagtcacctctcacagctccattatccaccggctgccgggctctgacaacctatatgatgacccctaccagccagagataacccccagccctctccagccgcctgcagccccagctcccacttccaccacctcttccgcccgccgccgggcctactgccgtaaccgagaccactttgccaccatccgaaccgcctccctggtcagccgtcagatccaggagcatgagcaggactctgcgctgcgggagcagctgagcggctataagcggatgcgacgacagcaccagaagcagctgctggccctggagtcacggctgaggggtgaacgggaggagcacagtgcacggctgcagcgggagcttgaggcgcagcgggctggctttggggcagaggcagaaaagctggcccggcggcaccaggccataggtgagaaggaggcacgagctgcccaggccgaggagcggaagttccagcagcacatccttgggcagcagaagaaggagctggctgccctgctggaggcacagaagcggacctacaaacttcgcaaggaacagctgaaggaggagctccaggagaaccccagcactcccaagcgggagaaggccgagtggctgctgcggcagaaggagcagctccagcagtgccaggcggaggaggaagcagggctgctgcggcggcagcgccagtactttgagctgcagtgtcgccagtacaagcgcaagatgttgctggctcggcacagcctggaccaggacctgctgcgggaggacctgaacaagaagcagacccagaaggacttggagtgtgcactgctgcttcggcagcacgaggccacgcgggagctggagctgcggcagctccaggccgtgcagcgcacgcgggctgagctcacccgcctgcagcaccagacggagctgggcaaccagctggagtacaacaagcggcgtgagcaagagttgcggcagaagcatgcggcccaggttcgccagcagcccaagagcctcaaagtacgtgcaggccagcgccccccgggccttccactccccattcctggggctctgggcccacccaacacaggcacccctatagaacagcagccctgctcacctggccaggaggcagtcctggaccaaagaatgcttggcgaggaggaggaagcagttggagagagaaggattctgggaaaggaaggggccactttggagcccaagcagcagaggattctgggggaagaatcaggagcccctagtcccagtccacaaaaacatgggagcctggttgatgaggaagtttggggtctgcctgaggagatagaggagcttagggtgccctcccttgtaccccaggagaggagcattgttggccaggaggaggctgggacatggagcttgtgggggaaggaggatgagagtcttctggatgaggagtttgagcttggctgggtccagggcccagcactgactcccgtccctgaggaggaggaagaagaggaagagggggctccgattgggacccctagggatcctggagatggttgtccttcccccgacatccctcctgaaccccctccaacacacctgaggccctgccctgccagccagctccctggactcctgtcccatggcctcctggccggcctctcctttgcagtggggtcctcctctggcctcctgcccctcctgctgctgctgctgcttccattgctggcagcccagggtgggggtggcctgcaggcagcgctgctggcccttgaggtggggctggtgggtctgggggcctcctacctgctcctttgtacagccctgcacctgccctccagtcttttcctactcctggcccagggtaccgcactgggggccgtcctgggcctgagctggcgccgaggcctcatgggtgttcccctgggccttggagctgcctggctcttagcttggccaggcctagctctacctctggtggctatggcagcggggggcagatgggtgcggcagcagggcccccgggtgcgccggggcatatctcgactctggttgcgggttctgctgcgcctgtcacccatggccttccgggccctgcagggctgtggggctgtgggggaccggggtctgtttgcactgtaccccaaaaccaacaaggatggcttccgcagccgcctgcccgtccctgggccccggcggcgtaatccccgcaccacccaacacccattagctctgttggcaagggtctgggtcctgtgcaagggctggaactggcgtctggcacgggccagccagggtttagcatcccacttgcccccgtgggccatccacacactggccagctggggcctgcttcggggtgaacggcccacccgaatcccccggctactaccacgcagccagcgccagctagggccccctgcctcccgccagccactgccagggactctagccgggcggaggtcacgcacccgccagtcccgggccctgcccccctggaggtagctgactccagcccttccagcccaaatctagagcattgagcactttatctcccacgactcagtgaagtttctccagtccctagtcctctcttttcacccaccttcctcagtttgctcacttaccccaggcccagcccttcggacctctagacaggcagcctcctcagctgtggagtccagcagtcactctgtgttctcctggcgctcctcccctaagttattgctgttcgcccgctgtgtgtgctcatcctcaccctcattgactcaggcctggggccaggggtggtggagggtgggaagagtcatgttttttttctcctctttgattttgtttttctgtctcccttccaacctgtccccttccccccaccaaaaaaagaaaaagacaaacacaaataaaatatctgagcggaactgtg

SEQ ID NO: 189124 - DNA, 4780 bp, Homo sapiens
  Payload ID: 17349
  Gene Symbol: TAOK2
  Gene Name: TAO kinase 2
  Uniprot ID: Q9UL54
  ENST ID: ENST00000416441
  CDS Start-End: 1174-4362
ctcccttccagtctgtcttaagtactgatgccagagaggtctgcctaagctcagtgctgtcatttcactccctgtttggagccatgagtggccccctgttgccttcaagactgaagccatccccatccttcctcccaccaacctagaggctttgcttcgtaaatgctggccctttccttcatgggctccaccctctgagtgtgtcatgaactcttccacttccttgccttggttcgtattgggtcctctgcccgaggtcagagatttggacgagcccttctcctccatcttcacagtctccatttaccattagatgccaggcccagacagttgatgaaaaatgtaagaaacggacccaagtataagaaaaagctagatctgtccattttatttctagtttttggaagagatgtggatacagagaaatattactctactattgaaaaaaatatatatcagtctgattataaatgtcaactcatactaagtcaatatcagggaagcagtgtggagaaggatgtggcaaactggagattgctgtttccatagaaagagggcagctaatgcttatctccagaccattgttatgcagtaatgtagactccatttcaccagatttaattcttaaggagaaactggaaacttgtattattatttgattattacttttggcagttaattttaaaaatcaccgtttaggccaaaacaacatgacatttgtctgggctacaagggactcttagcgactcttagcttgcacttacctttctaatctcagggctttttacaaagcccttctctgaattccctgaagatatgctagcttgaaggctcactgcatactctcaacttcccagccacttccctgtttccctcttataccagttaatactttgatgttattttttcagtcctatttaatcttttagactggaggttccttgagggtggggcctaattcttgtttttatcttccccatagcaattatcaagttatctgctccctttggcacctaagaaatattagttggggtgataactgaatggctgtccttctgccttcgttactgcttttgtggatgttattttctttgacccctattccacccgtgtgcagtggagaggatgggtgttgtattttacagaggaaggaattaactgagacgcaacaggatgatgggaacttctcaaggtcatgtggcaaggaagtcaaggaattggggtttgaacccaagtcgtctcagttccattccattgtcctctaccccctgccacctctcaccttcttccctttcacctttttctgtagctgaacggaaaccaccgctctttaacatgaatgcgatgagtgccttataccacattgcacagaacgaatcccccgtgctccagtcaggacactggtctgagtacttccggaattttgtcgactcctgtcttcagaaaatccctcaagacagaccaacctcagaggttctcctgaagcaccgctttgtgctccgggagcggccacccacagtcatcatggacctgatccagaggaccaaggatgccgtgcgggagctggacaacctgcagtaccgcaagatgaagaagatcctgttccaagaggcacccaacggccctggtgccgaggccccagaggaggaagaggaggccgagccctacatgcaccgggccgggactctgaccagcctcgagagtagccactcagtgcccagcatgtccatcagcgcctccagccagagcagctccgtcaacagcctagcagatgcctcagacaacgaggaagaggaggaggaggaggaggaagaggaggaggaggaagaaggccctgaagcccgggagatggccatgatgcaggagggggagcacacagtcacctctcacagctccattatccaccggctgccgggctctgacaacctatatgatgacccctaccagccagagataacccccagccctctccagccgcctgcagccccagctcccacttccaccacctcttccgcccgccgccgggcctactgccgtaaccgagaccactttgccaccatccgaaccgcctccctggtcagccgtcagatccaggagcatgagcaggactctgcgctgcgggagcagctgagcggctataagcggatgcgacgacagcaccagaagcagctgctggccctggagtcacggctgaggggtgaacgggaggagcacagtgcacggctgcagcgggagcttgaggcgcagcgggctggctttggggcagaggcagaaaagctggcccggcggcaccaggccataggtgagaaggaggcacgagctgcccaggccgaggagcggaagttccagcagcacatccttgggcagcagaagaaggagctggctgccctgctggaggcacagaagcggacctacaaacttcgcaaggaacagctgaaggaggagctccaggagaaccccagcactcccaagcgggagaaggccgagtggctgctgcggcagaaggagcagctccagcagtgccaggcggaggaggaagcagggctgctgcggcggcagcgccagtactttgagctgcagtgtcgccagtacaagcgcaagatgttgctggctcggcacagcctggaccaggacctgctgcgggaggacctgaacaagaagcagacccagaaggacttggagtgtgcactgctgcttcggcagcacgaggccacgcgggagctggagctgcggcagctccaggccgtgcagcgcacgcgggctgagctcacccgcctgcagcaccagacggagctgggcaaccagctggagtacaacaagcggcgtgagcaagagttgcggcagaagcatgcggcccaggttcgccagcagcccaagagcctcaaagtacgtgcaggccagcgccccccgggccttccactccccattcctggggctctgggcccacccaacacaggcacccctatagaacagcagccctgctcacctggccaggaggcagtcctggaccaaagaatgcttggcgaggaggaggaagcagttggagagagaaggattctgggaaaggaaggggccactttggagcccaagcagcagaggattctgggggaagaatcaggagcccctagtcccagtccacaaaaacatgggagcctggttgatgaggaagtttggggtctgcctgaggagatagaggagcttagggtgccctcccttgtaccccaggagaggagcattgttggccaggaggaggctgggacatggagcttgtgggggaaggaggatgagagtcttctggatgaggagtttgagcttggctgggtccagggcccagcactgactcccgtccctgaggaggaggaagaagaggaagagggggctccgattgggacccctagggatcctggagatggttgtccttcccccgacatccctcctgaaccccctccaacacacctgaggccctgccctgccagccagctccctggactcctgtcccatggcctcctggccggcctctcctttgcagtggggtcctcctctggcctcctgcccctcctgctgctgctgctgcttccattgctggcagcccagggtgggggtggcctgcaggcagcgctgctggcccttgaggtggggctggtgggtctgggggcctcctacctgctcctttgtacagccctgcacctgccctccagtcttttcctactcctggcccagggtaccgcactgggggccgtcctgggcctgagctggcgccgaggcctcatgggtgttcccctgggccttggagctgcctggctcttagcttggccaggcctagctctacctctggtggctatggcagcggggggcagatgggtgcggcagcagggcccccgggtgcgccggggcatatctcgactctggttgcgggttctgctgcgcctgtcacccatggccttccgggccctgcagggctgtggggctgtgggggaccggggtctgtttgcactgtaccccaaaaccaacaaggatggcttccgcagccgcctgcccgtccctgggccccggcggcgtaatccccgcaccacccaacacccattagctctgttggcaagggtctgggtcctgtgcaagggctggaactggcgtctggcacgggccagccagggtttagcatcccacttgcccccgtgggccatccacacactggccagctggggcctgcttcggggtgaacggcccacccgaatcccccggctactaccacgcagccagcgccagctagggccccctgcctcccgccagccactgccagggactctagccgggcggaggtcacgcacccgccagtcccgggccctgcccccctggaggtagctgactccagcccttccagcccaaatctagagcattgagcactttatctcccacgactcagtgaagtttctccagtccctagtcctctcttttcacccaccttcctcagtttgctcacttaccccaggcccagcccttcggacctctagacaggcagcctcctcagctgtggagtccagcagtcactctgtgttctcctggcgctcctcccctaagttattgctgttcgcccgctgtgtgtgctcatcctcaccctcattgactcaggcctggggccaggggtggtggagggtgggaagagtcatgttttttttctcctctttgattttgtttttctgtctcccttccaacctgtccccttccccccaccaaaaaaagaaaaagacaaacacaaataaaatatctgagcggaactgtg

SEQ ID NO: 189125 - DNA, 4072 bp, Homo sapiens
  Payload ID: 17349
  Gene Symbol: TAOK2
  Gene Name: TAO kinase 2
  Uniprot ID: Q9UL54
  ENST ID: ENST00000543033
  CDS Start-End: 503-3871
tgcccctcctcctttctcagatacccgggtaacagtcctcatagtccagatatccgggactcgggtcccaacctctctaaacctgggtctctgtttcatagaatttcaaatatcaggttcaggcccctgcgtgcaccagtatccggggttcattccccgggcgttcaaatatcggattcagtctccatcccgttcagatattcggggttcagaccccacaatcagaaatccggaattcggcagctgtcgccctcgacgagggggaggactggaccgcgaggtcagattaggttgtcaccccctcccctccaggggaggcttcccgggcccgcccctcaggaagggcgaaagccgaggaagaggtggcaaggggaaaggtctccttgcccctctccctgcttggcagagccgctggaggaccccaggcggaagcggaggcgctggggcaccatagtgacccctaccaggccaggccccactctcagggcccccaggggccaccatgccagctgggggccgggccgggagcctgaaggacccagatgtggctgagctcttcttcaaggatgacccagaaaagctcttctctgacctccgggaaattggccatggcagctttggagccgtatactttgcccgggatgtccggaatagtgaggtggtggccatcaagaagatgtcctacagtgggaagcagtccaatgagaaatggcaagacatcatcaaggaggtgcggttcttacagaagctccggcatcccaacaccattcagtaccggggctgttacctgagggagcacacggcttggctggtaatggagtattgcctgggctcagcttctgaccttctagaagtgcacaagaaaccccttcaggaggtagagatcgcagctgtgacccacggggcgcttcagggcctggcatatctgcactcccacaacatgatccatagggatgtgaaggctggaaacatcctgctgtcagagccagggttagtgaagctaggggactttggttctgcgtccatcatggcacctgccaactccttcgtgggcaccccatactggatggcacccgaggtgatcctggccatggatgaggggcagtacgatggcaaagtggacgtctggtccttggggataacctgcatcgagctggctgaacggaaaccaccgctctttaacatgaatgcgatgagtgccttataccacattgcacagaacgaatcccccgtgctccagtcaggacactggtctgagtacttccggaattttgtcgactcctgtcttcagaaaatccctcaagacagaccaacctcagaggttctcctgaagcaccgctttgtgctccgggagcggccacccacagtcatcatggacctgatccagaggaccaaggatgccgtgcgggagctggacaacctgcagtaccgcaagatgaagaagatcctgttccaagaggcacccaacggccctggtgccgaggccccagaggaggaagaggaggccgagccctacatgcaccgggccgggactctgaccagcctcgagagtagccactcagtgcccagcatgtccatcagcgcctccagccagagcagctccgtcaacagcctagcagatgcctcagacaacgaggaagaggaggaggaggaggaggaagaggaggaggaggaagaaggccctgaagcccgggagatggccatgatgcaggagggggagcacacagtcacctctcacagctccattatccaccggctgccgggctctgacaacctatatgatgacccctaccagccagagataacccccagccctctccagccgcctgcagccccagctcccacttccaccacctcttccgcccgccgccgggcctactgccgtaaccgagaccactttgccaccatccgaaccgcctccctggtcagccgtcagatccaggagcatgagcaggactctgcgctgcgggagcagctgagcggctataagcggatgcgacgacagcaccagaagcagctgctggccctggagtcacggctgaggggtgaacgggaggagcacagtgcacggctgcagcgggagcttgaggcgcagcgggctggctttggggcagaggcagaaaagctggcccggcggcaccaggccataggtgagaaggaggcacgagctgcccaggccgaggagcggaagttccagcagcacatccttgggcagcagaagaaggagctggctgccctgctggaggcacagaagcggacctacaaacttcgcaaggaacagctgaaggaggagctccaggagaaccccagcactcccaagcgggagaaggccgagtggctgctgcggcagaaggagcagctccagcagtgccaggcggaggaggaagcagggctgctgcggcggcagcgccagtactttgagctgcagtgtcgccagtacaagcgcaagatgttgctggctcggcacagcctggaccaggacctgctgcgggaggacctgaacaagaagcagacccagaaggacttggagtgtgcactgctgcttcggcagcacgaggccacgcgggagctggagctgcggcagctccaggccgtgcagcgcacgcgggctgagctcacccgcctgcagcaccagacggagctgggcaaccagctggagtacaacaagcggcgtgagcaagagttgcggcagaagcatgcggcccaggttcgccagcagcccaagagcctcaaagagaggagcattgttggccaggaggaggctgggacatggagcttgtgggggaaggaggatgagagtcttctggatgaggagtttgagcttggctgggtccagggcccagcactgactcccgtccctgaggaggaggaagaagaggaagagggggctccgattgggacccctagggatcctggagatggttgtccttcccccgacatccctcctgaaccccctccaacacacctgaggccctgccctgccagccagctccctggactcctgtcccatggcctcctggccggcctctcctttgcagtggggtcctcctctggcctcctgcccctcctgctgctgctgctgcttccattgctggcagcccagggtgggggtggcctgcaggcagcgctgctggcccttgaggtggggctggtgggtctgggggcctcctacctgctcctttgtacagccctgcacctgccctccagtcttttcctactcctggcccagggtaccgcactgggggccgtcctgggcctgagctggcgccgaggcctcatgggtgttcccctgggccttggagctgcctggctcttagcttggccaggcctagctctacctctggtggctatggcagcggggggcagatgggtgcggcagcagggcccccgggtgcgccggggcatatctcgactctggttgcgggttctgctgcgcctgtcacccatggccttccgggccctgcagggctgtggggctgtgggggaccggggtctgtttgcactgtaccccaaaaccaacaaggatggcttccgcagccgcctgcccgtccctgggccccggcggcgtaatccccgcaccacccaacacccattagctctgttggcaagggtctgggtcctgtgcaagggctggaactggcgtctggcacgggccagccagggtttagcatcccacttgcccccgtgggccatccacacactggccagctggggcctgcttcggggtgaacggcccacccgaatcccccggctactaccacgcagccagcgccagctagggccccctgcctcccgccagccactgccagggactctagccgggcggaggtcacgcacccgccagtcccgggccctgcccccctggaggtagctgactccagcccttccagcccaaatctagagcattgagcactttatctcccacgactcagtgaagtttctccagtccctagtcctctcttttcacccaccttcctcagtttgctcacttaccccaggcccagcccttcggacctctagacaggcagcctcctcagctgtggagtccagcagtcactctgtgttctcctgg

SEQ ID NO: 189126 - DNA, 4384 bp, Homo sapiens
  Payload ID: 17350
  Gene Symbol: TAOK3
  Gene Name: TAO kinase 3
  Uniprot ID: Q9H2K8
  ENST ID: ENST00000392533
  CDS Start-End: 492-3188
gtgctcggcgcagtccggtgcgattggccacccctggcaggagccgcacctcggacagcagcagcggcggcggccgcgggagggtccttgtggcgccgggcggcggggtcctgcgtggagagtgggacgcaacgccgagaccgcgagcagaggctgcgcacagccggatccggcactcagcgaccggacccaaggatccgccggggaacaagccacaggagagcgactcaggaacaagtgtgggagaggaagcggcggcggcggcgccgggcccgggggtggtgacagcaggtctgaggttgcatcataaatacaaaggactgaagttataaaagagaaaagagaagtttgctgctaaaatgaatctgagcaatatggaatattttgtgccacacacaaaaaggtactgaagatttaccccccaaaaaaaattgtcaatgagaaataaagctaactgatatcaaaaagcagagcctgctctactggccatcatgcgtaaaggggtgctgaaggacccagagattgccgatctattctacaaagatgatcctgaggaactttttattggtttgcatgaaattggacatggaagttttggagcagtttattttgctacaaatgctcacaccagtgaggtggtggcaattaagaagatgtcctatagtgggaagcagacccatgagaaatggcaagatattcttaaggaagttaaatttttacgacaattgaagcatcctaatactattgagtacaaaggctgttacttgaaagaacacactgcttggttggtgatggaatattgcttaggctcagcctctgatttattagaagttcataaaaaaccacttcaggaagtggagatcgctgccattactcatggagccttgcatggactagcctacctacattctcatgcattgattcatagggatattaaagcaggaaatattcttctaacagagccaggtcaggtaaaactagctgattttggatctgcttcaatggcttctcctgccaactccttcgtgggcacaccttactggatggctccagaggtgatcttagctatggatgaaggacagtatgatgggaaagttgatatttggtcacttggcatcacttgtattgaattggcggaacggaagccgccccttttcaacatgaatgcaatgagtgccttatatcacattgcccagaatgactccccaacgttacagtctaatgaatggacagactcctttaggagatttgttgattactgcttgcagaaaatacctcaggaaaggccaacatcagcagaactattaaggcatgactttgttcgacgagaccggccactacgtgtcctcattgacctcatacagaggacaaaagatgcagttcgtgagctagataacctacagtaccgaaaaatgaaaaaaatacttttccaagagacacggaatggacccttgaatgagtcacaggaggatgaggaagacagtgaacatggaaccagcctgaacagggaaatggacagcctgggcagcaaccattccattccaagcatgtccgtgagcacaggcagccagagcagcagtgtgaacagcatgcaggaagtcatggacgagagcagttccgaacttgtcatgatgcacgatgacgaaagcacaatcaattccagctcctccgtcgtgcataagaaagatcatgtattcataagggatgaggcgggccacggcgatcccaggcctgagccgcggcctacccagtcagttcagagccaggccctccactaccggaacagagagcgctttgccacgatcaaatcagcatctttggttacacgacagatccatgagcatgagcaggagaacgagttgcgggaacagatgtcaggttataagcggatgcggcgccagcaccagaagcagctgatcgccctggagaacaagctgaaggctgagatggacgagcaccgcctcaagctacagaaggaggtggagacgcatgccaacaactcgtccatcgagctggagaagctggccaagaagcaagtggctatcatagaaaaggaggcaaaggtagctgcagcagatgagaagaagttccagcaacagatcttggcccagcagaagaaagatttgacaactttcttagaaagtcagaagaagcagtataagatttgtaaggaaaaaataaaagaggaaatgaatgaggaccatagcacacccaagaaagagaagcaagagcggatctccaaacataaagagaacttgcagcacacacaggctgaagaggaagcccaccttctcactcaacagagactgtactacgacaaaaattgtcgtttcttcaagcggaaaataatgatcaagcggcacgaggtggagcagcagaacattcgggaggaactaaataaaaagaggacccagaaggagatggagcatgccatgctaatccggcacgacgagtccacccgagagctagagtacaggcagctgcacacgttacagaagctacgcatggatctgatccgtttacagcaccagacggaactggaaaaccagctggagtacaataagaggcgagaaagagaactgcacagaaagcatgtcatggaacttcggcaacagccaaaaaacttaaaggccatggaaatgcaaattaaaaaacagtttcaggacacttgcaaagtacagaccaaacagtataaagcactcaagaatcaccagttggaagttactccaaagaatgagcacaaaacaatcttaaagacactgaaagatgagcagacaagaaaacttgccattttggcagagcagtatgaacagagtataaatgaaatgatggcctctcaagcgttacggctagatgaggctcaagaagcagaatgccaggccttgaggctacagctccagcaggaaatggagctgctcaacgcctaccagagcaaaatcaagatgcaaacagaggcacaacatgaacgtgagctccagaagctagagcagagagtgtctctgcgcagagcacaccttgagcagaagattgaagaggagctggctgcccttcagaaggaacgcagcgagagaataaagaacctattggaaaggcaagagcgagagattgaaacttttgacatggagagcctcagaatgggatttgggaatttggttacattagattttcctaaggaggactacagatgagattaaattttttgccatttacaaaaaaaaaaaaaaaaaagaaaacagaaaaaaattcagaccctgcaaaaccacattccccattttaacgggcgttgctctcactctctctctctcttactcttactgacatcgtgtcggactagtgcctgtttattcttactccatcaggggcccccttcctccccccgtgtcaactttcagtgctggccaaaacctggccgtctcttctattcacagtacacgtcacagtattgatgtgattcaaaatgtttcagtgaaaactttggagacagttttaacaaaaccaataaaccaacaacaaaaaaagtggatgtatattgctttaagcaatcactcattaccaccaatctgtgaaagtaaagcaaaaaataataataataaatgccaagggggagagagacacaatatccgcagccttacaccttaactagctgctgcattattttattttattttatttttttggtatttattcatcaggaataaaaaaaacaaagttttattaaagattgaaaatttgatacattttacagaaactaattgtgatgtacatatcagtggtgacatattattacttttttggggacggggggtgggtggggtgaagagatcttgtgatttttaagaacctgctggcaagagtttaacttgtcttcagcatattctgattgtatcataatcattttctgctgttgcagaggatgtgaatacacttaaggagctcacagaatcccagtagcacaaattgggctttggcaaatcgtgtattttgtgtatagaaggaatttaaggagaggtattacttattttcatattgtattttaactgtttctctgatcaaatttttttacttcctcctcctgttcctccccacctccctccttttccagttcagtatttggagttcaacactgtctctcaatcagatcatcttgatctttttctttatctcccttccccttcctaagtcccatttcttggtcataaatattgcattattcacactttcaaactgtgtattttcttacaataaaaaatgatgaaaaaaaaaaaggctttacttcttttgcatgcactttaaaaacaaaacaaaacatttttcaggttccaaggaagagcatgataactgtcagagcttttaattatatttgtaaataaaagtgttcatcaca

SEQ ID NO: 189127 - DNA, 4301 bp, Homo sapiens
  Payload ID: 17350
  Gene Symbol: TAOK3
  Gene Name: TAO kinase 3
  Uniprot ID: Q9H2K8
  ENST ID: ENST00000419821
  CDS Start-End: 409-3105
gttgtaacaggaaatacttcagcttgcaatactgatagtaatgtgtggcacccagatcacgctgtttttatctgcagttcctttttagtattgtacaaagtttcttgaagatttttaaatacataagtttaaaagagaattaactttcaatttgcaaattaaaatgagaatggttgccttttcttcattatcaagagatggtgagttgtcctcctgttgcatcataaatacaaaggactgaagttataaaagagaaaagagaagtttgctgctaaaatgaatctgagcaatatggaatattttgtgccacacacaaaaaggtactgaagatttaccccccaaaaaaaattgtcaatgagaaataaagctaactgatatcaaaaagcagagcctgctctactggccatcatgcgtaaaggggtgctgaaggacccagagattgccgatctattctacaaagatgatcctgaggaactttttattggtttgcatgaaattggacatggaagttttggagcagtttattttgctacaaatgctcacaccagtgaggtggtggcaattaagaagatgtcctatagtgggaagcagacccatgagaaatggcaagatattcttaaggaagttaaatttttacgacaattgaagcatcctaatactattgagtacaaaggctgttacttgaaagaacacactgcttggttggtgatggaatattgcttaggctcagcctctgatttattagaagttcataaaaaaccacttcaggaagtggagatcgctgccattactcatggagccttgcatggactagcctacctacattctcatgcattgattcatagggatattaaagcaggaaatattcttctaacagagccaggtcaggtaaaactagctgattttggatctgcttcaatggcttctcctgccaactccttcgtgggcacaccttactggatggctccagaggtgatcttagctatggatgaaggacagtatgatgggaaagttgatatttggtcacttggcatcacttgtattgaattggcggaacggaagccgccccttttcaacatgaatgcaatgagtgccttatatcacattgcccagaatgactccccaacgttacagtctaatgaatggacagactcctttaggagatttgttgattactgcttgcagaaaatacctcaggaaaggccaacatcagcagaactattaaggcatgactttgttcgacgagaccggccactacgtgtcctcattgacctcatacagaggacaaaagatgcagttcgtgagctagataacctacagtaccgaaaaatgaaaaaaatacttttccaagagacacggaatggacccttgaatgagtcacaggaggatgaggaagacagtgaacatggaaccagcctgaacagggaaatggacagcctgggcagcaaccattccattccaagcatgtccgtgagcacaggcagccagagcagcagtgtgaacagcatgcaggaagtcatggacgagagcagttccgaacttgtcatgatgcacgatgacgaaagcacaatcaattccagctcctccgtcgtgcataagaaagatcatgtattcataagggatgaggcgggccacggcgatcccaggcctgagccgcggcctacccagtcagttcagagccaggccctccactaccggaacagagagcgctttgccacgatcaaatcagcatctttggttacacgacagatccatgagcatgagcaggagaacgagttgcgggaacagatgtcaggttataagcggatgcggcgccagcaccagaagcagctgatcgccctggagaacaagctgaaggctgagatggacgagcaccgcctcaagctacagaaggaggtggagacgcatgccaacaactcgtccatcgagctggagaagctggccaagaagcaagtggctatcatagaaaaggaggcaaaggtagctgcagcagatgagaagaagttccagcaacagatcttggcccagcagaagaaagatttgacaactttcttagaaagtcagaagaagcagtataagatttgtaaggaaaaaataaaagaggaaatgaatgaggaccatagcacacccaagaaagagaagcaagagcggatctccaaacataaagagaacttgcagcacacacaggctgaagaggaagcccaccttctcactcaacagagactgtactacgacaaaaattgtcgtttcttcaagcggaaaataatgatcaagcggcacgaggtggagcagcagaacattcgggaggaactaaataaaaagaggacccagaaggagatggagcatgccatgctaatccggcacgacgagtccacccgagagctagagtacaggcagctgcacacgttacagaagctacgcatggatctgatccgtttacagcaccagacggaactggaaaaccagctggagtacaataagaggcgagaaagagaactgcacagaaagcatgtcatggaacttcggcaacagccaaaaaacttaaaggccatggaaatgcaaattaaaaaacagtttcaggacacttgcaaagtacagaccaaacagtataaagcactcaagaatcaccagttggaagttactccaaagaatgagcacaaaacaatcttaaagacactgaaagatgagcagacaagaaaacttgccattttggcagagcagtatgaacagagtataaatgaaatgatggcctctcaagcgttacggctagatgaggctcaagaagcagaatgccaggccttgaggctacagctccagcaggaaatggagctgctcaacgcctaccagagcaaaatcaagatgcaaacagaggcacaacatgaacgtgagctccagaagctagagcagagagtgtctctgcgcagagcacaccttgagcagaagattgaagaggagctggctgcccttcagaaggaacgcagcgagagaataaagaacctattggaaaggcaagagcgagagattgaaacttttgacatggagagcctcagaatgggatttgggaatttggttacattagattttcctaaggaggactacagatgagattaaattttttgccatttacaaaaaaaaaaaaaaaaaagaaaacagaaaaaaattcagaccctgcaaaaccacattccccattttaacgggcgttgctctcactctctctctctcttactcttactgacatcgtgtcggactagtgcctgtttattcttactccatcaggggcccccttcctccccccgtgtcaactttcagtgctggccaaaacctggccgtctcttctattcacagtacacgtcacagtattgatgtgattcaaaatgtttcagtgaaaactttggagacagttttaacaaaaccaataaaccaacaacaaaaaaagtggatgtatattgctttaagcaatcactcattaccaccaatctgtgaaagtaaagcaaaaaataataataataaatgccaagggggagagagacacaatatccgcagccttacaccttaactagctgctgcattattttattttattttatttttttggtatttattcatcaggaataaaaaaaacaaagttttattaaagattgaaaatttgatacattttacagaaactaattgtgatgtacatatcagtggtgacatattattacttttttggggacggggggtgggtggggtgaagagatcttgtgatttttaagaacctgctggcaagagtttaacttgtcttcagcatattctgattgtatcataatcattttctgctgttgcagaggatgtgaatacacttaaggagctcacagaatcccagtagcacaaattgggctttggcaaatcgtgtattttgtgtatagaaggaatttaaggagaggtattacttattttcatattgtattttaactgtttctctgatcaaatttttttacttcctcctcctgttcctccccacctccctccttttccagttcagtatttggagttcaacactgtctctcaatcagatcatcttgatctttttctttatctcccttccccttcctaagtcccatttcttggtcataaatattgcattattcacactttcaaactgtgtattttcttacaataaaaaatgatgaaaaaaaaaaaggctttacttcttttgcatgcactttaaaaacaaaacaaaacatttttcaggttccaaggaagagcatgataactgtcagagcttttaattatatttgtaaataaaagtgttcatcaca

SEQ ID NO: 189128 - DNA, 555 bp, Homo sapiens
  Payload ID: 17350
  Gene Symbol: TAOK3
  Gene Name: TAO kinase 3
  ENST ID: ENST00000538601
  CDS Start-End: 1-555
caaaggctgttacttgaaagaacacactgcttggttcataaaaaaccacttcaggaagtggagatcgctgccattactcatggagccttgcatggactagcctacctacattctcatgcattgattcatagggatattaaagcaggaaatattcttctaacagagccaggtcaggtaaaactagctgattttggatctgcttcaatggcttctcctgccaactccttcgtgggcacaccttactggatggctccagaggtgatcttagctatggatgaaggacagtatgatgggaaagttgatatttggtcacttggcatcacttgtattgaattggcggaacggaagccgccccttttcaacatgaatgcaatgagtgccttatatcacattgcccagaatgactccccaacgttacagtctaatgaatggacagactcctttaggagatttgttgattactgcttgcagaaaatacctcaggaaaggccaacatcagcagaactattaaggcatgactttgttcgacgagaccggccactacgtgtcctcatt

SEQ ID NO: 189129 - DNA, 594 bp, Homo sapiens
  Payload ID: 17350
  Gene Symbol: TAOK3
  Gene Name: TAO kinase 3
  ENST ID: ENST00000539872
  CDS Start-End: 539-594
tttctcgggatgaaggtgctgatagcctggggtgttcttataacttaagttcagttttttctttcctgtgaggaagaggcagttttttaaatgaagccatctctggggaaatcgtattgattgttgtagctaaatacggaatttttaaagtctttagtatgttgaactggaaatataggacatgcgtttgagatctactgtgagaaaccaaggcttaaagggatgaagtaataaaaagctagtagaggccgggcacggtggctcacgcctgtaatcccagcactttgggaggctgaggcagacggatcacgaggtcaagagattgagaccatcccggccaacatggttgcatcataaatacaaaggactgaagttataaaagagaaaagagaagtttgctgctaaaatgaatctgagcaatatggaatattttgtgccacacacaaaaaggtactgaagatttaccccccaaaaaaaattgtcaatgagaaataaagctaactgatatcaaaaagcagagcctgctctactggccatcatgcgtaaaggggtgctgaaggacccagagattgccgatctattctacaaagatga

SEQ ID NO: 189130 - DNA, 881 bp, Homo sapiens
  Payload ID: 17350
  Gene Symbol: TAOK3
  Gene Name: TAO kinase 3
  ENST ID: ENST00000541186
  CDS Start-End: 603-881
tgctgatagcctggggtgttcttataacttaagttcagttttttctttcctgtgaggaagaggcagttttttaaatgaagccatctctggggaaatcgtattgattgttgtagctaaatacggaatttttaaagtctttagtatgttgaactggaaatataggacatgcgtttgagatctactgtgaggcaacttttaccttgatctcttctgatatgactgaggcctatatccatcctttaaaaaattcttattaatcatgcggaagaagaaatctttccaggagcagcaaactcaggaccggagagataagataaatatataaagcttcagggtatgaagccatacacatagtagaaactgaggcaaaggaaagagttcatgtcccgcctgaaggcagtcaaatcaggttgcatcataaatacaaaggactgaagttataaaagagaaaagagaagtttgctgctaaaatgaatctgagcaatatggaatattttgtgccacacacaaaaaggtactgaagatttaccccccaaaaaaaattgtcaatgagaaataaagctaactgatatcaaaaagcagagcctgctctactggccatcatgcgtaaaggggtgctgaaggacccagagattgccgatctattctacaaagatgatcctgaggaactttttattggtttgcatgaaattggacatggaagttttggagcagtttattttgctacaaatgctcacaccagtgaggtggtggcaattaagaagatgtcctatagtgggaagcagacccatgagaaatggcaagatattcttaaggaagttaaatttttacgacaattgaagcatcctaatactattgagtacaaaggctgttacttgaaa

SEQ ID NO: 189131 - DNA, 597 bp, Homo sapiens
  Payload ID: 17350
  Gene Symbol: TAOK3
  Gene Name: TAO kinase 3
  ENST ID: ENST00000537822
  CDS Start-End: 556-597
gtagagagaaggtgctagaactgtgtacgatcatgactggaaagcaggatccctcagtgactgccgaatcttcccagcacaagatagagaggcagttcagcacaagcctacattggttctaggcagaacgatgatcctaccgaacagatctcaaataaaattaaattgagaaagcagatctttcaagggaatgaggcggaggctcgcttttatgttaaaagccaccagcatcctccttgctagacatggacatgacatttttaaaggaattatctggttacagcgttttaagcaaactgttctaaggagtctgtacattgcattattttttctattctttttttcttttgcatatatgtaattctggaggatcatgtattcataagggatgaggcgggccacggcgatcccaggcctgagccgcggcctacccagtcagttcagagccaggccctccactaccggaacagagagcgctttgccacgatcaaatcagcatctttggttacacgacagatccatgagcatgagcaggagaacgagttgcgggaacagatgtcaggttataagcggatgcggcgccagcaccagaagcag

SEQ ID NO: 189132 - DNA, 613 bp, Homo sapiens
  Payload ID: 17350
  Gene Symbol: TAOK3
  Gene Name: TAO kinase 3
  ENST ID: ENST00000542902
  CDS Start-End: 442-613
ctctttaagcctcacttaaaaaactaagtgtctgtaataacttcctttctcgggatgaaggtgctgatagcctggggtgttcttataacttaagttcagttttttctttcctgtgaggaagaggcagttttttaaatgaagccatctctggggaaatcgtattgattgttgtagctaaatacggaatttttaaagtctttagtatgttgaactggaaatataggacatgcgtttgagatctactgtgagttgcatcataaatacaaaggactgaagttataaaagagaaaagagaagtttgctgctaaaatgaatctgagcaatatggaatattttgtgccacacacaaaaaggtactgaagatttaccccccaaaaaaaattgtcaatgagaaataaagctaactgatatcaaaaagcagagcctgctctactggccatcatgcgtaaaggggtgctgaaggacccagagattgccgatctattctacaaagatgatcctgaggaactttttattggtttgcatgaaattggacatggaagttttggagcagtttattttgctacaaatgctcacaccagtgaggtggtggcaattaagaagatgtcctata

SEQ ID NO: 189133 - DNA, 641 bp, Homo sapiens
  Payload ID: 17350
  Gene Symbol: TAOK3
  Gene Name: TAO kinase 3
  ENST ID: ENST00000542532
  CDS Start-End: 534-641
agcagcagcggcggcggccgcgggagggtccttgtggcgccgggcggcggggtcctgcgtggagagtgggacgcaacgccgagaccgcgagcagaggctgcgcacagccggatccggcactcagcgaccggacccaaggatccgccggggaacaagccacaggagagcgactcaggaacaagtgtgggagaggaagcggcggcggcggcgccgggcccgggggtggtgacagcaggtctgaggctggagtgcagtggcatgattttggctgactgcaacctctgcctcccaggttcaagcaattctccggcctcagcctcccgaggagctgggactacaggttgcatcataaatacaaaggactgaagttataaaagagaaaagagaagtttgctgctaaaatgaatctgagcaatatggaatattttgtgccacacacaaaaaggtactgaagatttaccccccaaaaaaaattgtcaatgagaaataaagctaactgatatcaaaaagcagagcctgctctactggccatcatgcgtaaaggggtgctgaaggacccagagattgccgatctattctacaaagatgatcctgaggaactttttattggtttgcatgaaattggacatggaagttttgga

SEQ ID NO: 189134 - DNA, 777 bp, Homo sapiens
  Payload ID: 17350
  Gene Symbol: TAOK3
  Gene Name: TAO kinase 3
  ENST ID: ENST00000536979
  CDS Start-End: 408-689
agaggtaggtaatgtgccaaggtgtgacacacacaaagtggatggtgtagctgtaattcaagcccaggagcctacctccaaagcccacaggtgtagccttcctgacgcctgctgctgtggtttcagatcatactgaaaagaatgtgtttggtattgtagcccattgggcagacttgactgtttttgattcccaactctgaatgtacccagagcatctgtgtttttgagggggcaaccaatttcaatccaaatgaggaaacctcttccagtagtcaccaagggctgtaggccaccaagggctgtaggcaagggtgcatgaccgtgtgtgtcttctgtgtccgcagttacggctagatgaggctcaagaagcagaatgccaggccttgaggctacagctccagcaggaaatggagctgctcaacgcctaccagagcaaaatcaagatgcaaacagaggcacaacatgaacgtgagctccagaagctagagcagagagtgtctctgcgcagagcacaccttgagcagaagattgaagaggagctggctgcccttcagaaggaacgcagcgagagaataaagaacctattggaaaggcaagagcgagagattgaaacttttgacatggagagcctcagaatgggatttgggaatttggttacattagattttcctaaggaggactacagatgagattaaattttttgccatttacaaaaaaaaaaaaaaaaaagaaaacagaaaaaaattcagaccctgcaaaaccacattccccatttta

SEQ ID NO: 189135 - DNA, 590 bp, Homo sapiens
  Payload ID: 17350
  Gene Symbol: TAOK3
  Gene Name: TAO kinase 3
  ENST ID: ENST00000541786
  CDS Start-End: 527-590
gtggcacccagatcacgctgtttttatctgcagttcctttttagtattgtacaaagtttcttgaagatttttaaatacataagtttaaaagagaattaactttcaatttgcaaattaaaatgagaatggttgccttttcttcattatcaagagatggttgcatcataaatacaaaggactgaagttataaaagagaaaagagaagtttgctgctaaaatgaatctgagcaatatggaatattttgtgccacacacaaaaagcatctggcacaatgtttttgtttggtttggtttggtgttgtaaagagagaggatcttgctatgtttgccagactggtctcaaactcctggtctcaagtcatcctctcaccttggcctcccaaagcattaggattacagacatgagacatcacacccagccccagcacaatgttgaatgtactgaagatttaccccccaaaaaaaattgtcaatgagaaataaagctaactgatatcaaaaagcagagcctgctctactggccatcatgcgtaaaggggtgctgaaggacccagagattgccgatctattctacaaagatgatcctgagg

SEQ ID NO: 189136 - DNA, 597 bp, Homo sapiens
  Payload ID: 17350
  Gene Symbol: TAOK3
  Gene Name: TAO kinase 3
  ENST ID: ENST00000535570
  CDS Start-End: 190-597
caggctggagtgcaatggctcaatctcggctcaccgcaacctcagcctcccgggttcaagcgattctcctgcctcagcctccctagtagctgggattacaggtactgaagatttaccccccaaaaaaaattgtcaatgagaaataaagctaactgatatcaaaaagcagagcctgctctactggccatcatgcgtaaaggggtgctgaaggacccagagattgccgatctattctacaaagatgatcctgaggaactttttattggtttgcatgaaattggacatggaagttttggagcagtttattttgctacaaatgctcacaccagtgaggtggtggcaattaagaagatgtcctatagtgggaagcagacccatgagaaatggcaagatattcttaaggaagttaaatttttacgacaattgaagcatcctaatactattgagtacaaaggctgttacttgaaagaacacactgcttggttggtgatggaatattgcttaggctcagcctctgatttattagaagttcataaaaaaccacttcaggaagtggagatcgctgccattactcatggagccttgcatggactagcc

SEQ ID NO: 189137 - DNA, 580 bp, Homo sapiens
  Payload ID: 17350
  Gene Symbol: TAOK3
  Gene Name: TAO kinase 3
  ENST ID: ENST00000540561
  CDS Start-End: 466-580
atcatgactggaaagcaggatccctcagtgactgccgaatcttcccagcacaagatagagaggcagttcagcacaagcctacattggttctaggcagaacgatgatcctaccgaacagatctcaaataaaattaaattgagaaagcagatctttcaagggaatgaggcggaggctcgcttttatgttaaaagccaccagcatcctccttgctagacatggacatgacatttttaaaggaattatctggttacagcgttttaagcaaactgttctaaggagatcatgtattcataagggatgaggcgggccacggcgatcccaggcctgagccgcggcctacccagtcagttcagagccaggccctccactaccggaacagagagcgctttgccacgatcaaatcagcatctttggttacacgacagatccatgagcatgagcaggagaacgagttgcgggaacagatgtcaggttataagcggatgcggcgccagcaccagaagcagctgatcgccctggagaacaagctgaaggctgagatggacgagcaccgcctcaagctacagaaggaggtggaga

SEQ ID NO: 189138 - DNA, 2147 bp, Homo sapiens
  Payload ID: 17350
  Gene Symbol: TAOK3
  Gene Name: TAO kinase 3
  ENST ID: ENST00000537952
  CDS Start-End: 791-2107
agaaggtgctagaactgtgtacgatcatgactggaaagcaggatccctcagtgactgccgaatcttcccagcacaagatagagaggcagttcagcacaagcctacattggttctaggcagaacgatgatcctaccgaacagatctcaaataaaattaaattgagaaagcagatctttcaagggaatgaggcggaggctcgcttttatgttaaaagccaccagcatcctccttgctagacatggacatgacatttttaaaggaattatctggttacagcgttttaagcaaactgttctaaggagtctgtacattgcattattttttctattctttttttcttttgcatatatgtaattctggaggtaaagaaaaagcctgccagggattcagaaggcatcccactagcgatcagctgacattcctaactgaaggctgcaatgtgttgcttattcattttgtaccgtgggagctgcggggactagcagagagctaaactatgcatttcaaacagcagtgcttgtgcagaaagaggggtgagagagaggcagccggcgaggaaagagcacagctggactttctccttgtttttatccatttctgcaggatcatgtattcataagggatgaggcgggccacggcgatcccaggcctgagccgcggcctacccagtcagttcagagccaggccctccactaccggaacagagagcgctttgccacgatcaaatcagcatctttggttacacgacagatccatgagcatgagcaggagaacgagttgcgggaacagatgtcaggttataagcggatgcggcgccagcaccagaagcagctgatcgccctggagaacaagctgaaggctgagatggacgagcaccgcctcaagctacagaaggaggtggagacgcatgccaacaactcgtccatcgagctggagaagctggccaagaagcaagtggctatcatagaaaaggaggcaaaggtagctgcagcagatgagaagaagttccagcaacagatcttggcccagcagaagaaagatttgacaactttcttagaaagtcagaagaagcagtataagatttgtaaggaaaaaataaaagaggaaatgaatgaggaccatagcacacccaagaaagagaagcaagagcggatctccaaacataaagagaacttgcagcacacacaggctgaagaggaagcccaccttctcactcaacagagactgtactacgacaaaaattgtcgtttcttcaagcggaaaataatgatcaagcggcacgaggtggagcagcagaacattcgggaggaactaaataaaaagaggacccagaaggagatggagcatgccatgctaatccggcacgacgagtccacccgagagctagagtacaggcagctgcacacgttacagaagctacgcatggatctgatccgtttacagcaccagacggaactggaaaaccagctggagtacaataagaggcgagaaagagaactgcacagaaagcatgtcatggaacttcggcaacagccaaaaaacttaaaggccatggaaatgcaaattaaaaaacagtttcaggacacttgcaaagtacagaccaaacagtataaagcactcaagaatcaccagttggaagttactccaaagaatgagcacaaaacaatcttaaagacactgaaagatgagcagacaagaaaacttgccattttggcagagcagtatgaacagagtataaatgaaatgatggcctctcaagcgttacggctagatgaggctcaagaagcagaatgccaggccttgaggctacagctccagcaggaaatggagctgctcaacgcctaccagagcaaaatcaagatgcaaacagaggcacaacatgaacgtgagctccagaagctagagcagagagtgtctctgcgcagagcacaccttgagcagaagattgaagaggagctggctgcccttcagaaggaacgcagcgagagaataaagaacctattggaaaggcaagagcgagagattgaaacttttgacatggagagcctcagaatgggatttgggaatttggttacattagattttcctaaggaggactacagatgagattaaattttttgccatttacaaaaaaaaaaaaaaaaaa

SEQ ID NO: 189139 - DNA, 578 bp, Homo sapiens
  Payload ID: 17350
  Gene Symbol: TAOK3
  Gene Name: TAO kinase 3
  ENST ID: ENST00000541878
  CDS Start-End: 394-578
gttgtaacaggaaatacttcagcttgcaatactgatagtaatgtgtggcacccagatcacgctgtttttatctgcagttcctttttagtattgtacaaagtttcttgaagatttttaaatacataagtttaaaagagaattaactttcaatttgcaaattaaaatgagaatggttgccttttcttcattatcaagagatggttgcatcataaatacaaaggactgaagttataaaagagaaaagagaagtttgctgctaaaatgaatctgagcaatatggaatattttgtgccacacacaaaaaggtactgaagatttaccccccaaaaaaaattgtcaatgagaaataaagctaactgatatcaaaaagcagagcctgctctactggccatcatgcgtaaaggggtgctgaaggacccagagattgccgatctattctacaaagatgatcctgaggaactttttattggtttgcatgaaattggacatggaagttttggagcagtttattttgctacaaatgctcacaccagtgaggtggtggcaattaagaagatgtcctatagtgggaagcagac

SEQ ID NO: 189140 - DNA, 3684 bp, Homo sapiens
  Payload ID: 17351
  Gene Symbol: TAPBP
  Gene Name: TAP binding protein (tapasin)
  ENST ID: ENST00000374568
  CDS Start-End: 211-1611
ccaggagggcgcggtaaggctggggtatcctggtgagaactggagaggatctacccgggtccctgcctggccagtggggaaacaccggtcccccaggcaccttcacctaaccagagcggggatttccaccgcccctcatgccgccctttggaggaaagtgaaagtgaaaggaggaagaggaggctaaatggctgaggaggtcgcagcgccatgaagtccctgtctctgctcctcgctgtggctttgggcctggcgaccgccgtctcagcaggacccgcggtgatcgagtgttggttcgtggaggatgcgagcggaaagggcctggccaagagacccggtgcactgctgttgcgccagggaccgggggaaccgccgccccggccggacctcgaccctgagctctatctcagtgtacacgaccccgcgggcgccctccaggctgccttcaggcggtatccccggggcgcccccgcaccacactgcgagatgagccgcttcgtgcctctccccgcctctgcgaaatgggccagcggcctgacccccgcgcagaactgcccgcgggccctggatggggcttggctgatggtcagcatatccagcccagtcctcagcctctccagcctcttgcgaccacagccagagcctcagcaggagcctgttctcatcaccatggcaacagtagagatggggtttcaccatgttggccaggctgctctcgaactcctgacctcagtggtactgactgtcctcacccacacccctgcccctcgagtgagactgggacaagatgctctgctggacttgagctttgcctacatgccccccacctccgaggccgcctcatctctggctccgggtccccctccctttgggctagagtggcgacgccagcacctgggtaagggacatctgctcctggctgcaactcctgggctgaatggccagatgccagcagcccaagaaggggccgtggcatttgctgcttgggatgatgatgagccatggggcccatggaccggaaatgggaccttctggctgcctagagttcaaccctttcaggagggcacctatctggccaccatacacctgccatacctgcaaggacaggtcaccctggagcttgctgtgtacaaaccccccaaagtgtccctgatgccagcaacccttgcacgggccgccccaggggaggcacccccggaattgctctgccttgtgtcccacttctacccttctgggggcctggaggtggagtgggaactccggggtggcccagggggccgctctcagaaggccgaggggcagaggtggctctcggccctgcgccaccattccgatggctctgtcagcctctctgggcacttgcagccgcccccagtcaccactgagcagcatggggcacgctatgcctgtcgaattcaccatcccagcctgcctgcctcggggcgcagcgctgaggtcaccctggaggtagcaggtctttcagggccctcccttgaggacagcgtaggccttttcctgtctgcctttcttctgcttgggctcttcaaggcactgggctgggctgctgtctacctgtccacctgcaaggattcaaagaagaaagcagagtgagggcactcactgccatcctgtggaagccaccatcatctctggcccaagcttctgtagtagctccctaaaataataccctatcatctgctcctaatccctccaatctctctccactgagtggctggaatgcttttttttttttctttcacttatataagggataatttttcttttttttttttttttgagacggagtctcactcttccgcccaggctgcagtgcagtggcatgatcttggcttactgcaacctccgcctcctgggttcaagcaattctgtggcttcagcctccggagtagctgggattacaggcacatgccaccacacccagtgaatttttgtatttttagtagagacggggtttcaccatgttggccaggctggtcttgaattcctgacctcaggtgatctgcccacctcagcctcccaaagtgctgggattacaggcgtgagccaccacaccaggcccgagaaatgcttttttaaaaaacacacatcttatggcattcaccttcttggagctctaggacagtggttctcaaaatttttttctctcaggacctcttaaaaatcatcaaggaccccaaaaagcttttgggtatgtgggttatagctatcaatatttatggtactagaacttaaaagtgagaaaaatttaaaacacgagaatacataggcacacattctattcatcgtgggaaccatggtgtcaatacatatcatgtagcttctgaaaaactccactgtacacttatagaatgaagaaggcaaaaaactttttttttttttttttgagactgagtctcgctctgtcgcccaggctggagtgcagtggcgcgatctcggctcactgcaagctccgcctctcgggttcacgccattctcctgcctcagcctcccaagtagctcggactacaggcgtcctccaccatgcctggctaatattttgtattttttagtagagacggggtttcaccgtgttagccaggatggtctcgatctcctaacctggtgatccgcccgcctcggcctcccaaagtattgggattacccgcgtgagccaccgcgcccggctgcaaataatctttctttttttctttttttctgagacagagtctcgctctgttgcccaggctggagtgcagtggcacgatctcggctcacggcacgctccgcctcccgggttcacgccattctcctgcctcagcttcccgagtagctgggactacaggggcccgccaccacgcccggctaactttttgtgtttttagtagagacggggtttcaccgtgttagccaggatggtctcgatctcctgaccttgtgatctgcccgcctcggcctcccaaagtgctgggattacaggcgtgagccaccgcgcccggcggcgaaacacgatattgtactaacatcttaattttgttataaaatctcacaaaccccctgacatagtctcagagatctgtagggccgaggttacatttggagaacccgtactctagggccaaatccattcttcttgccctggctcacttgtcccccccaccgccccgcgctggagccactgcctagttcttcagccctagatggtgctcgccagacctcctctcaatgctcatcacacacagggctattcctttcctccaatgaaccaaacgcctcccgcccacctccaggtcccagtcctctgttccctttgcctggtccacccttgccctccctgggtcgcagacgaggtcggcctcgtcattccccgcagaccgccgcgcgtccctcttgtgcggttcaccacagttgtatttaagtgatcgtgtgagtcgtcgttaaatgcctgtctccccgcggatcatgggctcctcgaggacagggaccggcctgtctgtccactgctgtaaccccgcgccggcatagggacctaaggcccactggagggcgctcatcaagtagctgctggatgttgacgaaggaagcggcggcgcagctcagggatctccgagtcaggacggtcggccagacccacggggtaacgggtctaatcgtgtaggaataaagctgtattccagtgcttccaaa

SEQ ID NO: 189141 - DNA, 3766 bp, Homo sapiens
  Payload ID: 17351
  Gene Symbol: TAPBP
  Gene Name: TAP binding protein (tapasin)
  Uniprot ID: O15533
  ENST ID: ENST00000374572
  CDS Start-End: 347-1693
ggggacgcggcacagatagggggaagccggagtaatggttttcgggcaagtggatgttggagagcacacacaggagttggggggcgggggagggcctggggttggggagggctcgaactcggggctgctgggtagtccaggagggcgcggtaaggctggggtatcctggtgagaactggagaggatctacccgggtccctgcctggccagtggggaaacaccggtcccccaggcaccttcacctaaccagagcggggatttccaccgcccctcatgccgccctttggaggaaagtgaaagtgaaaggaggaagaggaggctaaatggctgaggaggtcgcagcgccatgaagtccctgtctctgctcctcgctgtggctttgggcctggcgaccgccgtctcagcaggacccgcggtgatcgagtgttggttcgtggaggatgcgagcggaaagggcctggccaagagacccggtgcactgctgttgcgccagggaccgggggaaccgccgccccggccggacctcgaccctgagctctatctcagtgtacacgaccccgcgggcgccctccaggctgccttcaggcggtatccccggggcgcccccgcaccacactgcgagatgagccgcttcgtgcctctccccgcctctgcgaaatgggccagcggcctgacccccgcgcagaactgcccgcgggccctggatggggcttggctgatggtcagcatatccagcccagtcctcagcctctccagcctcttgcgaccacagccagagcctcagcaggagcctgttctcatcaccatggcaacagtggtactgactgtcctcacccacacccctgcccctcgagtgagactgggacaagatgctctgctggacttgagctttgcctacatgccccccacctccgaggccgcctcatctctggctccgggtccccctccctttgggctagagtggcgacgccagcacctgggtaagggacatctgctcctggctgcaactcctgggctgaatggccagatgccagcagcccaagaaggggccgtggcatttgctgcttgggatgatgatgagccatggggcccatggaccggaaatgggaccttctggctgcctagagttcaaccctttcaggagggcacctatctggccaccatacacctgccatacctgcaaggacaggtcaccctggagcttgctgtgtacaaaccccccaaagtgtccctgatgccagcaacccttgcacgggccgccccaggggaggcacccccggaattgctctgccttgtgtcccacttctacccttctgggggcctggaggtggagtgggaactccggggtggcccagggggccgctctcagaaggccgaggggcagaggtggctctcggccctgcgccaccattccgatggctctgtcagcctctctgggcacttgcagccgcccccagtcaccactgagcagcatggggcacgctatgcctgtcgaattcaccatcccagcctgcctgcctcggggcgcagcgctgaggtcaccctggaggtagcaggtctttcagggccctcccttgaggacagcgtaggccttttcctgtctgcctttcttctgcttgggctcttcaaggcactgggctgggctgctgtctacctgtccacctgcaaggattcaaagaagaaagcagagtgagggcactcactgccatcctgtggaagccaccatcatctctggcccaagcttctgtagtagctccctaaaataataccctatcatctgctcctaatccctccaatctctctccactgagtggctggaatgcttttttttttttctttcacttatataagggataatttttcttttttttttttttttgagacggagtctcactcttccgcccaggctgcagtgcagtggcatgatcttggcttactgcaacctccgcctcctgggttcaagcaattctgtggcttcagcctccggagtagctgggattacaggcacatgccaccacacccagtgaatttttgtatttttagtagagacggggtttcaccatgttggccaggctggtcttgaattcctgacctcaggtgatctgcccacctcagcctcccaaagtgctgggattacaggcgtgagccaccacaccaggcccgagaaatgcttttttaaaaaacacacatcttatggcattcaccttcttggagctctaggacagtggttctcaaaatttttttctctcaggacctcttaaaaatcatcaaggaccccaaaaagcttttgggtatgtgggttatagctatcaatatttatggtactagaacttaaaagtgagaaaaatttaaaacacgagaatacataggcacacattctattcatcgtgggaaccatggtgtcaatacatatcatgtagcttctgaaaaactccactgtacacttatagaatgaagaaggcaaaaaactttttttttttttttttgagactgagtctcgctctgtcgcccaggctggagtgcagtggcgcgatctcggctcactgcaagctccgcctctcgggttcacgccattctcctgcctcagcctcccaagtagctcggactacaggcgtcctccaccatgcctggctaatattttgtattttttagtagagacggggtttcaccgtgttagccaggatggtctcgatctcctaacctggtgatccgcccgcctcggcctcccaaagtattgggattacccgcgtgagccaccgcgcccggctgcaaataatctttctttttttctttttttctgagacagagtctcgctctgttgcccaggctggagtgcagtggcacgatctcggctcacggcacgctccgcctcccgggttcacgccattctcctgcctcagcttcccgagtagctgggactacaggggcccgccaccacgcccggctaactttttgtgtttttagtagagacggggtttcaccgtgttagccaggatggtctcgatctcctgaccttgtgatctgcccgcctcggcctcccaaagtgctgggattacaggcgtgagccaccgcgcccggcggcgaaacacgatattgtactaacatcttaattttgttataaaatctcacaaaccccctgacatagtctcagagatctgtagggccgaggttacatttggagaacccgtactctagggccaaatccattcttcttgccctggctcacttgtcccccccaccgccccgcgctggagccactgcctagttcttcagccctagatggtgctcgccagacctcctctcaatgctcatcacacacagggctattcctttcctccaatgaaccaaacgcctcccgcccacctccaggtcccagtcctctgttccctttgcctggtccacccttgccctccctgggtcgcagacgaggtcggcctcgtcattccccgcagaccgccgcgcgtccctcttgtgcggttcaccacagttgtatttaagtgatcgtgtgagtcgtcgttaaatgcctgtctccccgcggatcatgggctcctcgaggacagggaccggcctgtctgtccactgctgtaaccccgcgccggcatagggacctaaggcccactggagggcgctcatcaagtagctgctggatgttgacgaaggaagcggcggcgcagctcagggatctccgagtcaggacggtcggccagacccacggggtaacgggtctaatcgtgtaggaataaagctgtattccagtgcttccaaa

SEQ ID NO: 189142 - DNA, 1824 bp, Homo sapiens
  Payload ID: 17351
  Gene Symbol: TAPBP
  Gene Name: TAP binding protein (tapasin)
  ENST ID: ENST00000383065
  CDS Start-End: 172-1686
ctggagaggatctacccgggtccctgcctggccagtggggaaacaccggtcccccaggcaccttcacctaaccagagcggggatttccaccgcccctcatgccgccctttggaggaaagtgaaagtgaaaggaggaagaggaggcttcatggctgaggaggtcgcagcgccatgaagtccctgtctctgctcctcgctgtggctttgggcctggcgaccgccgtctcagcaggacccgcggtgatcgagtgttggttcgtggaggatgcgagcggaaagggcctggccaagagacccggtgcactgctgttgcgccagggaccgggggaaccgccgccccggccggacctcgaccctgagctctatctcagtgtacacgaccccgcgggcgccctccaggctgccttcaggcggtatccccggggcgcccccgcaccacactgcgagatgagccgcttcgtgcctctccccgcctctgcgaaatgggccagcggcctgacccccgcgcagaactgcccgcgggccctggatggggcttggctgatggtcagcatatccagcccagtcctcagcctctccagcctcttgcgaccacagccagagcctcagcaggagcctgttctcatcaccatggcaacagtggtactgactgtcctcacccacacccctgcccctcgagtgagactgggacaagatgctctgctggacttgagctttgcctacatgccccccacctccgaggccgcctcatctctggctccgggtccccctccctttgggctagagtggcgacgccagcacctgggtaagggacatctgctcctggctgcaactcctgggctgaatggccagatgccagcagcccaagaaggggccgtggcatttgctgcttgggatgatgatgagccatggggcccatggaccggaaatgggaccttctggctgcctacagttcaaccctttcaggagggcacctatctggccaccatacacctgccatacctgcaaggacaggtcaccctggagcttgctgtgtacaaaccccccaaagtgtccctgatgccagcaacccttgcacgggccgccccaggggaggcacccccggaattgctctgccttgtgtcccacttctacccttctgggggcctggaggtggagtgggaactccggggtggcccagggggccgctctcagaaggccgaggggcagaggtggctctcggccctgcgccaccattccgatggctctgtcagcctctctgggcacttgcagccgcccccagtcaccactgagcagcatggggcacgctatgcctgtcgaattcaccatcccagcctgcctgcctcggggcgcagcgctgaggtcaccctggaggtagcaggtctttcagggccctcccttgaggacagcgtaggccttttcctgtctgcctttcttctgcttgggctcttcaaggcactgggctgggctgctgtctacctgtccacctgcaaggattcaaagaaggtacagtgctccacctctctgtatctttcccttgtcactttatctcctcatcctatctcaaaacccatggagggaggctgctggtgtggtaggcagaacctaggcttggaattcacactgatctgggttaaaacctggcactatatcctaactgtaggactctttgagcatgctacttaatctatatgtttccttgggtgtagggattttaaaaagttacttaggcagtgctgtccaatagaaagataatgcaagccacatatgtaaatttaaatactctagtactcacattaaaaaaataagcagaaacaggtaaaa

SEQ ID NO: 189143 - DNA, 3759 bp, Homo sapiens
  Payload ID: 17351
  Gene Symbol: TAPBP
  Gene Name: TAP binding protein (tapasin)
  Uniprot ID: O15533
  ENST ID: ENST00000383066
  CDS Start-End: 347-1693
ggggacgcggcacagatagggggaagccggagtaatggttttcgggcaagtggatgttggagagcacacacaggagttggggggcgggggagggcctggggttggggagggctcgaactcggggctgctgggtagtccaggagggcgcggtaaggctggggtgtcctggtgagaactggagaggatctacccgggtccctgcctggccagtggggaaacaccggtcccccaggcaccttcacctaaccagagcggggatttccaccgcccctcatgccgccctttggaggaaagtgaaagtgaaaggaggaagaggaggcttcatggctgaggaggtcgcagcgccatgaagtccctgtctctgctcctcgctgtggctttgggcctggcgaccgccgtctcagcaggacccgcggtgatcgagtgttggttcgtggaggatgcgagcggaaagggcctggccaagagacccggtgcactgctgttgcgccagggaccgggggaaccgccgccccggccggacctcgaccctgagctctatctcagtgtacacgaccccgcgggcgccctccaggctgccttcaggcggtatccccggggcgcccccgcaccacactgcgagatgagccgcttcgtgcctctccccgcctctgcgaaatgggccagcggcctgacccccgcgcagaactgcccgcgggccctggatggggcttggctgatggtcagcatatccagcccagtcctcagcctctccagcctcttgcgaccacagccagagcctcagcaggagcctgttctcatcaccatggcaacagtggtactgactgtcctcacccacacccctgcccctcgagtgagactgggacaagatgctctgctggacttgagctttgcctacatgccccccacctccgaggccgcctcatctctggctccgggtccccctccctttgggctagagtggcgacgccagcacctgggtaagggacatctgctcctggctgcaactcctgggctgaatggccagatgccagcagcccaagaaggggccgtggcatttgctgcttgggatgatgatgagccatggggcccatggaccggaaatgggaccttctggctgcctacagttcaaccctttcaggagggcacctatctggccaccatacacctgccatacctgcaaggacaggtcaccctggagcttgctgtgtacaaaccccccaaagtgtccctgatgccagcaacccttgcacgggccgccccaggggaggcacccccggaattgctctgccttgtgtcccacttctacccttctgggggcctggaggtggagtgggaactccggggtggcccagggggccgctctcagaaggccgaggggcagaggtggctctcggccctgcgccaccattccgatggctctgtcagcctctctgggcacttgcagccgcccccagtcaccactgagcagcatggggcacgctatgcctgtcgaattcaccatcccagcctgcctgcctcggggcgcagcgctgaggtcaccctggaggtagcaggtctttcagggccctcccttgaggacagcgtaggccttttcctgtctgcctttcttctgcttgggctcttcaaggcactgggctgggctgctgtctacctgtccacctgcaaggattcaaagaagaaagcagagtgagggcactcactgccatcctgtggaagccaccatcatctctggcccaagcttctgtagtagctccctaaaataataccctatcatctgctcctaatccctccaatctctctccactgagtggctggaatgcttttttttttttctttcacttatataagggataatttttcttttttttttttttttgagacggagtctcactcttccgcccaggctgcagtgcagtggcatgatcttggcttactgcaacctccgcctcctgggttcaagcaattctgtggcttcagcctccggagtagctgggattacaggcacatgccaccacacccagtgaatttttgtatttttagtagagacggggtttcaccatgttggccaggctggtcttgaattcctgacctcaggtgatctgcccacctcagcctcccaaagtgctgggattacaggcgtgagccaccacaccaggcccgagaaatgcttttttaaaaaacacacatcttatggcattcaccttcttggagctctaggacagtggttctcaaaatttttttctctcaggacctcttaaaaatcatcaaggaccccaaaaagcttttgggtatgtgggttatagctatcaatatttatggtactagaacttaaaagtgagaaaaatttaaaacacgagaatacataggcacacattctattcatcgtgggaaccatggtgtcaatacatatcatgtagcttctgaaaaactccactgtacacttatagaatgaagaaggcaaaaaacttttttttttttttttttgagacggagtctcgctctgtcgcccaggctggagtgcagtggcgcgatctcggctcactgcaagctccgcctctcgggttcacgccattctcctgcctcagcctcccaagtagctcggactacaggcgtcctccaccatgcctggctaatattttgtattttttagtagagacggggtttcaccgtgttagccaggatggtctcgatctcctaacctggtgatccgcccgcctcggcctcccaaagtattgggattacccgcgtgagccaccgcgcccggctgcaaataatctttctttttttctgagacagagtctcgctctgttgcccaggctggagtgcagtggcacgatctcggctcacggcacgctccgcctcccgggttcacgccattctcctgcctcagcttcccgagtagctgggactacaggggcccgccaccacgcccggctaactttttgtgtttttagtagagacggggtttcaccgtgttagccaggatggtctcgatctcctgaccttgtgatctgcccgcctcggcctcccaaagtgctgggattacaggcgtgagccaccgcgcccggcggcgaaacacgatattgtactaacatcttaattttgttataaaatctcacaaaccccctgacatagtctcagagatctgtagggccgaggttacatttggagaacccgtactctagggccaaatccattcttcttgccctggctcacttgtcccccccaccgccccgcgctggagccactgcctagttcttcagccctagatggtgctcgccagacctcctctcaatgctcatcacacacagggctattcctttcctccaatgaaccaaacgcctcccgcccacctccaggtcccagtcctctgttccctttgcctggtccacccttgccctccctgggtcgcagacgaggtcggcctcgtcattccccgcagaccgccgcgcgtccctcttgtgcggttcaccacagttgtatttaagtgatcgtgtgagtcgtcgttaaatgcctgtctccccgcggatcatgggctcctcgaggacagggactggcctgtctgtccactgctgtaaccccgcgccggcatagggacctaaggcccactggagggcgctcatcaagtagctgctggatgttgacgaaggaagcggcggcgcagctcagggatctccgagtcaggacggtcggccagacccacggggtaacgggtctaatcgtgtaggaataaagctgtattccagtgcttccaaa

SEQ ID NO: 189144 - DNA, 3677 bp, Homo sapiens
  Payload ID: 17351
  Gene Symbol: TAPBP
  Gene Name: TAP binding protein (tapasin)
  ENST ID: ENST00000383067
  CDS Start-End: 211-1611
ccaggagggcgcggtaaggctggggtgtcctggtgagaactggagaggatctacccgggtccctgcctggccagtggggaaacaccggtcccccaggcaccttcacctaaccagagcggggatttccaccgcccctcatgccgccctttggaggaaagtgaaagtgaaaggaggaagaggaggcttcatggctgaggaggtcgcagcgccatgaagtccctgtctctgctcctcgctgtggctttgggcctggcgaccgccgtctcagcaggacccgcggtgatcgagtgttggttcgtggaggatgcgagcggaaagggcctggccaagagacccggtgcactgctgttgcgccagggaccgggggaaccgccgccccggccggacctcgaccctgagctctatctcagtgtacacgaccccgcgggcgccctccaggctgccttcaggcggtatccccggggcgcccccgcaccacactgcgagatgagccgcttcgtgcctctccccgcctctgcgaaatgggccagcggcctgacccccgcgcagaactgcccgcgggccctggatggggcttggctgatggtcagcatatccagcccagtcctcagcctctccagcctcttgcgaccacagccagagcctcagcaggagcctgttctcatcaccatggcaacagtagagatggggtttcaccatgttggccaggctgctctcgaactcctgacctcagtggtactgactgtcctcacccacacccctgcccctcgagtgagactgggacaagatgctctgctggacttgagctttgcctacatgccccccacctccgaggccgcctcatctctggctccgggtccccctccctttgggctagagtggcgacgccagcacctgggtaagggacatctgctcctggctgcaactcctgggctgaatggccagatgccagcagcccaagaaggggccgtggcatttgctgcttgggatgatgatgagccatggggcccatggaccggaaatgggaccttctggctgcctacagttcaaccctttcaggagggcacctatctggccaccatacacctgccatacctgcaaggacaggtcaccctggagcttgctgtgtacaaaccccccaaagtgtccctgatgccagcaacccttgcacgggccgccccaggggaggcacccccggaattgctctgccttgtgtcccacttctacccttctgggggcctggaggtggagtgggaactccggggtggcccagggggccgctctcagaaggccgaggggcagaggtggctctcggccctgcgccaccattccgatggctctgtcagcctctctgggcacttgcagccgcccccagtcaccactgagcagcatggggcacgctatgcctgtcgaattcaccatcccagcctgcctgcctcggggcgcagcgctgaggtcaccctggaggtagcaggtctttcagggccctcccttgaggacagcgtaggccttttcctgtctgcctttcttctgcttgggctcttcaaggcactgggctgggctgctgtctacctgtccacctgcaaggattcaaagaagaaagcagagtgagggcactcactgccatcctgtggaagccaccatcatctctggcccaagcttctgtagtagctccctaaaataataccctatcatctgctcctaatccctccaatctctctccactgagtggctggaatgcttttttttttttctttcacttatataagggataatttttcttttttttttttttttgagacggagtctcactcttccgcccaggctgcagtgcagtggcatgatcttggcttactgcaacctccgcctcctgggttcaagcaattctgtggcttcagcctccggagtagctgggattacaggcacatgccaccacacccagtgaatttttgtatttttagtagagacggggtttcaccatgttggccaggctggtcttgaattcctgacctcaggtgatctgcccacctcagcctcccaaagtgctgggattacaggcgtgagccaccacaccaggcccgagaaatgcttttttaaaaaacacacatcttatggcattcaccttcttggagctctaggacagtggttctcaaaatttttttctctcaggacctcttaaaaatcatcaaggaccccaaaaagcttttgggtatgtgggttatagctatcaatatttatggtactagaacttaaaagtgagaaaaatttaaaacacgagaatacataggcacacattctattcatcgtgggaaccatggtgtcaatacatatcatgtagcttctgaaaaactccactgtacacttatagaatgaagaaggcaaaaaacttttttttttttttttttgagacggagtctcgctctgtcgcccaggctggagtgcagtggcgcgatctcggctcactgcaagctccgcctctcgggttcacgccattctcctgcctcagcctcccaagtagctcggactacaggcgtcctccaccatgcctggctaatattttgtattttttagtagagacggggtttcaccgtgttagccaggatggtctcgatctcctaacctggtgatccgcccgcctcggcctcccaaagtattgggattacccgcgtgagccaccgcgcccggctgcaaataatctttctttttttctgagacagagtctcgctctgttgcccaggctggagtgcagtggcacgatctcggctcacggcacgctccgcctcccgggttcacgccattctcctgcctcagcttcccgagtagctgggactacaggggcccgccaccacgcccggctaactttttgtgtttttagtagagacggggtttcaccgtgttagccaggatggtctcgatctcctgaccttgtgatctgcccgcctcggcctcccaaagtgctgggattacaggcgtgagccaccgcgcccggcggcgaaacacgatattgtactaacatcttaattttgttataaaatctcacaaaccccctgacatagtctcagagatctgtagggccgaggttacatttggagaacccgtactctagggccaaatccattcttcttgccctggctcacttgtcccccccaccgccccgcgctggagccactgcctagttcttcagccctagatggtgctcgccagacctcctctcaatgctcatcacacacagggctattcctttcctccaatgaaccaaacgcctcccgcccacctccaggtcccagtcctctgttccctttgcctggtccacccttgccctccctgggtcgcagacgaggtcggcctcgtcattccccgcagaccgccgcgcgtccctcttgtgcggttcaccacagttgtatttaagtgatcgtgtgagtcgtcgttaaatgcctgtctccccgcggatcatgggctcctcgaggacagggactggcctgtctgtccactgctgtaaccccgcgccggcatagggacctaaggcccactggagggcgctcatcaagtagctgctggatgttgacgaaggaagcggcggcgcagctcagggatctccgagtcaggacggtcggccagacccacggggtaacgggtctaatcgtgtaggaataaagctgtattccagtgcttccaaa

SEQ ID NO: 189145 - DNA, 1824 bp, Homo sapiens
  Payload ID: 17351
  Gene Symbol: TAPBP
  Gene Name: TAP binding protein (tapasin)
  Uniprot ID: O15533
  ENST ID: ENST00000383197
  CDS Start-End: 172-1686
ctggagaggatctacccgggtccctgcctggccagtggggaaacaccggtcccccaggcaccttcacctaaccagagcggggatttccaccgcccctcatgccgccctttggaggaaagtgaaagtgaaaggaggaagaggaggcttcatggctgaggaggtcgcagcgccatgaagtccctgtctctgctcctcgctgtggctttgggcctggcgaccgccgtctcagcaggacccgcggtgatcgagtgttggttcgtggaggatgcgagcggaaagggcctggccaagagacccggtgcactgctgttgcgccagggaccgggggaaccgccgccccggccggacctcgaccctgagctctatctcagtgtacacgaccccgcgggcgccctccaggctgccttcaggcggtatccccggggcgcccccgcaccacactgcgagatgagccgcttcgtgcctctccccgcctctgcgaaatgggccagcggcctgacccccgcgcagaactgcccgcgggccctggatggggcttggctgatggtcagcatatccagcccagtcctcagcctctccagcctcttgcgaccacagccagagcctcagcaggagcctgttctcatcaccatggcaacagtggtactgactgtcctcacccacacccctgcccctcgagtgagactgggacaagatgctctgctggacttgagctttgcctacatgccccccacctccgaggccgcctcatctctggctccgggtccccctccctttgggctagagtggcgacgccagcacctgggtaagggacatctgctcctggctgcaactcctgggctgaatggccagatgccagcagcccaagaaggggccgtggcatttgctgcttgggatgatgatgagccatggggcccatggaccggaaatgggaccttctggctgcctagagttcaaccctttcaggagggcacctatctggccaccatacacctgccatacctgcaaggacaggtcaccctggagcttgctgtgtacaaaccccccaaagtgtccctgatgccagcaacccttgcacgggccgccccaggggaggcacccccggaattgctctgccttgtgtcccacttctacccttctgggggcctggaggtggagtgggaactccggggtggcccagggggccgctctcagaaggccgaggggcagaggtggctctcggccctgcgccaccattccgatggctctgtcagcctctctgggcacttgcagccgcccccagtcaccactgagcagcatggggcacgctatgcctgtcgaattcaccatcccagcctgcctgcctcggggcgcagcgctgaggtcaccctggaggtagcaggtctttcagggccctcccttgaggacagcgtaggccttttcctgtctgcctttcttctgcttgggctcttcaaggcactgggctgggctgctgtctacctgtccacctgcaaggattcaaagaaggtacagtgctccacctctctgtatctttcccttgtcactttatctcctcatcctatctcaaaacccatggagggaggctgctggtgtggtaggcagaacctaggcttggaattcacactgatctgggttaaaacctggcactatatcctaactgtaggactctttgagcatgctacttaatctatatgtttccttgggtgtagggattttaaaaagttacttaggcagtgctgtccaatagaaagataatgcaagccacatatgtaaatttaaatactctagtactcacattaaaaaaataagcagaaacaggtaaaa

SEQ ID NO: 189146 - DNA, 3766 bp, Homo sapiens
  Payload ID: 17351
  Gene Symbol: TAPBP
  Gene Name: TAP binding protein (tapasin)
  Uniprot ID: O15533
  ENST ID: ENST00000383198
  CDS Start-End: 347-1693
ggggacgcggcacagatagggggaagccggagtaatggttttcgggcaagtggatgttggagagcacacacaggagttggggggcgggggagggcctggggttggggagggctcgaactcggggctgctgggtagtccaggagggcgcggtaaggctggggtatcctggtgagaactggagaggatctacccgggtccctgcctggccagtggggaaacaccggtcccccaggcaccttcacctaaccagagcggggatttccaccgcccctcatgccgccctttggaggaaagtgaaagtgaaaggaggaagaggaggcttcatggctgaggaggtcgcagcgccatgaagtccctgtctctgctcctcgctgtggctttgggcctggcgaccgccgtctcagcaggacccgcggtgatcgagtgttggttcgtggaggatgcgagcggaaagggcctggccaagagacccggtgcactgctgttgcgccagggaccgggggaaccgccgccccggccggacctcgaccctgagctctatctcagtgtacacgaccccgcgggcgccctccaggctgccttcaggcggtatccccggggcgcccccgcaccacactgcgagatgagccgcttcgtgcctctccccgcctctgcgaaatgggccagcggcctgacccccgcgcagaactgcccgcgggccctggatggggcttggctgatggtcagcatatccagcccagtcctcagcctctccagcctcttgcgaccacagccagagcctcagcaggagcctgttctcatcaccatggcaacagtggtactgactgtcctcacccacacccctgcccctcgagtgagactgggacaagatgctctgctggacttgagctttgcctacatgccccccacctccgaggccgcctcatctctggctccgggtccccctccctttgggctagagtggcgacgccagcacctgggtaagggacatctgctcctggctgcaactcctgggctgaatggccagatgccagcagcccaagaaggggccgtggcatttgctgcttgggatgatgatgagccatggggcccatggaccggaaatgggaccttctggctgcctagagttcaaccctttcaggagggcacctatctggccaccatacacctgccatacctgcaaggacaggtcaccctggagcttgctgtgtacaaaccccccaaagtgtccctgatgccagcaacccttgcacgggccgccccaggggaggcacccccggaattgctctgccttgtgtcccacttctacccttctgggggcctggaggtggagtgggaactccggggtggcccagggggccgctctcagaaggccgaggggcagaggtggctctcggccctgcgccaccattccgatggctctgtcagcctctctgggcacttgcagccgcccccagtcaccactgagcagcatggggcacgctatgcctgtcgaattcaccatcccagcctgcctgcctcggggcgcagcgctgaggtcaccctggaggtagcaggtctttcagggccctcccttgaggacagcgtaggccttttcctgtctgcctttcttctgcttgggctcttcaaggcactgggctgggctgctgtctacctgtccacctgcaaggattcaaagaagaaagcagagtgagggcactcactgccatcctgtggaagccaccatcatctctggcccaagcttctgtagtagctccctaaaataataccctatcatctgctcctaatccctccaatctctctccactgagtggctggaatgcttttttttttttctttcacttatataagggataatttttctttttttttttttttgagacggagtctcactcttccgcccaggctgcagtgcagtggcatgatcttggcttactgcaacctccgcctcctgggttcaagcaattctgtggcttcagcctccggagtagctgggattacaggcacatgccaccacacccagtgaatttttgtatttttagtagagacggggtttcaccatgttggccaggctggtcttgaattcctgacctcaggtgatctgcccacctcagcctcccaaagtgctgggattacaggcgtgagccaccacaccaggcccgagaaatgcttttttaaaaaacacacatcttatggcattcaccttcttggagctctaggacagtggttctcaaaatttttttctctcaggacctcttaaaaatcatcaaggaccccaaaaagcttttgggtatgtgggttatagctatcaatatttatggtactagaacttaaaagtgagaaaaatttaaaacacgagaatacataggcacacattctattcatcgtgggaaccatggtgtcaatacatatcatgtagcttctgaaaaactccactgtacacttatagaatgaagaaggcaaaaaacttttttttttttttttttgagacggagtctcgctctgtcgcccaggctggagtgcagtggcgcgatctcggctcactgcaagctccgcctctcgggttcacgccattctcctgcctcagcctcccaagtagctcggactacaggcgtcctccaccatgcctggctaatattttgtattttttagtagagacggggtttcaccgtgttagccaggatggtctcgatctcctaacctggtgatccgcccgcctcggcctcccaaagtattgggattacccgcgtgagccaccgcgcccggctgcaaataatctttctttttttctttttttctgagacagagtctcgctctgttgcccaggctggagtgcagtggcacgatctcggctcacggcacgctccgcctcccgggttcacgccattctcctgcctcagcttcccgagtagctgggactacaggggcccgccaccacgcccggctaactttttgtgtttttagtagagacggggtttcaccgtgttagccaggatggtctcgatctcctgaccttgtgatctgcccgcctcggcctcccaaagtgctgggattacaggcgtgagccaccgcgcccggcggcgaaacacgatattgtactaacatcttaattttgttataaaatctcacaaaccccctgacatagtctcagagatctgtagggccgaggttacatttggagaacccgtactctagggccaaatccattcttcttgccctggctcacttgtcccccccaccgccccgcgctggagccactgcctagttcttcagccctagatggtgctcgccagacctcctctcaatgctcatcacacacagggctattcctttcctccaatgaaccaaacgcctcccgcccacctccaggtcccagtcctctgttccctttgcctggtccacccttgccctccctgggtcgcagacgaggtcggcctcgtcattccccgcagaccgccgcgcgtccctcttgtgcggttcaccacagttgtatttaagtgatcgtgtgagtcgtcgttaaatgcctgtctccccgcggatcatgggctcctcgaggacagggaccggcctgtctgtccactgctgtaaccccgcgccggcatagggacctaaggcccactggagggcgctcatcaagtagctgctggatgttgacgaaggaagcggcggcgcagctcagggatctccgagtcaggacggtcggccagacccacggggtaacgggtctaatcgtgtaggaataaagctgtattccagtgcttccaaa

SEQ ID NO: 189147 - DNA, 1824 bp, Homo sapiens
  Payload ID: 17351
  Gene Symbol: TAPBP
  Gene Name: TAP binding protein (tapasin)
  Uniprot ID: O15533
  ENST ID: ENST00000395114
  CDS Start-End: 172-1686
ctggagaggatctacccgggtccctgcctggccagtggggaaacaccggtcccccaggcaccttcacctaaccagagcggggatttccaccgcccctcatgccgccctttggaggaaagtgaaagtgaaaggaggaagaggaggctaaatggctgaggaggtcgcagcgccatgaagtccctgtctctgctcctcgctgtggctttgggcctggcgaccgccgtctcagcaggacccgcggtgatcgagtgttggttcgtggaggatgcgagcggaaagggcctggccaagagacccggtgcactgctgttgcgccagggaccgggggaaccgccgccccggccggacctcgaccctgagctctatctcagtgtacacgaccccgcgggcgccctccaggctgccttcaggcggtatccccggggcgcccccgcaccacactgcgagatgagccgcttcgtgcctctccccgcctctgcgaaatgggccagcggcctgacccccgcgcagaactgcccgcgggccctggatggggcttggctgatggtcagcatatccagcccagtcctcagcctctccagcctcttgcgaccacagccagagcctcagcaggagcctgttctcatcaccatggcaacagtggtactgactgtcctcacccacacccctgcccctcgagtgagactgggacaagatgctctgctggacttgagctttgcctacatgccccccacctccgaggccgcctcatctctggctccgggtccccctccctttgggctagagtggcgacgccagcacctgggtaagggacatctgctcctggctgcaactcctgggctgaatggccagatgccagcagcccaagaaggggccgtggcatttgctgcttgggatgatgatgagccatggggcccatggaccggaaatgggaccttctggctgcctagagttcaaccctttcaggagggcacctatctggccaccatacacctgccatacctgcaaggacaggtcaccctggagcttgctgtgtacaaaccccccaaagtgtccctgatgccagcaacccttgcacgggccgccccaggggaggcacccccggaattgctctgccttgtgtcccacttctacccttctgggggcctggaggtggagtgggaactccggggtggcccagggggccgctctcagaaggccgaggggcagaggtggctctcggccctgcgccaccattccgatggctctgtcagcctctctgggcacttgcagccgcccccagtcaccactgagcagcatggggcacgctatgcctgtcgaattcaccatcccagcctgcctgcctcggggcgcagcgctgaggtcaccctggaggtagcaggtctttcagggccctcccttgaggacagcgtaggccttttcctgtctgcctttcttctgcttgggctcttcaaggcactgggctgggctgctgtctacctgtccacctgcaaggattcaaagaaggtacagtgctccacctctctgtatctttcccttgtcactttatctcctcatcctatctcaaaacccatggagggaggctgctggtgtggtaggcagaacctaggcttggaattcacactgatctgggttaaaacctggcactatatcctaactgtaggactctttgagcatgctacttaatctatatgtttccttgggtgtagggattttaaaaagttacttaggcagtgctgtccaatagaaagataatgcaagccacatatgtaaatttaaatactctagtactcacattaaaaaaataagcagaaacaggtaaaa

SEQ ID NO: 189148 - DNA, 817 bp, Homo sapiens
  Payload ID: 17351
  Gene Symbol: TAPBP
  Gene Name: TAP binding protein (tapasin)
  ENST ID: ENST00000456592
  CDS Start-End: 347-817
ggggacgcggcacagatagggggaagccggagtaatggttttcgggcaagtggatgttggagagcacacacaggagttggggggcgggggagggcctggggttggggagggctcgaactcggggctgctgggtagtccaggagggcgcggtaaggctggggtgtcctggtgagaactggagaggatctacccgggtccctgcctggccagtggggaaacaccggtcccccaggcaccttcacctaaccagagcggggatttccaccgcccctcatgccgccctttggaggaaagtgaaagtgaaaggaggaagaggaggcttcatggctgaggaggtcgcagcgccatgaagtccctgtctctgctcctcgctgtggctttgggcctggcgaccgccgtctcagcaggacccgcggtgatcgagtgttggttcgtggaggatgcgagcggaaagggcctggccaagagacccggtgcactgctgttgcgccagggaccgggggaaccgccgccccggccggacctcgaccctgagctctatctcagtgtacacgaccccgcgggcgccctccaggctgccttcaggcggtatccccggggcgcccccgcaccacactgcgagatgagccgcttcgtgcctctccccgcctctgcgaaatgggccagcggcctgacccccgcgcagaactgcccgcgggccctggatggggcttggctgatggtcagcatatccagcatggggcacgctatgcctgtcgaattcaccatcccagcctgcctgcctcggggcgcagcgctgaggtcaccctggaggtag

SEQ ID NO: 189149 - DNA, 3684 bp, Homo sapiens
  Payload ID: 17351
  Gene Symbol: TAPBP
  Gene Name: TAP binding protein (tapasin)
  ENST ID: ENST00000412144
  CDS Start-End: 211-1611
ccaggagggcgcggtaaggctggggtatcctggtgagaactggagaggatctacccgggtccctgcctggccagtggggaaacaccggtcccccaggcaccttcacctaaccagagcggggatttccaccgcccctcatgccgccctttggaggaaagtgaaagtgaaaggaggaagaggaggcttcatggctgaggaggtcgcagcgccatgaagtccctgtctctgctcctcgctgtggctttgggcctggcgaccgccgtctcagcaggacccgcggtgatcgagtgttggttcgtggaggatgcgagcggaaagggcctggccaagagacccggtgcactgctgttgcgccagggaccgggggaaccgccgccccggccggacctcgaccctgagctctatctcagtgtacacgaccccgcgggcgccctccaggctgccttcaggcggtatccccggggcgcccccgcaccacactgcgagatgagccgcttcgtgcctctccccgcctctgcgaaatgggccagcggcctgacccccgcgcagaactgcccgcgggccctggatggggcttggctgatggtcagcatatccagcccagtcctcagcctctccagcctcttgcgaccacagccagagcctcagcaggagcctgttctcatcaccatggcaacagtagagatggggtttcaccatgttggccaggctgctctcgaactcctgacctcagtggtactgactgtcctcacccacacccctgcccctcgagtgagactgggacaagatgctctgctggacttgagctttgcctacatgccccccacctccgaggccgcctcatctctggctccgggtccccctccctttgggctagagtggcgacgccagcacctgggtaagggacatctgctcctggctgcaactcctgggctgaatggccagatgccagcagcccaagaaggggccgtggcatttgctgcttgggatgatgatgagccatggggcccatggaccggaaatgggaccttctggctgcctagagttcaaccctttcaggagggcacctatctggccaccatacacctgccatacctgcaaggacaggtcaccctggagcttgctgtgtacaaaccccccaaagtgtccctgatgccagcaacccttgcacgggccgccccaggggaggcacccccggaattgctctgccttgtgtcccacttctacccttctgggggcctggaggtggagtgggaactccggggtggcccagggggccgctctcagaaggccgaggggcagaggtggctctcggccctgcgccaccattccgatggctctgtcagcctctctgggcacttgcagccgcccccagtcaccactgagcagcatggggcacgctatgcctgtcgaattcaccatcccagcctgcctgcctcggggcgcagcgctgaggtcaccctggaggtagcaggtctttcagggccctcccttgaggacagcgtaggccttttcctgtctgcctttcttctgcttgggctcttcaaggcactgggctgggctgctgtctacctgtccacctgcaaggattcaaagaagaaagcagagtgagggcactcactgccatcctgtggaagccaccatcatctctggcccaagcttctgtagtagctccctaaaataataccctatcatctgctcctaatccctccaatctctctccactgagtggctggaatgcttttttttttttctttcacttatataagggataatttttctttttttttttttttgagacggagtctcactcttccgcccaggctgcagtgcagtggcatgatcttggcttactgcaacctccgcctcctgggttcaagcaattctgtggcttcagcctccggagtagctgggattacaggcacatgccaccacacccagtgaatttttgtatttttagtagagacggggtttcaccatgttggccaggctggtcttgaattcctgacctcaggtgatctgcccacctcagcctcccaaagtgctgggattacaggcgtgagccaccacaccaggcccgagaaatgcttttttaaaaaacacacatcttatggcattcaccttcttggagctctaggacagtggttctcaaaatttttttctctcaggacctcttaaaaatcatcaaggaccccaaaaagcttttgggtatgtgggttatagctatcaatatttatggtactagaacttaaaagtgagaaaaatttaaaacacgagaatacataggcacacattctattcatcgtgggaaccatggtgtcaatacatatcatgtagcttctgaaaaactccactgtacacttatagaatgaagaaggcaaaaaacttttttttttttttttttgagacggagtctcgctctgtcgcccaggctggagtgcagtggcgcgatctcggctcactgcaagctccgcctctcgggttcacgccattctcctgcctcagcctcccaagtagctcggactacaggcgtcctccaccatgcctggctaatattttgtattttttagtagagacggggtttcaccgtgttagccaggatggtctcgatctcctaacctggtgatccgcccgcctcggcctcccaaagtattgggattacccgcgtgagccaccgcgcccggctgcaaataatctttctttttttctttttttctgagacagagtctcgctctgttgcccaggctggagtgcagtggcacgatctcggctcacggcacgctccgcctcccgggttcacgccattctcctgcctcagcttcccgagtagctgggactacaggggcccgccaccacgcccggctaactttttgtgtttttagtagagacggggtttcaccgtgttagccaggatggtctcgatctcctgaccttgtgatctgcccgcctcggcctcccaaagtgctgggattacaggcgtgagccaccgcgcccggcggcgaaacacgatattgtactaacatcttaattttgttataaaatctcacaaaccccctgacatagtctcagagatctgtagggccgaggttacatttggagaacccgtactctagggccaaatccattcttcttgccctggctcacttgtcccccccaccgccccgcgctggagccactgcctagttcttcagccctagatggtgctcgccagacctcctctcaatgctcatcacacacagggctattcctttcctccaatgaaccaaacgcctcccgcccacctccaggtcccagtcctctgttccctttgcctggtccacccttgccctccctgggtcgcagacgaggtcggcctcgtcattccccgcagaccgccgcgcgtccctcttgtgcggttcaccacagttgtatttaagtgatcgtgtgagtcgtcgttaaatgcctgtctccccgcggatcatgggctcctcgaggacagggaccggcctgtctgtccactgctgtaaccccgcgccggcatagggacctaaggcccactggagggcgctcatcaagtagctgctggatgttgacgaaggaagcggcggcgcagctcagggatctccgagtcaggacggtcggccagacccacggggtaacgggtctaatcgtgtaggaataaagctgtattccagtgcttccaaa

SEQ ID NO: 189150 - DNA, 612 bp, Homo sapiens
  Payload ID: 17351
  Gene Symbol: TAPBP
  Gene Name: TAP binding protein (tapasin)
  ENST ID: ENST00000451696
  CDS Start-End: 6-612
gcgccatgaagtccctgtctctgctcctcgctgtggctttgggcctggcgaccgccgtctcagcaggacccgcggtgatcgagtgttggttcgtggaggatgcgagcggaaagggcctggccaagagacccggtgcactgctgttgcgccagggaccgggggaaccgccgccccggccggacctcgaccctgagctctatctcagtgtacacgtggtactgactgtcctcacccacacccctgcccctcgagtgagactgggacaagatgctctgctggacttgagctttgcctacatgccccccacctccgaggccgcctcatctctggctccgggtccccctccctttgggctagagtggcgacgccagcacctgggtaagggacatctgctcctggctgcaactcctgggctgaatggccagatgccagcagcccaagaaggggccgtggcatttgctgcttgggatgatgatgagccatggggcccatggaccggaaatgggaccttctggctgcctagagttcaaccctttcaggagggcacctatctggccaccatacacctgccatacctgcaaggacaggtcaccctggagcttgctgtgtaca

SEQ ID NO: 189151 - DNA, 3759 bp, Homo sapiens; identical to SEQ ID NO: 189143
  Payload ID: 17351
  Gene Symbol: TAPBP
  Gene Name: TAP binding protein (tapasin)
  Uniprot ID: O15533
  ENST ID: ENST00000434618
  CDS Start-End: 347-1693

SEQ ID NO: 189152 - DNA, 612 bp, Homo sapiens
  Payload ID: 17351
  Gene Symbol: TAPBP
  Gene Name: TAP binding protein (tapasin)
  ENST ID: ENST00000444432
  CDS Start-End: 6-612
gcgccatgaagtccctgtctctgctcctcgctgtggctttgggcctggcgaccgccgtctcagcaggacccgcggtgatcgagtgttggttcgtggaggatgcgagcggaaagggcctggccaagagacccggtgcactgctgttgcgccagggaccgggggaaccgccgccccggccggacctcgaccctgagctctatctcagtgtacacgtggtactgactgtcctcacccacacccctgcccctcgagtgagactgggacaagatgctctgctggacttgagctttgcctacatgccccccacctccgaggccgcctcatctctggctccgggtccccctccctttgggctagagtggcgacgccagcacctgggtaagggacatctgctcctggctgcaactcctgggctgaatggccagatgccagcagcccaagaaggggccgtggcatttgctgcttgggatgatgatgagccatggggcccatggaccggaaatgggaccttctggctgcctacagttcaaccctttcaggagggcacctatctggccaccatacacctgccatacctgcaaggacaggtcaccctggagcttgctgtgtaca

SEQ ID NO: 189153 - DNA, 3766 bp, Homo sapiens; identical to SEQ ID NO: 189141
  Payload ID: 17351
  Gene Symbol: TAPBP
  Gene Name: TAP binding protein (tapasin)
  Uniprot ID: O15533
  ENST ID: ENST00000417059
  CDS Start-End: 347-1693

SEQ ID NO: 189154 - DNA, 3684 bp, Homo sapiens; identical to SEQ ID NO: 189140
  Payload ID: 17351
  Gene Symbol: TAPBP
  Gene Name: TAP binding protein (tapasin)
  ENST ID: ENST00000437315
  CDS Start-End: 211-1611

SEQ ID NO: 189155 - DNA, 1888 bp, Homo sapiens
  Payload ID: 17351
  Gene Symbol: TAPBP
  Gene Name: TAP binding protein (tapasin)
  ENST ID: ENST00000426633
  CDS Start-End: 172-1686
ctggagaggatctacccgggtccctgcctggccagtggggaaacaccggtcccccaggcaccttcacctaaccagagcggggatttccaccgcccctcatgccgccctttggaggaaagtgaaagtgaaaggaggaagaggaggcttcatggctgaggaggtcgcagcgccatgaagtccctgtctctgctcctcgctgtggctttgggcctggcgaccgccgtctcagcaggacccgcggtgatcgagtgttggttcgtggaggatgcgagcggaaagggcctggccaagagacccggtgcactgctgttgcgccagggaccgggggaaccgccgccccggccggacctcgaccctgagctctatctcagtgtacacgaccccgcgggcgccctccaggctgccttcaggcggtatccccggggcgcccccgcaccacactgcgagatgagccgcttcgtgcctctccccgcctctgcgaaatgggccagcggcctgacccccgcgcagaactgcccgcgggccctggatggggcttggctgatggtcagcatatccagcccagtcctcagcctctccagcctcttgcgaccacagccagagcctcagcaggagcctgttctcatcaccatggcaacagtggtactgactgtcctcacccacacccctgcccctcgagtgagactgggacaagatgctctgctggacttgagctttgcctacatgccccccacctccgaggccgcctcatctctggctccgggtccccctccctttgggctagagtggcgacgccagcacctgggtaagggacatctgctcctggctgcaactcctgggctgaatggccagatgccagcagcccaagaaggggccgtggcatttgctgcttgggatgatgatgagccatggggcccatggaccggaaatgggaccttctggctgcctacagttcaaccctttcaggagggcacctatctggccaccatacacctgccatacctgcaaggacaggtcaccctggagcttgctgtgtacaaaccccccaaagtgtccctgatgccagcaacccttgcacgggccgccccaggggaggcacccccggaattgctctgccttgtgtcccacttctacccttctgggggcctggaggtggagtgggaactccggggtggcccagggggccgctctcagaaggccgaggggcagaggtggctctcggccctgcgccaccattccgatggctctgtcagcctctctgggcacttgcagccgcccccagtcaccactgagcagcatggggcacgctatgcctgtcgaattcaccatcccagcctgcctgcctcggggcgcagcgctgaggtcaccctggaggtagcaggtctttcagggccctcccttgaggacagcgtaggccttttcctgtctgcctttcttctgcttgggctcttcaaggcactgggctgggctgctgtctacctgtccacctgcaaggattcaaagaaggtacagtgctccacctctctgtatctttcccttgtcactttatctcctcatcctatctcaaaacccatggagggaggctgctggtgtggtaggcagaacctaggcttggaattcacactgatctgggttaaaacctggcactatatcctaactgtaggactctttgagcatgctacttaatctatatgtttccttgggtgtagggattttaaaaagttacttaggcagtgctgtccaatagaaagataatgcaagccacatatgtaaatttaaatactctagtactcacattaaaaaaataagcagaaacaggtaaaattaacttaataatataccttatttaatctaataattctggtcccttatctgaaatgcttgggtc

SEQ ID NO: 189156 - DNA, 1824 bp, Homo sapiens; identical to SEQ ID NO: 189147
  Payload ID: 17351
  Gene Symbol: TAPBP
  Gene Name: TAP binding protein (tapasin)
  Uniprot ID: O15533
  ENST ID: ENST00000456807
  CDS Start-End: 172-1686

SEQ ID NO: 189157 - DNA, 612 bp, Homo sapiens; identical to SEQ ID NO: 189150
  Payload ID: 17351
  Gene Symbol: TAPBP
  Gene Name: TAP binding protein (tapasin)
  ENST ID: ENST00000432848
  CDS Start-End: 6-612

SEQ ID NO: 189158 - DNA, 612 bp, Homo sapiens; identical to SEQ ID NO: 189150
  Payload ID: 17351
  Gene Symbol: TAPBP
  Gene Name: TAP binding protein (tapasin)
  ENST ID: ENST00000456051
  CDS Start-End: 6-612

SEQ ID NO: 189159 - DNA, 751 bp, Homo sapiens
  Payload ID: 17351
  Gene Symbol: TAPBP
  Gene Name: TAP binding protein (tapasin)
  ENST ID: ENST00000467025
  CDS Start-End: 175-751
gaactggagaggatctacccgggtccctgcctggccagtggggaaacaccggtcccccaggcaccttcacctaaccagagcggggatttccaccgcccctcatgccgccctttggaggaaagtgaaagtgaaaggaggaagaggaggcttcatggctgaggaggtcgcagcgccatgaagtccctgtctctgctcctcgctgtggctttggaccccgcgggcgccctccaggctgccttcaggcggtatccccggggcgcccccgcaccacactgcgagatgagccgcttcgtgcctctccccgcctctgcgaaatgggccagcggcctgacccccgcgcagaactgcccgcgggccctggatggggcttggctgatggtcagcatatccagcccagtcctcagcctctccagcctcttgcgaccacagccagagcctcagcaggagcctgttctcatcaccatggcaacagtggtactgactgtcctcacccacacccctgcccctcgagtgagactgggacaagatgctctgctggacttgagctttgcctacatgccccccacctccgaggccgcctcatctctggctccgggtccccctccctttgggctagagtggcgacgccagcacctgggtaagggacatctgctcctggctgcaactcctgggctgaatggccagatgccagcagcccaagaaggggccgtggcatttgctgcttgggatgatgatgagccatggggcccat

SEQ ID NO: 189160 - DNA, 1686 bp, Homo sapiens
  Payload ID: 17351
  Gene Symbol: TAPBP
  Gene Name: TAP binding protein (tapasin)
  ENST ID: ENST00000475304
  CDS Start-End: 211-1611
ccaggagggcgcggtaaggctggggtgtcctggtgagaactggagaggatctacccgggtccctgcctggccagtggggaaacaccggtcccccaggcaccttcacctaaccagagcggggatttccaccgcccctcatgccgccctttggaggaaagtgaaagtgaaaggaggaagaggaggcttcatggctgaggaggtcgcagcgccatgaagtccctgtctctgctcctcgctgtggctttgggcctggcgaccgccgtctcagcaggacccgcggtgatcgagtgttggttcgtggaggatgcgagcggaaagggcctggccaagagacccggtgcactgctgttgcgccagggaccgggggaaccgccgccccggccggacctcgaccctgagctctatctcagtgtacacgaccccgcgggcgccctccaggctgccttcaggcggtatccccggggcgcccccgcaccacactgcgagatgagccgcttcgtgcctctccccgcctctgcgaaatgggccagcggcctgacccccgcgcagaactgcccgcgggccctggatggggcttggctgatggtcagcatatccagcccagtcctcagcctctccagcctcttgcgaccacagccagagcctcagcaggagcctgttctcatcaccatggcaacagtagagatggggtttcaccatgttggccaggctgctctcgaactcctgacctcagtggtactgactgtcctcacccacacccctgcccctcgagtgagactgggacaagatgctctgctggacttgagctttgcctacatgccccccacctccgaggccgcctcatctctggctccgggtccccctccctttgggctagagtggcgacgccagcacctgggtaagggacatctgctcctggctgcaactcctgggctgaatggccagatgccagcagcccaagaaggggccgtggcatttgctgcttgggatgatgatgagccatggggcccatggaccggaaatgggaccttctggctgcctacagttcaaccctttcaggagggcacctatctggccaccatacacctgccatacctgcaaggacaggtcaccctggagcttgctgtgtacaaaccccccaaagtgtccctgatgccagcaacccttgcacgggccgccccaggggaggcacccccggaattgctctgccttgtgtcccacttctacccttctgggggcctggaggtggagtgggaactccggggtggcccagggggccgctctcagaaggccgaggggcagaggtggctctcggccctgcgccaccattccgatggctctgtcagcctctctgggcacttgcagccgcccccagtcaccactgagcagcatggggcacgctatgcctgtcgaattcaccatcccagcctgcctgcctcggggcgcagcgctgaggtcaccctggaggtagcaggtctttcagggccctcccttgaggacagcgtaggccttttcctgtctgcctttcttctgcttgggctcttcaaggcactgggctgggctgctgtctacctgtccacctgcaaggattcaaagaagaaagcagagtgagggcactcactgccatcctgtggaagccaccatcatctctggcccaagcttctgtagtagctccctaaaataata

SEQ ID NO: 189161 - DNA, 1299 bp, Homo sapiens
  Payload ID: 17351
  Gene Symbol: TAPBP
  Gene Name: TAP binding protein (tapasin)
  ENST ID: ENST00000489157
  CDS Start-End: 214-1299
agtccaggagggcgcggtaaggctggggtgtcctggtgagaactggagaggatctacccgggtccctgcctggccagtggggaaacaccggtcccccaggcaccttcacctaaccagagcggggatttccaccgcccctcatgccgccctttggaggaaagtgaaagtgaaaggaggaagaggaggcttcatggctgaggaggtcgcagcgccatgaagtccctgtctctgctcctcgctgtggctttgggcctggcgaccgccgtctcagcaggacccgcggtgatcgagtgttggttcgtggaggatgcgagcggaaagggcctggccaagagacccggtgcactgctgttgcgccagggaccgggggaaccgccgccccggccggacctcgaccctgagctctatctcagtgtacacgtggtactgactgtcctcacccacacccctgcccctcgagtgagactgggacaagatgctctgctggacttgagctttgcctacatgccccccacctccgaggccgcctcatctctggctccgggtccccctccctttgggctagagtggcgacgccagcacctgggtaagggacatctgctcctggctgcaactcctgggctgaatggccagatgccagcagcccaagaaggggccgtggcatttgctgcttgggatgatgatgagccatggggcccatggaccggaaatgggaccttctggctgcctacagttcaaccctttcaggagggcacctatctggccaccatacacctgccatacctgcaaggacaggtcaccctggagcttgctgtgtacaaaccccccaaagtgtccctgatgccagcaacccttgcacgggccgccccaggggaggcacccccggaattgctctgccttgtgtcccacttctacccttctgggggcctggaggtggagtgggaactccggggtggcccagggggccgctctcagaaggccgaggggcagaggtggctctcggccctgcgccaccattccgatggctctgtcagcctctctgggcacttgcagccgcccccagtcaccactgagcagcatggggcacgctatgcctgtcgaattcaccatcccagcctgcctgcctcggggcgcagcgctgaggtcaccctggaggtagcaggtctttcagggccctcccttgaggacagcgtaggccttttcctgtctgcctttcttctgcttgggctcttcaaggcactgggctgggctgctgtctacctgtccacctgcaaggattcaaagaagaaagcagagtga

SEQ ID NO: 189162 - DNA, 2884 bp, Homo sapiens
  Payload ID: 17351
  Gene Symbol: TAPBP
  Gene Name: TAP binding protein (tapasin)
  ENST ID: ENST00000548408
  CDS Start-End: 204-674
ggcgcggtaaggctggggtatcctggtgagaactggagaggatctacccgggtccctgcctggccagtggggaaacaccggtcccccaggcaccttcacctaaccagagcggggatttccaccgcccctcatgccgccctttggaggaaagtgaaagtgaaaggaggaagaggaggcttcatggctgaggaggtcgcagcgccatgaagtccctgtctctgctcctcgctgtggctttgggcctggcgaccgccgtctcagcaggacccgcggtgatcgagtgttggttcgtggaggatgcgagcggaaagggcctggccaagagacccggtgcactgctgttgcgccagggaccgggggaaccgccgccccggccggacctcgaccctgagctctatctcagtgtacacgaccccgcgggcgccctccaggctgccttcaggcggtatccccggggcgcccccgcaccacactgcgagatgagccgcttcgtgcctctccccgcctctgcgaaatgggccagcggcctgacccccgcgcagaactgcccgcgggccctggatggggcttggctgatggtcagcatatccagcatggggcacgctatgcctgtcgaattcaccatcccagcctgcctgcctcggggcgcagcgctgaggtcaccctggaggtagcaggtctttcagggccctcccttgaggacagcgtaggccttttcctgtctgcctttcttctgcttgggctcttcaaggcactgggctgggctgctgtctacctgtccacctgcaaggattcaaagaagaaagcagagtgagggcactcactgccatcctgtggaagccaccatcatctctggcccaagcttctgtagtagctccctaaaataataccctatcatctgctcctaatccctccaatctctctccactgagtggctggaatgcttttttttttttctttcacttatataagggataatttttctttttttttttttttgagacggagtctcactcttccgcccaggctgcagtgcagtggcatgatcttggcttactgcaacctccgcctcctgggttcaagcaattctgtggcttcagcctccggagtagctgggattacaggcacatgccaccacacccagtgaatttttgtatttttagtagagacggggtttcaccatgttggccaggctggtcttgaattcctgacctcaggtgatctgcccacctcagcctcccaaagtgctgggattacaggcgtgagccaccacaccaggcccgagaaatgcttttttaaaaaacacacatcttatggcattcaccttcttggagctctaggacagtggttctcaaaatttttttctctcaggacctcttaaaaatcatcaaggaccccaaaaagcttttgggtatgtgggttatagctatcaatatttatggtactagaacttaaaagtgagaaaaatttaaaacacgagaatacataggcacacattctattcatcgtgggaaccatggtgtcaatacatatcatgtagcttctgaaaaactccactgtacacttatagaatgaagaaggcaaaaaacttttttttttttttttttgagacggagtctcgctctgtcgcccaggctggagtgcagtggcgcgatctcggctcactgcaagctccgcctctcgggttcacgccattctcctgcctcagcctcccaagtagctcggactacaggcgtcctccaccatgcctggctaatattttgtattttttagtagagacggggtttcaccgtgttagccaggatggtctcgatctcctaacctggtgatccgcccgcctcggcctcccaaagtattgggattacccgcgtgagccaccgcgcccggctgcaaataatctttctttttttctttttttctgagacagagtctcgctctgttgcccaggctggagtgcagtggcacgatctcggctcacggcacgctccgcctcccgggttcacgccattctcctgcctcagcttcccgagtagctgggactacaggggcccgccaccacgcccggctaactttttgtgtttttagtagagacggggtttcaccgtgttagccaggatggtctcgatctcctgaccttgtgatctgcccgcctcggcctcccaaagtgctgggattacaggcgtgagccaccgcgcccggcggcgaaacacgatattgtactaacatcttaattttgttataaaatctcacaaaccccctgacatagtctcagagatctgtagggccgaggttacatttggagaacccgtactctagggccaaatccattcttcttgccctggctcacttgtcccccccaccgccccgcgctggagccactgcctagttcttcagccctagatggtgctcgccagacctcctctcaatgctcatcacacacagggctattcctttcctccaatgaaccaaacgcctcccgcccacctccaggtcccagtcctctgttccctttgcctggtccacccttgccctccctgggtcgcagacgaggtcggcctcgtcattccccgcagaccgccgcgcgtccctcttgtgcggttcaccacagttgtatttaagtgatcgtgtgagtcgtcgttaaatgcctgtctccccgcggatcatgggctcctcgaggacagggaccggcctgtctgtccactgctgtaaccccgcgccggcatagggacctaaggcccactggagggcgctcatcaagtagctgctggatgttgacgaaggaagcggcggcgcagctcagggatctccgagtcaggacggtcggccagacccacggggtaacgggtctaatcgtgtaggaataaagctgtattccagtgcttcc

SEQ ID NO: 189163 - DNA, 3495 bp, Homo sapiens
  Payload ID: 17351
  Gene Symbol: TAPBP
  Gene Name: TAP binding protein (tapasin)
  ENST ID: ENST00000551943
  CDS Start-End: 347-1432
ggggacgcggcacagatagggggaagccggagtaatggttttcgggcaagtggatgttggagagcacacacaggagttggggggcgggggagggcctggggttggggagggctcgaactcggggctgctgggtagtccaggagggcgcggtaaggctggggtgtcctggtgagaactggagaggatctacccgggtccctgcctggccagtggggaaacaccggtcccccaggcaccttcacctaaccagagcggggatttccaccgcccctcatgccgccctttggaggaaagtgaaagtgaaaggaggaagaggaggcttcatggctgaggaggtcgcagcgccatgaagtccctgtctctgctcctcgctgtggctttgggcctggcgaccgccgtctcagcaggacccgcggtgatcgagtgttggttcgtggaggatgcgagcggaaagggcctggccaagagacccggtgcactgctgttgcgccagggaccgggggaaccgccgccccggccggacctcgaccctgagctctatctcagtgtacacgtggtactgactgtcctcacccacacccctgcccctcgagtgagactgggacaagatgctctgctggacttgagctttgcctacatgccccccacctccgaggccgcctcatctctggctccgggtccccctccctttgggctagagtggcgacgccagcacctgggtaagggacatctgctcctggctgcaactcctgggctgaatggccagatgccagcagcccaagaaggggccgtggcatttgctgcttgggatgatgatgagccatggggcccatggaccggaaatgggaccttctggctgcctacagttcaaccctttcaggagggcacctatctggccaccatacacctgccatacctgcaaggacaggtcaccctggagcttgctgtgtacaaaccccccaaagtgtccctgatgccagcaacccttgcacgggccgccccaggggaggcacccccggaattgctctgccttgtgtcccacttctacccttctgggggcctggaggtggagtgggaactccggggtggcccagggggccgctctcagaaggccgaggggcagaggtggctctcggccctgcgccaccattccgatggctctgtcagcctctctgggcacttgcagccgcccccagtcaccactgagcagcatggggcacgctatgcctgtcgaattcaccatcccagcctgcctgcctcggggcgcagcgctgaggtcaccctggaggtagcaggtctttcagggccctcccttgaggacagcgtaggccttttcctgtctgcctttcttctgcttgggctcttcaaggcactgggctgggctgctgtctacctgtccacctgcaaggattcaaagaagaaagcagagtgagggcactcactgccatcctgtggaagccaccatcatctctggcccaagcttctgtagtagctccctaaaataataccctatcatctgctcctaatccctccaatctctctccactgagtggctggaatgcttttttttttttctttcacttatataagggataatttttcttttttttttttttttgagacggagtctcactcttccgcccaggctgcagtgcagtggcatgatcttggcttactgcaacctccgcctcctgggttcaagcaattctgtggcttcagcctccggagtagctgggattacaggcacatgccaccacacccagtgaatttttgtatttttagtagagacggggtttcaccatgttggccaggctggtcttgaattcctgacctcaggtgatctgcccacctcagcctcccaaagtgctgggattacaggcgtgagccaccacaccaggcccgagaaatgcttttttaaaaaacacacatcttatggcattcaccttcttggagctctaggacagtggttctcaaaatttttttctctcaggacctcttaaaaatcatcaaggaccccaaaaagcttttgggtatgtgggttatagctatcaatatttatggtactagaacttaaaagtgagaaaaatttaaaacacgagaatacataggcacacattctattcatcgtgggaaccatggtgtcaatacatatcatgtagcttctgaaaaactccactgtacacttatagaatgaagaaggcaaaaaacttttttttttttttttttgagacggagtctcgctctgtcgcccaggctggagtgcagtggcgcgatctcggctcactgcaagctccgcctctcgggttcacgccattctcctgcctcagcctcccaagtagctcggactacaggcgtcctccaccatgcctggctaatattttgtattttttagtagagacggggtttcaccgtgttagccaggatggtctcgatctcctaacctggtgatccgcccgcctcggcctcccaaagtattgggattacccgcgtgagccaccgcgcccggctgcaaataatctttctttttttctgagacagagtctcgctctgttgcccaggctggagtgcagtggcacgatctcggctcacggcacgctccgcctcccgggttcacgccattctcctgcctcagcttcccgagtagctgggactacaggggcccgccaccacgcccggctaactttttgtgtttttagtagagacggggtttcaccgtgttagccaggatggtctcgatctcctgaccttgtgatctgcccgcctcggcctcccaaagtgctgggattacaggcgtgagccaccgcgcccggcggcgaaacacgatattgtactaacatcttaattttgttataaaatctcacaaaccccctgacatagtctcagagatctgtagggccgaggttacatttggagaacccgtactctagggccaaatccattcttcttgccctggctcacttgtcccccccaccgccccgcgctggagccactgcctagttcttcagccctagatggtgctcgccagacctcctctcaatgctcatcacacacagggctattcctttcctccaatgaaccaaacgcctcccgcccacctccaggtcccagtcctctgttccctttgcctggtccacccttgccctccctgggtcgcagacgaggtcggcctcgtcattccccgcagaccgccgcgcgtccctcttgtgcggttcaccacagttgtatttaagtgatcgtgtgagtcgtcgttaaatgcctgtctccccgcggatcatgggctcctcgaggacagggactggcctgtctgtccactgctgtaaccccgcgccggcatagggacctaaggcccactggagggcgctcatcaagtagctgctggatgttgacgaaggaagcggcggcgcagctcagggatctccgagtcaggacggtcggccagacccacggggtaacgggtctaatcgtgtaggaataaagctgtattccagtgcttcc

SEQ ID NO: 189164 - DNA, 1476 bp, Homo sapiens
  Payload ID: 17351
  Gene Symbol: TAPBP
  Gene Name: TAP binding protein (tapasin)
  ENST ID: ENST00000553235
  CDS Start-End: 130-1476
acaccggtcccccaggcaccttcacctaaccagagcggggatttccaccgcccctcatgccgccctttggaggaaagtgaaagtgaaaggaggaagaggaggctaaatggctgaggaggtcgcagcgccatgaagtccctgtctctgctcctcgctgtggctttgggcctggcgaccgccgtctcagcaggacccgcggtgatcgagtgttggttcgtggaggatgcgagcggaaagggcctggccaagagacccggtgcactgctgttgcgccagggaccgggggaaccgccgccccggccggacctcgaccctgagctctatctcagtgtacacgaccccgcgggcgccctccaggctgccttcaggcggtatccccggggcgcccccgcaccacactgcgagatgagccgcttcgtgcctctccccgcctctgcgaaatgggccagcggcctgacccccgcgcagaactgcccgcgggccctggatggggcttggctgatggtcagcatatccagcccagtcctcagcctctccagcctcttgcgaccacagccagagcctcagcaggagcctgttctcatcaccatggcaacagtggtactgactgtcctcacccacacccctgcccctcgagtgagactgggacaagatgctctgctggacttgagctttgcctacatgccccccacctccgaggccgcctcatctctggctccgggtccccctccctttgggctagagtggcgacgccagcacctgggtaagggacatctgctcctggctgcaactcctgggctgaatggccagatgccagcagcccaagaaggggccgtggcatttgctgcttgggatgatgatgagccatggggcccatggaccggaaatgggaccttctggctgcctagagttcaaccctttcaggagggcacctatctggccaccatacacctgccatacctgcaaggacaggtcaccctggagcttgctgtgtacaaaccccccaaagtgtccctgatgccagcaacccttgcacgggccgccccaggggaggcacccccggaattgctctgccttgtgtcccacttctacccttctgggggcctggaggtggagtgggaactccggggtggcccagggggccgctctcagaaggccgaggggcagaggtggctctcggccctgcgccaccattccgatggctctgtcagcctctctgggcacttgcagccgcccccagtcaccactgagcagcatggggcacgctatgcctgtcgaattcaccatcccagcctgcctgcctcggggcgcagcgctgaggtcaccctggaggtagcaggtctttcagggccctcccttgaggacagcgtaggccttttcctgtctgcctttcttctgcttgggctcttcaaggcactgggctgggctgctgtctacctgtccacctgcaaggattcaaagaagcatgctacttaa

SEQ ID NO: 189165 - DNA, 817 bp, Homo sapiens; identical to SEQ ID NO: 189148
  Payload ID: 17351
  Gene Symbol: TAPBP
  Gene Name: TAP binding protein (tapasin)
  ENST ID: ENST00000550794
  CDS Start-End: 347-817

SEQ ID NO: 189166 - DNA, 1476 bp, Homo sapiens
  Payload ID: 17351
  Gene Symbol: TAPBP
  Gene Name: TAP binding protein (tapasin)
  ENST ID: ENST00000549142
  CDS Start-End: 130-1476
acaccggtcccccaggcaccttcacctaaccagagcggggatttccaccgcccctcatgccgccctttggaggaaagtgaaagtgaaaggaggaagaggaggcttcatggctgaggaggtcgcagcgccatgaagtccctgtctctgctcctcgctgtggctttgggcctggcgaccgccgtctcagcaggacccgcggtgatcgagtgttggttcgtggaggatgcgagcggaaagggcctggccaagagacccggtgcactgctgttgcgccagggaccgggggaaccgccgccccggccggacctcgaccctgagctctatctcagtgtacacgaccccgcgggcgccctccaggctgccttcaggcggtatccccggggcgcccccgcaccacactgcgagatgagccgcttcgtgcctctccccgcctctgcgaaatgggccagcggcctgacccccgcgcagaactgcccgcgggccctggatggggcttggctgatggtcagcatatccagcccagtcctcagcctctccagcctcttgcgaccacagccagagcctcagcaggagcctgttctcatcaccatggcaacagtggtactgactgtcctcacccacacccctgcccctcgagtgagactgggacaagatgctctgctggacttgagctttgcctacatgccccccacctccgaggccgcctcatctctggctccgggtccccctccctttgggctagagtggcgacgccagcacctgggtaagggacatctgctcctggctgcaactcctgggctgaatggccagatgccagcagcccaagaaggggccgtggcatttgctgcttgggatgatgatgagccatggggcccatggaccggaaatgggaccttctggctgcctagagttcaaccctttcaggagggcacctatctggccaccatacacctgccatacctgcaaggacaggtcaccctggagcttgctgtgtacaaaccccccaaagtgtccctgatgccagcaacccttgcacgggccgccccaggggaggcacccccggaattgctctgccttgtgtcccacttctacccttctgggggcctggaggtggagtgggaactccggggtggcccagggggccgctctcagaaggccgaggggcagaggtggctctcggccctgcgccaccattccgatggctctgtcagcctctctgggcacttgcagccgcccccagtcaccactgagcagcatggggcacgctatgcctgtcgaattcaccatcccagcctgcctgcctcggggcgcagcgctgaggtcaccctggaggtagcaggtctttcagggccctcccttgaggacagcgtaggccttttcctgtctgcctttcttctgcttgggctcttcaaggcactgggctgggctgctgtctacctgtccacctgcaaggattcaaagaagcatgctacttaa

SEQ ID NO: 189167 - DNA, 1476 bp, Homo sapiens; identical to SEQ ID NO: 189164
  Payload ID: 17351
  Gene Symbol: TAPBP
  Gene Name: TAP binding protein (tapasin)
  ENST ID: ENST00000550330
  CDS Start-End: 130-1476

SEQ ID NO: 189168 - DNA, 1741 bp, Homo sapiens
  Payload ID: 17352
  Gene Symbol: TAPBPL
  Gene Name: TAP binding protein-like
  Uniprot ID: Q9BX59
  ENST ID: ENST00000266556
  CDS Start-End: 166-1572
gtgaaagtgaaagaaaagtcggcagcagagggaacagggaagaaacctaaaggctgcaggctgccaggtgtgcttggagagcccccttcttccgccgggcctcgcaagcagcgtaggactgtggagaagggcggtgggcaaggagggaactcgagagcagcctccatgggcacacaggagggctggtgcctgctgctctgcctggctctatctggagcagcagaaaccaagccccacccagcagaggggcagtggcgggcagtggacgtggtcctagactgcttcctggcgaaggacggtgcgcaccgtggagctctcgccagcagtgaggacagggcaagggcctcccttgtgctgaagcaggtgccagtgctggacgatggctccctggaggacttcaccgatttccaagggggcacactggcccaagatgacccacctattatctttgaggcctcagtggacctggtccagattccccaggccgaggccttgctccatgctgactgcagtgggaaggaggtgacctgtgagatctcccgctactttctccagatgacagagaccactgttaagacagcagcttggttcatggccaacatgcaggtctctggagggggacctagcatctccttggtgatgaagactcccagggtcaccaagaatgaggcgctctggcacccgacgctgaacttgccactgagcccccaggggactgtgcgaactgcagtggagttccaggtgatgacacagacccaatccctgagcttcctgctggggtcctcagcctccttggactgtggcttctccatggcaccgggcttggacctcatcagtgtggagtggcgactgcagcacaagggcaggggtcagttggtgtacagctggaccgcagggcaggggcaggctgtgcggaagggcgctaccctggagcctgcacaactgggcatggccagggatgcctccctcaccctgcccggcctcactatacaggacgaggggacctacatttgccagatcaccacctctctgtaccgagctcagcagatcatccagctcaacatccaagcttcccctaaagtacgactgagcttggcaaacgaagctctgctgcccaccctcatctgcgacattgctggctattaccctctggatgtggtggtgacgtggacccgagaggagctgggtggatccccagcccaagtctctggtgcctccttctccagcctcaggcaaagcgtggcaggcacctacagcatctcctcctctctcaccgcagaacctggctctgcaggtgccacttacacctgccaggtcacacacatctctctggaggagccccttggggccagcacccaggttgtcccaccagagcggagaacagccttgggagtcatctttgccagcagtctcttccttcttgcactgatgttcctggggcttcagagacggcaagcacctacaggacttgggctgcttcaggctgaacgctgggagaccacttcctgtgctgacacacagagctcccatctccatgaagaccgcacagcgcgtgtaagccagcccagctgacctaaagcgacatgagactactagaaagaaacgacacccttccccaagcccccacagctactccaacccaaacaacaaccaagccagtttaatggtaggaatttgtattttttgcctttgttcagaatacatgacattggtaaatatgccacatgcctttggtggaagt

SEQ ID NO: 189169 - DNA, 772 bp, Homo sapiens
  Payload ID: 17352
  Gene Symbol: TAPBPL
  Gene Name: TAP binding protein-like
  ENST ID: ENST00000544021
  CDS Start-End: 178-735
atcttgctctaagtgaaagtgaaagaaaagtcggcagcagagggaacagggaagaaacctaaaggctgcaggctgccaggtgtgcttggagagcccccttcttccgccgggcctcgcaagcagcgtaggactgtggagaagggcggtgggcaaggagggaactcgagagcagcctccatgggcacacaggagggctggtgcctgctgctctgcctggctctatctggagcagcagaaaccatggacctggtccagattccccaggccgaggccttgctccatgctgactgcagtgggaaggaggtgacctgtgagatctcccgctactttctccagatgacagagaccactgttaagacagcagcttggttcatggccaacatgcaggtctctggagggggacctagcatctccttggtgatgaagactcccagggtcaccaagaatgaggcgctctggcacccgacgctgaacttgccactgagcccccaggggactgtgcgaactgcagtggagttccaggtgatgacacagacccaatccctgagcttcctgctggggtcctcagcctccttggactgtggcttctccatggcaccgggcttggacctcatcagtgtggagtggcgactgcagcacaagggcaggggacgaggggacctacatttgccagatcaccacctctctgtaccgagctcagcagatcatccagctcaacatccaagcttcccctaaagtacgactgagcttggcaaacgaagctctgctgccc

SEQ ID NO: 189170 - DNA, 2109 bp, Homo sapiens
  Payload ID: 17353
  Gene Symbol: TPRN
  Gene Name: taperin
  ENST ID: ENST00000333046
  CDS Start-End: 1-1614
aactccttcaccgtccacccccggggtctgcaccgcggcgcgggcgcccgcctgctctccaacgggcactcggcccctgagccccgggccggccctgccaaccgcctcgcgggctccccgcctgggtcgggacagtggaagccaaaggtggagtcgggggatccctccctccacccgccccccagccccgggaccccgagtgccactccagcctcaccccctgccagtgccactcctagccagcgccagtgcgtctccgcagccaccagcaccaacgactccttcgagatacggccggcccccaagccagttatggagaccatccccttgggggacctccaggcccgggcgctggccagcctccgcgcaaactctcgaaattctttcatggtcatccccaagagcaaggcctccggggctcctcctcctgaggggaggcagtccgtggagctgccaaagggagacctgggcccggcctccccgagccaggagctcggatcccagccggtgcctggaggggatggtgcgcctgccctcgggaagagccccctggaggtcgaggcacagtgggcagtcgaggagggggcctgtcccaggacagccaccgccctcgctgaccgggctattaggtggcagaggccgtcctcaccgccccccttcctgccggctgcttcggaagaagctgagcctgctgagggcctcagggttcctggcttggccaagaatagccgggaatatgtgaggccggggctgcctgtcaccttcatcgatgaggtagactcggaggaggccccccaagcagccaaactaccctacctcccgcaccctgccaggcctctgcaccctgccaggcccgggtgcgtggcagagcttcagccccggggcagcaacaccttcacagtggtgcccaagaggaagccagggactctgcaggaccagcacttcagtcaggccaacagggagcctcggccacgggaggccgaggaggaggaggctagttgcctcctggggcccacgttgaagaagcgctaccccaccgtgcatgagatcgaggtgattggcggctacctggccctgcagaagtcctgcctcaccaaggctggctcctcaagaaagaagatgaagatctccttcaacgacaaaagcctgcagaccacatttgagtacccttccgagagctccctagagcaggaggaagaggtggaccagcaggaggaggaggaggaggaggaggaggaagaggaagaggaggaagagggatccggctcagaggagaagccctttgcactcttcctgccccgggccacgtttgtgagcagcgtgagacccgagagctctcggctgccagagggtagctcaggcctgtccagctacaccccgaagcactctgtggccttcagcaagtggcaggagcaggcgctggagcaggccccgagggaggcagagcccccgcccgtggaggccatggtgagatgcgggggagtggagcgctggggggagtctgacacccgggcgagcccatgtgtccacattctgtcctctcactttcagctcacacccgccagtcagaatgacctctcggacttccgcagcgagccagccctgtatttctgagcccagcactgccaggaccaaggctgagcccagctgtgggagtcccggaagctgggcagtagccagggactactgcacccgcttctgccttgtttggcctcactgtatcccacccacccctcctggccctggaagcagctagggtgcctcctgccatcggggccaggtctgggtctcactccccggccctgatttgggagggtccaagggggaagtggggtggggaactgcctgtgggtgagtgccaggggcctgctgggtggtggccatctgcgacccggcagggggctgtgcagattctgcacctggccattccctgtcctgtctcctcagcctgcctcacagtggccatggggtgtcggggtgaagggctgtcccagctacttgtcctctgcaggaccctaagcccctgcccgcagcccacatgccctctgtgatgagtggcgtctttcctgcctctgatgatggactcaataaacagcactggacaaggct

SEQ ID NO: 189171 - DNA, 2718 bp, Homo sapiens
  Payload ID: 17353
  Gene Symbol: TPRN
  Gene Name: taperin
  Uniprot ID: Q4KMQ1
  ENST ID: ENST00000409012
  CDS Start-End: 88-2223
gggggcgtggccgcggcgcccaggctggccgcggcggcggctgccactccggccctcagtccagccgtccgctgccgcgttcgcagcatggccgccctggggcggccgggctcggggccgcgcgctgcggtgcccgcttggaagcgtgagatcctggagcggaagcgggccaagctagccgcgctgggcgggggcgcggggcccggggcggcggagcccgagcagcgggtgctggccgagagcctgggcccgctgcgcgagaacccgttcatgctgctggaggccgagcggcggcgcggcgggggcgcggcgggggcgcggctgctggagcggtaccgccgcgtgcctggcgtgcgcgccctccgcgccgacagcgtcctcatcatcgagacggtgcccggcttcccgcccgcgccgcccgccccgggggccgcgcagatccgcgccgccgaggtgctggtgtacggggcgccgcccggccgcgtcagccgcctactggagaggttcgacccgcccgccgcgccgcgccgccgcgggagccccgagcgcgcccgccccccgccgccgccgccgccgcccgcgccgccccggcccccgcccgcggcccccagcccgcccgccgcgcccgggccccgcggtggcggggcgagccccggggcccggcgcagcgacttcctccagaagaccggcagcaactccttcaccgtccacccccggggtctgcaccgcggcgcgggcgcccgcctgctctccaacgggcactcggcccctgagccccgggccggccctgccaaccgcctcgcgggctccccgcctgggtcgggacagtggaagccaaaggtggagtcgggggatccctccctccacccgccccccagccccgggaccccgagtgccactccagcctcaccccctgccagtgccactcctagccagcgccagtgcgtctccgcagccaccagcaccaacgactccttcgagatacggccggcccccaagccagttatggagaccatccccttgggggacctccaggcccgggcgctggccagcctccgcgcaaactctcgaaattctttcatggtcatccccaagagcaaggcctccggggctcctcctcctgaggggaggcagtccgtggagctgccaaagggagacctgggcccggcctccccgagccaggagctcggatcccagccggtgcctggaggggatggtgcgcctgccctcgggaagagccccctggaggtcgaggcacagtgggcagtcgaggagggggcctgtcccaggacagccaccgccctcgctgaccgggctattaggtggcagaggccgtcctcaccgccccccttcctgccggctgcttcggaagaagctgagcctgctgagggcctcagggttcctggcttggccaagaatagccgggaatatgtgaggccggggctgcctgtcaccttcatcgatgaggtagactcggaggaggccccccaagcagccaaactaccctacctcccgcaccctgccaggcctctgcaccctgccaggcccgggtgcgtggcagagcttcagccccggggcagcaacaccttcacagtggtgcccaagaggaagccagggactctgcaggaccagcacttcagtcaggccaacagggagcctcggccacgggaggccgaggaggaggaggctagttgcctcctggggcccacgttgaagaagcgctaccccaccgtgcatgagatcgaggtgattggcggctacctggccctgcagaagtcctgcctcaccaaggctggctcctcaagaaagaagatgaagatctccttcaacgacaaaagcctgcagaccacatttgagtacccttccgagagctccctagagcaggaggaagaggtggaccagcaggaggaggaggaggaggaggaggaggaagaggaagaggaggaagagggatccggctcagaggagaagccctttgcactcttcctgccccgggccacgtttgtgagcagcgtgagacccgagagctctcggctgccagagggtagctcaggcctgtccagctacaccccgaagcactctgtggccttcagcaagtggcaggagcaggcgctggagcaggccccgagggaggcagagcccccgcccgtggaggccatgctcacacccgccagtcagaatgacctctcggacttccgcagcgagccagccctgtatttctgagcccagcactgccaggaccaaggctgagcccagctgtgggagtcccggaagctgggcagtagccagggactactgcacccgcttctgccttgtttggcctcactgtatcccacccacccctcctggccctggaagcagctagggtgcctcctgccatcggggccaggtctgggtctcactccccggccctgatttgggagggtccaagggggaagtggggtggggaactgcctgtgggtgagtgccaggggcctgctgggtggtggccatctgcgacccggcagggggctgtgcagattctgcacctggccattccctgtcctgtctcctcagcctgcctcacagtggccatggggtgtcggggtgaagggctgtcccagctacttgtcctctgcaggaccctaagcccctgcccgcagcccacatgccctctgtgatgagtggcgtctttcctgcctctgatgatggactcaataaacagcactggacaaggct

SEQ ID NO: 189172 - DNA, 5130 bp, Homo sapiens
  Payload ID: 17354
  Gene Symbol: TARBP1
  Gene Name: TAR (HIV-1) RNA binding protein 1
  Uniprot ID: Q13395
  ENST ID: ENST00000040877
  CDS Start-End: 1-4866
atggagtgggtgctcgcggaagcgctgctctcgcagagccgggacccccgggccctgcttggggcgctgtgccaaggggaggcatccgcggagcgcgtggagacgctgcgcttccttctgcagcggctcgaggacgaggaggcgcgcggcagcgggggcgcaggcgcgctcccggaggcggcgcgcgaggtggctgcagggtacctcgtgccactgctgcggagcctgcgcggacgccccgcgggcggcccggaccccagtctgcagcctcgccaccgccggcgcgtgctgagggcggcgggcgcggccctgcgctcgtgcgtccgcctggccgggcgtccgcagctggcggccgcgctggctgaggaggcgctgcgcgatctgctcgccgggtggcgcgcgcctggcgccgaggctgccgtggaagtgctagcagccgtcgggccatgtttgcggccccgcgaggacgggccgctactggagcgcgtggcggggaccgccgtcgccctggcgctgggcgggggcggggacggggatgaggccgggcctgccgaggacgcggcggcgctggtggccgggcgactgctgccagtgctggtccaatgtggcggggcggcgctgcgggccgtgtggggcgggctggccgcgcctggggcgtccctggggtccggccgcgtagaggagaagctgctggtcctgagcgccctggccgagaagctgttgcccgagcccggcggcgaccgcgcccgcggcgcgcgcgaggcgggcccggacgcccggcgctgctggcgcttctggaggacggtgcaggcggggctgggccaggcggacgccctgacgcgcaagcgagcgcgctacctgctgcagagggcggtggaggtgtcggcggagctgggggccgactgcacctgcgggccccaggaaggaaacggcccaagtctgttttggtggtctgagaggaaaaaagatgagcttctaaagttttgggaaaattatattttaattatggagactttagaaggaaatcagatacatgttataaagccagttttaccaaagctaaacaatctgtttgaatatgcggtgtcagaggaaaatggatgttggctctttcacccatcctggcatatgtgtatttataaaagaatgtttgaaagtgaaaacaaaatcctgtccaaagaaggtgttatccattttttggagctgtatgaaacaaagattcttccattttcaccagaattttctgagtttattattggaccattaatggatgcgctttcagagagctctctgtatagcaggtccccaggccagccaataggaagctgttctccattgggactgaaattacagaagtttttagtcacttatatttctcttcttccagaagaaataaagagtagcttcctattgaagtttattcggaagatgacaagtaggcattggtgtgctgttcccattttgtttctatctaaggctttggcaaatgtcccaagacataaggccctgggtatagatgggcttcttgctctcagggatgttattcattgcactatgatcacacatcagattctcctgagaggggcagcccaatgctaccttcttcaaacagctatgaatttgctagatgtggagaaagtgtcactttctgatgtctcaacttttctcatgtctctgagacaagaggaatccttaggacgaggaacttcattgtggacagagctgtgtgactggctacgtgttaatgaaagctattttaagccatcccctacgtgtagctccattggacttcacaagacatctttaaatgcttatgtaaagagcattgttcaagagtatgttaagtcatctgcttgggaaacaggagaaaactgctttatgcctgattggtttgaagccaagcttgtttctctgatggtcttgctggctgtggatgtggaaggaatgaagactcagtatagcggaaagcagagaacagagaatgtattgcggatattcttagaccctcttctggatgtgcttatgaagtttagtaccaatgcctacatgcccttgctgaagactgacagatgcctccagctgctgttgaagctgttgaacacatgcaggttgaaaggttccagtgcccaagatgatgaggtgtctactgttcttcagaactttttcatgtctactacagagagcatttctgaatttattctcagaagacttactatgaatgagctaaatagtgtttcagatctggatcgttgccatttatacctgatggtgttaactgagcttataaatctgcatttgaaggttgggtggaaaaggggtaaccctatctggagagttatttctcttttgaaaaatgcatccattcagcatcttcaagagatggacagtggacaggagccaacagttggaagtcagattcagagagtagtgagcatggctgccttggccatggtgtgtgaggccatagaccagaagcctgagctgcagctggactctctccatgctgggcccctggaaagcttcctttcctctcttcagctcaatcagacgctgcagaagccccacgcagaggagcagagcagttatgctcaccccttggagtgcagcagtgttttggaagaatcgtcatcttcccaaggatggggaaaaatagttgcacaatatattcatgatcaatgggtgtgcctctctttcctgttgaaaaaatatcacacccttataccaaccacagggagtgaaattctggaaccgtttctacctgccgttcagatgccaataaggactttgcagtctgcactagaagccctcacagttctttcttctgatcaagttttaccagtgttccattgcttgaaagtgttggttcccaagcttctgacttcctctgaatcactctgcatagagtcttttgacatggcgtggaaaattatatcttctttaagcaacactcagctgatattctgggctaatttaaaagcttttgttcagtttgtttttgataacaaagttcttaccattgctgccaaaatcaagggccaggcatatttcaaaataaaagagattatgtacaagataattgaaatgtctgctataaagactggagtcttcaatacactgataagttactgctgtcagtcttggatagtgtctgcttcaaatgtgtcccaaggatctttatcaagtgctaaaaattatagcgaacttatccttgaggcttgtatatttggaactgtgtttaggcgtgatcaaagacttgttcaggatgtacagaccttcatagaaaaccttggacatgactgtgcggcaaatattgttatggaaaatactaagagagaagaccattatgtgagaatttgtgctgtcaaattcctgtgtttattagatggctccaatatgtcccacaagttgtttattgaggatcttgcaatcaagctattagataaagatgaattagtgtccaagtccaaaaaacgctactatgtgaattctctacagcacagagtgaaaaaccgagtgtggcagactctgctggtacttttccctagacttgaccagaatttcttgaatggaattattgacaggattttccaggctggtttcaccaacaatcaagcatccataaaatattttatagaatggattattatattgattcttcataaattccctcaatttcttccaaagttctgggattgtttttcttatggtgaagaaaatcttaaaacaagcatttgtacgtttttagcagttttatcacatttagacattattactcaaaatattccagaaaagaaactaattctgaagcaagcccttatagttgtgctgcagtggtgtttcaatcacaattttagtgttcgactgtatgctttagttgctcttaagaaactctggactgtgtgtaaagtgttaagtgttgaagaatttgatgccctgactcctgtgattgaatccagcctccatcaagtggaaagcatgcacggagcagggaatgccaagaagaattggcaacgcattcaggagcatttcttttttgcaacatttcacccactcaaggattattgtctagagaccatattttacatccttccacgcctttcaggccttattgaagatgaatggatcaccattgataaatttaccagattcactgatgttcctttagctgcgggatttcagtggtacctttctcaaactcaacttagtaaactaaaaccaggtgactggtctcagcaagacataggtactaatttggtcgaagcagataaccaagcggagtggaccgacgttcagaagaagattatcccgtggaacagtcgtgtttccgacttagacctggagctcctgtttcaggatcgtgctgccagacttggaaagtcaattagtagactcatcgttgtggcctcgctcatcgacaaaccgaccaatttaggaggactgtgcaggacctgtgaggtatttggggcttcagtgctcgttgttggcagccttcagtgtatcagcgacaaacagtttcagcacctcagtgtctctgcagaacagtggcttcctctagtggaggtaaaaccacctcagctaattgattatctgcagcagaagaaaacagaaggttataccatcattggagtggaacaaactgccaaaagtttagacctaacccaatattgctttcctgagaaatctctgctcttgttgggaaatgaacgtgagggaattccagcaaatctgatccaacagttggacgtttgtgtggaaattcctcaacagggcattatccgctccctgaatgtccatgtgagtggagccctgctgatctgggagtacaccaggcagcagctgctctcgcacggagataccaagccatgatgtgccttccttagtgaactgctgctgctgttcagacttttttaaaaaaaactatttggactaaagaaacagattctgaaatttattgtgataatttgtatttcttttttcttgcaatttaatgccaaaagtttgccatgtgccttaaacatattactatatattttcccctttaataaacactttttgttaaattgtattcttcctttaataaaatattttaagcaattgtggaaataaaacaatggattttttaagagagaa

SEQ ID NO: 189173 - DNA, 1867 bp, Homo sapiens
  Payload ID: 17355
  Gene Symbol: TARBP2
  Gene Name: TAR (HIV-1) RNA binding protein 2
  Uniprot ID: Q15633
  ENST ID: ENST00000266987
  CDS Start-End: 484-1584
tccagctgcgacacagatggcgcgcgggctcttgggttctgtagttttctcgcgatccaaaaggctccgtgcccaagtgagtccttaccgcctccctacccagcggcttcccctccgctagtacgcatgtccacagcttcacggaccgggagagagggggcgcggaaggaaggaggcgggacggtattacaaacaaaaaaatacggccttctcgagaagcgacggcggagggcccgctcctcccagaaggcggtgcagcctgcccgggcgagccacgcacgcagagggttgtggggcggatagctcccctccagatggaggctcacgaagtagggtgggcgggggactccatatcccagcgtgccccgcggcgggccctaccggccgcgactccgggcttggccccggccctagctcgtcggctgtgtattggggcgcgtggaggctgcagtcacggtggcgcccgcggggacggaggagggaatgagtgaagaggagcaaggctccggcactaccacgggctgcgggctgcctagtatagagcaaatgctggccgccaacccaggcaagaccccgatcagccttctgcaggagtatgggaccagaatagggaagacgcctgtgtacgaccttctcaaagccgagggccaagcccaccagcctaatttcaccttccgggtcaccgttggcgacaccagctgcactggtcagggccccagcaagaaggcagccaagcacaaggcagctgaggtggccctcaaacacctcaaaggggggagcatgctggagccggccctggaggacagcagttctttttctcccctagactcttcactgcctgaggacattccggtttttactgctgcagcagctgctaccccagttccatctgtagtcctaaccaggagcccccccatggaactgcagccccctgtctcccctcagcagtctgagtgcaaccccgttggtgctctgcaggagctggtggtgcagaaaggctggcggttgccggagtacacagtgacccaggagtctgggccagcccaccgcaaagaattcaccatgacctgtcgagtggagcgtttcattgagattgggagtggcacttccaaaaaattggcaaagcggaatgcggcggccaaaatgctgcttcgagtgcacacggtgcctctggatgcccgggatggcaatgaggtggagcctgatgatgaccacttctccattggtgtgggctcccgcctggatggtcttcgaaaccggggcccaggttgcacctgggattctctacgaaattcagtaggagagaagatcctgtccctccgcagttgctccctgggctccctgggtgccctgggccctgcctgctgccgtgtcctcagtgagctctctgaggagcaggcctttcacgtcagctacctggatattgaggagctgagcctgagtggactctgccagtgcctggtggaactgtccacccagccggccactgtgtgtcatggctctgcaaccaccagggaggcagcccgtggtgaggctgcccgccgtgccctgcagtacctcaagatcatggcaggcagcaagtgaagccccagctggactcatggatgtgcaccctttgctccctgctctttctgcctctgggctcatgtatctgcgcagctctggtaccctctgtgggtgccatctctacctctgacacagactgcctgccttgaagctgagaaggcacagggcaaggagccaaggaccacagagcctcagccagcccaggatccgtcctcattttattggtgatgatgaatgggaatgaaatcagggggctgtctactagagcctggaataaatatgctgctttgtggatttttaa

SEQ ID NO: 189174 - DNA, 1402 bp, Homo sapiens
  Payload ID: 17355
  Gene Symbol: TARBP2
  Gene Name: TAR (HIV-1) RNA binding protein 2
  Uniprot ID: Q15633
  ENST ID: ENST00000394357
  CDS Start-End: 101-1138
ctgcctccagctctaaatagtttggggttggcccggttcccagactgcactggaacactgggctttatgcccccacattcagtgcatttgtatagagcaaatgctggccgccaacccaggcaagaccccgatcagccttctgcaggagtatgggaccagaatagggaagacgcctgtgtacgaccttctcaaagccgagggccaagcccaccagcctaatttcaccttccgggtcaccgttggcgacaccagctgcactggtcagggccccagcaagaaggcagccaagcacaaggcagctgaggtggccctcaaacacctcaaaggggggagcatgctggagccggccctggaggacagcagttctttttctcccctagactcttcactgcctgaggacattccggtttttactgctgcagcagctgctaccccagttccatctgtagtcctaaccaggagcccccccatggaactgcagccccctgtctcccctcagcagtctgagtgcaaccccgttggtgctctgcaggagctggtggtgcagaaaggctggcggttgccggagtacacagtgacccaggagtctgggccagcccaccgcaaagaattcaccatgacctgtcgagtggagcgtttcattgagattgggagtggcacttccaaaaaattggcaaagcggaatgcggcggccaaaatgctgcttcgagtgcacacggtgcctctggatgcccgggatggcaatgaggtggagcctgatgatgaccacttctccattggtgtgggctcccgcctggatggtcttcgaaaccggggcccaggttgcacctgggattctctacgaaattcagtaggagagaagatcctgtccctccgcagttgctccctgggctccctgggtgccctgggccctgcctgctgccgtgtcctcagtgagctctctgaggagcaggcctttcacgtcagctacctggatattgaggagctgagcctgagtggactctgccagtgcctggtggaactgtccacccagccggccactgtgtgtcatggctctgcaaccaccagggaggcagcccgtggtgaggctgcccgccgtgccctgcagtacctcaagatcatggcaggcagcaagtgaagccccagctggactcatggatgtgcaccctttgctccctgctctttctgcctctgggctcatgtatctgcgcagctctggtaccctctgtgggtgccatctctacctctgacacagactgcctgccttgaagctgagaaggcacagggcaaggagccaaggaccacagagcctcagccagcccaggatccgtcctcattttattggtgatgatgaatgggaatgaaatcagggggctgtctactagagcctggaataaatatg

SEQ ID NO: 189175 - DNA, 1368 bp, Homo sapiens
  Payload ID: 17355
  Gene Symbol: TARBP2
  Gene Name: TAR (HIV-1) RNA binding protein 2
  Uniprot ID: Q15633
  ENST ID: ENST00000456234
  CDS Start-End: 55-1092
gctcttgggttctgtagttttctcgcgatccaaaaggctccgtgcccaaagcaaatgctggccgccaacccaggcaagaccccgatcagccttctgcaggagtatgggaccagaatagggaagacgcctgtgtacgaccttctcaaagccgagggccaagcccaccagcctaatttcaccttccgggtcaccgttggcgacaccagctgcactggtcagggccccagcaagaaggcagccaagcacaaggcagctgaggtggccctcaaacacctcaaaggggggagcatgctggagccggccctggaggacagcagttctttttctcccctagactcttcactgcctgaggacattccggtttttactgctgcagcagctgctaccccagttccatctgtagtcctaaccaggagcccccccatggaactgcagccccctgtctcccctcagcagtctgagtgcaaccccgttggtgctctgcaggagctggtggtgcagaaaggctggcggttgccggagtacacagtgacccaggagtctgggccagcccaccgcaaagaattcaccatgacctgtcgagtggagcgtttcattgagattgggagtggcacttccaaaaaattggcaaagcggaatgcggcggccaaaatgctgcttcgagtgcacacggtgcctctggatgcccgggatggcaatgaggtggagcctgatgatgaccacttctccattggtgtgggctcccgcctggatggtcttcgaaaccggggcccaggttgcacctgggattctctacgaaattcagtaggagagaagatcctgtccctccgcagttgctccctgggctccctgggtgccctgggccctgcctgctgccgtgtcctcagtgagctctctgaggagcaggcctttcacgtcagctacctggatattgaggagctgagcctgagtggactctgccagtgcctggtggaactgtccacccagccggccactgtgtgtcatggctctgcaaccaccagggaggcagcccgtggtgaggctgcccgccgtgccctgcagtacctcaagatcatggcaggcagcaagtgaagccccagctggactcatggatgtgcaccctttgctccctgctctttctgcctctgggctcatgtatctgcgcagctctggtaccctctgtgggtgccatctctacctctgacacagactgcctgccttgaagctgagaaggcacagggcaaggagccaaggaccacagagcctcagccagcccaggatccgtcctcattttattggtgatgatgaatgggaatgaaatcagggggctgtctactagagcctggaataaatatgctgctttgtgga

SEQ ID NO: 189176 - DNA, 992 bp, Homo sapiens
  Payload ID: 17355
  Gene Symbol: TARBP2
  Gene Name: TAR (HIV-1) RNA binding protein 2
  ENST ID: ENST00000551741
  CDS Start-End: 129-407
ttcccggcgtgcaccggggcagtggctgctgcctccagctctaaatagtttggggttggcccggttcccagactgcactggaacactgggctttatgcccccacattcagtgcatttgtatagagcaaatgctggccgccaacccaggcaagaccccgatcagccttctgcaggagtatgggaccagaatagggaagacgcctgtgtacgaccttctcaaagccgagggccaagcccaccagcctaatttcaccttccgggtcaccgttggcgacaccagctgcactggtcagggccccagcaagaaggcagccaagcacaaggcagctgaggtggccctcaaacacctcaaaggggggagcatgctggagccggccctggaggacagcagactcttcactgcctgaggacattccggtttttactgctgcagcagctgctaccccagttccatctgtagtcctaaccaggagcccccccatggaactgcagccccctgtctcccctcagcagtctgagtgcaaccccgttggtgctctgcaggagctggtggtgcagaaaggctggcggttgccggagtacacagtgacccaggagtctgggccagcccaccgcaaagaattcaccatgacctgtcgagtggagcgtttcattgagattgggagtggcacttccaaaaaattggcaaagcggaatgcggcggccaaaatgctgcttcgagtgcacacggtgcctctggatgcccgggatggcaatgaggtggagcctgatgatgaccacttctccattggtgtgggctcccgcctggatggtcttcgaaaccggggcccaggttgcacctgggattctctacgaaattcagtaggagagaagatcctgtccctccgcagttgctccctgggctccctgggtgccctgggccctgcctgctgccgtgtcctcagtgagctctctgaggagcaggcctttcacgtcagctacctggatattgg

SEQ ID NO: 189177 - DNA, 1132 bp, Homo sapiens
  Payload ID: 17355
  Gene Symbol: TARBP2
  Gene Name: TAR (HIV-1) RNA binding protein 2
  ENST ID: ENST00000550407
  CDS Start-End: 1-682
cccgatcagccttctgcaggagtatgggaccagaatagggaagacgcctgtgtacgaccttctcaaagccgagggccaagcccaccagcctaatttcaccttccgggtcaccgttggcgacaccagctgcactggtcagggccccagcaagaaggcagccaagcacaaggcagctgaggtggccctcaaacacctcaaaggggggagcatgctggagccggccctggaggacagcagttctttttctcccctagactcttcactgcctgaggacattccggtttttactgctgcagcagctgctaccccagttccatctgtagtcctaaccaggagcccccccatggaactgcagccccctgtctcccctcagcagtctgagtgcaaccccgttggtgctctgcaggagctggtggtgcagaaaggctggcggttgccggagtacacagtgacccaggagtctgggccagcccaccgcaaagaattcaccatgacctgtcgagtggagcgtttcattgagattgggtgtgggctcccgcctggatggtcttcgaaaccggggcccaggttgcacctgggattctctacgaaattcagtaggagagaagatcctgtccctccgcagttgctccctgggctccctgggtgccctgggccctgcctgctgccgtgtcctcagtgagctctctgaggagcaggcctttcacgtcagctacctggatattgaggagctgagcctgagtggactctgccagtgcctggtggaactgtccacccagccggccactgtgtgtcatggctctgcaaccaccagggaggcagcccgtggtgaggctgcccgccgtgccctgcagtacctcaagatcatggcaggcagcaagtgaagccccagctggactcatggatgtgcaccctttgctccctgctctttctgcctctgggctcatgtatctgcgcagctctggtaccctctgtgggtgccatctctacctctgacacagactgcctgccttgaagctgagaaggcacagggcaaggagccaaggaccacagagcctcagccagcccaggatccgtcctcattttattggtgatgatgaatgggaatgaaatcagggggctgtctactaga

SEQ ID NO: 189178 - DNA, 1493 bp, Homo sapiens
  Payload ID: 17355
  Gene Symbol: TARBP2
  Gene Name: TAR (HIV-1) RNA binding protein 2
  ENST ID: ENST00000548971
  CDS Start-End: 104-388
ccggccgcgactccgggcttggccccggccctagctcgtcggctgtgtattggggcgcgtggaggctgcagtcacggtggcgcccgcggggacggaggagggaatgagtgaagaggagcaaggctccggcactaccacgggctgcgggctgcctagccttctgcaggagtatgggaccagaatagggaagacgcctgtgtacgaccttctcaaagccgagggccaagcccaccagcctaatttcaccttccgggtcaccgttggcgacaccagctgcactggtcagggccccagcaagaaggcagccaagcacaaggcagctgaggtggccctcaaacacctcaaaggggggagcatgctggagccggccctggaggacagcaggtgagggaggaaccgaggcatcccagaagcccttcaaggaacccaggccctgcaccacccactctgccccgaggcctggccagttctttttctcccctagactcttcactgcctgaggacattccggtttttactgctgcagcagctgctaccccagttccatctgtagtcctaaccaggagcccccccatggaactgcagccccctgtctcccctcagcagtctgagtgcaaccccgttggtgctctgcaggagctggtggtgcagaaaggctggcggttgccggagtacacagtgacccaggagtctgggccagcccaccgcaaagaattcaccatgacctgtcgagtggagcgtttcattgagattgggagtggcacttccaaaaaattggcaaagcggaatgcggcggccaaaatgctgcttcgagtgcacacggtgcctctggatgcccgggatggcaatgaggtggagcctgatgatgaccacttctccattggtgtgggctcccgcctggatggtcttcgaaaccggggcccaggttgcacctgggattctctacgaaattcagtaggagagaagatcctgtccctccgcagttgctccctgggctccctgggtgccctgggccctgcctgctgccgtgtcctcagtgagctctctgaggagcaggcctttcacgtcagctacctggatattgaggagctgagcctgagtggactctgccagtgcctggtggaactgtccacccagccggccactgtgtgtcatggctctgcaaccaccagggaggcagcccgtggtgaggctgcccgccgtgccctgcagtacctcaagatcatggcaggcagcaagtgaagccccagctggactcatggatgtgcaccctttgctccctgctctttctgcctctgggctcatgtatctgcgcagctctggtaccctctgtgggtgccatctctacctctgacacagactgcctgccttgaagctgagaaggcacagggcaaggagccaaggaccacagagcctcagccagcccaggatccgtcctcattttattggtgatgatgaatgggaatgaaatcagggggctgtctactagagcc

SEQ ID NO: 189179 - DNA, 759 bp, Homo sapiens
  Payload ID: 17355
  Gene Symbol: TARBP2
  Gene Name: TAR (HIV-1) RNA binding protein 2
  ENST ID: ENST00000547064
  CDS Start-End: 171-759
ggaggctgcagtcacggtggcgcccgcggggacggaggagggaatgagtgaagaggagcaaggctccggcactaccacgggctgcgggctgcctaggtcagggccccagcaagaaggcagccaagcacaaggcagctgaggtggccctcaaacacctcaaaggggggagcatgctggagccggccctggaggacagcagttctttttctcccctagactcttcactgcctgaggacattccggtttttactgctgcagcagctgctaccccagttccatctgtagtcctaaccaggagcccccccatggaactgcagccccctgtctcccctcagcagtctgagtgcaaccccgttggtgctctgcaggagctggtggtgcagaaaggctggcggttgccggagtacacagtgacccaggagtctgggccagcccaccgcaaagaattcaccatgacctgtcgagtggagcgtttcattgagattgggagtggcacttccaaaaaattggcaaagcggaatgcggcggccaaaatgctgcttcgagtgcacacggtgcctctggatgcccgggatggcaatgaggtggagcctgatgatgaccacttctccattggtgtgggctcccgcctggatggtcttcgaaaccggggcccaggttgcacctgggattctctacgaaattcagtaggagagaagatcctgtccctccgcagttgctccctgggctccctgggtgccctgggccctgcctgctgcc

SEQ ID NO: 189180 - DNA, 1466 bp, Homo sapiens
  Payload ID: 17355
  Gene Symbol: TARBP2
  Gene Name: TAR (HIV-1) RNA binding protein 2
  ENST ID: ENST00000549679
  CDS Start-End: 115-381
cggggcagtggctgctgcctccagctctaaatagtttggggttggcccggttcccagactgcactggaacactgggctttatgcccccacattcagtgcatttgtatagagcaaatgctggccgccaacccaggcaagaccccgatcagccttctgcaggagtatgggaccagaatagggaagacgcctgtgtacgaccttctcaaagccgagggccaagcccaccagcctaatttcaccttccgggtcaccgttggcgacaccagctgcactggtcagggccccagcaagaaggcagccaagcacaaggcagctgaggtggccctcaaacacctcaaaggggggagcatgctggagccggccctggaggacagcaggtgagggaggaaccgaggcatcccagaagcccttcaaggaacccaggccctgcaccacccactctgccccgaggcctggccagactcttcactgcctgaggacattccggtttttactgctgcagcagctgctaccccagttccatctgtagtcctaaccaggagcccccccatggaactgcagccccctgtctcccctcagcagtctgagtgcaaccccgttggtgctctgcaggagctggtggtgcagaaaggctggcggttgccggagtacacagtgacccaggagtctgggccagcccaccgcaaagaattcaccatgacctgtcgagtggagcgtttcattgagattgggagtggcacttccaaaaaattggcaaagcggaatgcggcggccaaaatgctgcttcgagtgcacacggtgcctctggatgcccgggatggcaatgaggtggagcctgatgatgaccacttctccattggtgtgggctcccgcctggatggtcttcgaaaccggggcccaggttgcacctgggattctctacgaaattcagtaggagagaagatcctgtccctccgcagttgctccctgggctccctgggtgccctgggccctgcctgctgccgtgtcctcagtgagctctctgaggagcaggcctttcacgtcagctacctggatattgaggagctgagcctgagtggactctgccagtgcctggtggaactgtccacccagccggccactgtgtgtcatggctctgcaaccaccagggaggcagcccgtggtgaggctgcccgccgtgccctgcagtacctcaagatcatggcaggcagcaagtgaagccccagctggactcatggatgtgcaccctttgctccctgctctttctgcctctgggctcatgtatctgcgcagctctggtaccctctgtgggtgccatctctacctctgacacagactgcctgccttgaagctgagaaggcacagggcaaggagccaaggaccacagagcctcagccagcccaggatccgtcctcattttattggtgatgatgaatgggaatgaaatcagggggctgtctactaga

SEQ ID NO: 189181 - DNA, 1514 bp, Homo sapiens
  Payload ID: 17355
  Gene Symbol: TARBP2
  Gene Name: TAR (HIV-1) RNA binding protein 2
  ENST ID: ENST00000549572
  CDS Start-End: 116-679
ccggggcagtggctgctgcctccagctctaaatagtttggggttggcccggttcccagactgcactggaacactgggctttatgcccccacattcagtgcatttgtatagagcaaatgctggccgccaacccaggcaagaccccgatcagccttctgcaggagtatgggaccagaatagggaagacgcctgtgtacgaccttctcaaagccgagggccaagcccaccagcctaatttcaccttccgggtcaccgttggcgacaccagctgcactggtcagggccccagcaagaaggcagccaagcacaaggcagctgaggtggccctcaaacacctcaaaggggggagcatgctggagccggccctggaggacagcagttctttttctcccctagactcttcactgcctgaggacattccggtttttactgctgcagcagctgctaccccagttccatctgtagtcctaaccaggagcccccccatggaactgcagccccctgtctcccctcagcagtctgagtgcaaccccgttggtgctctgcagagtctgaggctcctgcgtggggaccagcgtgggtgtgagaagccttttttcactcagcctcatgcaccctgtgtctcccttccaaggagctggtggtgcagaaaggctggcggttgccggagtacacagtgacccaggagtctgggccagcccaccgcaaagaattcaccatgacctgtcgagtggagcgtttcattgagattgggagtggcacttccaaaaaattggcaaagcggaatgcggcggccaaaatgctgcttcgagtgcacacggtgcctctggatgcccgggatggcaatgaggtggagcctgatgatgaccacttctccattggtgtgggctcccgcctggatggtcttcgaaaccggggcccaggttgcacctgggattctctacgaaattcagtaggagagaagatcctgtccctccgcagttgctccctgggctccctgggtgccctgggccctgcctgctgccgtgtcctcagtgagctctctgaggagcaggcctttcacgtcagctacctggatattgaggagctgagcctgagtggactctgccagtgcctggtggaactgtccacccagccggccactgtgtgtcatggctctgcaaccaccagggaggcagcccgtggtgaggctgcccgccgtgccctgcagtacctcaagatcatggcaggcagcaagtgaagccccagctggactcatggatgtgcaccctttgctccctgctctttctgcctctgggctcatgtatctgcgcagctctggtaccctctgtgggtgccatctctacctctgacacagactgcctgccttgaagctgagaaggcacagggcaaggagccaaggaccacagagcctcagccagcccaggatccgtcctcattttattggtgatgatgaatgggaatgaaatcagggggctgtctactagagcctggaataaatatgctgctttgtgg

SEQ ID NO: 189182 - DNA, 916 bp, Homo sapiens
  Payload ID: 17355
  Gene Symbol: TARBP2
  Gene Name: TAR (HIV-1) RNA binding protein 2
  ENST ID: ENST00000552857
  CDS Start-End: 136-633
ccatatcccagcgtgccccgcggcgggccctaccggccgcgactccgggcttggccccggccctagctcgtcggctgtgtattggggcgcgtggaggctgcagtcacggtggcgcccgcggggacggaggagggaatgagtgaagaggagcaaggctccggcactaccacgggctgcgggctgcctagttctttttctcccctagactcttcactgcctgaggacattccggtttttactgctgcagcagctgctaccccagttccatctgtagtcctaaccaggagcccccccatggaactgcagccccctgtctcccctcagcagtctgagtgcaaccccgttggtgctctgcaggagctggtggtgcagaaaggctggcggttgccggagtacacagtgacccaggagtctgggccagcccaccgcaaagaattcaccatgacctgtcgagtggagcgtttcattgagattgggtgtgggctcccgcctggatggtcttcgaaaccggggcccaggttgcacctgggattctctacgaaattcagtaggagagaagatcctgtccctccgcagttgctccctgggctccctgggtgccctgggccctgcctgctgccgtgtcctcagtgagctctctgaggagcaggcctttcacgtcagctacctggatattgaggagctgagcctgagtggactctgccagtgcctggtggaactgtccacccagccggccactgtgtgtcatggctctgcaaccaccagggaggcagcccgtggtgaggctgcccgccgtgccctgcagtacctcaagatcatggcaggcagcaagtgaagccccagctggactcatggatgtgcaccctttgctccctgctctttctgcctctgggctcatgtatctgcgcagctctgg

SEQ ID NO: 189183 - DNA, 1855 bp, Homo sapiens
  Payload ID: 17355
  Gene Symbol: TARBP2
  Gene Name: TAR (HIV-1) RNA binding protein 2
  ENST ID: ENST00000550147
  CDS Start-End: 489-830
gcctctccagctgcgacacagatggcgcgcgggctcttgggttctgtagttttctcgcgatccaaaaggctccgtgcccaagtgagtccttaccgcctccctacccagcggcttcccctccgctagtacgcatgtccacagcttcacggaccgggagagagggggcgcggaaggaaggaggcgggacggtattacaaacaaaaaaatacggccttctcgagaagcgacggcggagggcccgctcctcccagaaggcggtgcagcctgcccgggcgagccacgcacgcagagggttgtggggcggatagctcccctccagatggaggctcacgaagtagggtgggcgggggactccatatcccagcgtgccccgcggcgggccctaccggccgcgactccgggcttggccccggccctagctcgtcggctgtgtattggggcgcgtggaggctgcagtcacggtggcgcccgcggggacggaggagggaatgagtgaagaggagcaaggctccggcactaccacgggctgcgggctgcctagtatagagcaaatgctggccgccaacccaggcaagaccccgatcagccttctgcaggagtatgggaccagaatagggaagacgcctgtgtacgaccttctcaaagccgagggccaagcccaccagcctaatttcaccttccgggtcaccgttggcgacaccagctgcactggtcagggccccagcaagaaggcagccaagcacaaggcagctgaggtggccctcaaacacctcaaaggggggagcatgctggagccggccctggaggacagcagactcttcactgcctgaggacattccggtttttactgctgcagcagctgctaccccagttccatctgtagtcctaaccaggagcccccccatggaactgcagccccctgtctcccctcagcagtctgagtgcaaccccgttggtgctctgcaggagctggtggtgcagaaaggctggcggttgccggagtacacagtgacccaggagtctgggccagcccaccgcaaagaattcaccatgacctgtcgagtggagcgtttcattgagattgggagtggcacttccaaaaaattggcaaagcggaatgcggcggccaaaatgctgcttcgagtgcacacggtgcctctggatgcccgggatggcaatgaggtggagcctgatgatgaccacttctccattggtgtgggctcccgcctggatggtcttcgaaaccggggcccaggttgcacctgggattctctacgaaattcagtaggagagaagatcctgtccctccgcagttgctccctgggctccctgggtgccctgggccctgcctgctgccgtgtcctcagtgagctctctgaggagcaggcctttcacgtcagctacctggatattgaggagctgagcctgagtggactctgccagtgcctggtggaactgtccacccagccggccactgtgtgtcatggctctgcaaccaccagggaggcagcccgtggtgaggctgcccgccgtgccctgcagtacctcaagatcatggcaggcagcaagtgaagccccagctggactcatggatgtgcaccctttgctccctgctctttctgcctctgggctcatgtatctgcgcagctctggtaccctctgtgggtgccatctctacctctgacacagactgcctgccttgaagctgagaaggcacagggcaaggagccaaggaccacagagcctcagccagcccaggatccgtcctcattttattggtgatgatgaatgggaatgaaatcagggggctgtctactagagcctggaataaatatgctgctttgtggatttttaa

SEQ ID NO: 189184 - DNA, 668 bp, Homo sapiens
  Payload ID: 17355
  Gene Symbol: TARBP2
  Gene Name: TAR (HIV-1) RNA binding protein 2
  ENST ID: ENST00000552817
  CDS Start-End: 187-668
gcgtgcaccggggcagtggctgctgcctccagctctaaatagtttggggttggcccggttcccagactgcactggaacactgggctttatgcccccacattcagtgcatttggtcagggccccagcaagaaggcagccaagcacaaggcagctgaggtggccctcaaacacctcaaaggggggagcatgctggagccggccctggaggacagcagttctttttctcccctagactcttcactgcctgaggacattccggtttttactgctgcagcagctgctaccccagttccatctgtagtcctaaccaggagcccccccatggaactgcagccccctgtctcccctcagcagtctgagtgcaaccccgttggtgctctgcaggagctggtggtgcagaaaggctggcggttgccggagtacacagtgacccaggagtctgggccagcccaccgcaaagaattcaccatgacctgtcgagtggagcgtttcattgagattgggagtggcacttccaaaaaattggcaaagcggaatgcggcggccaaaatgctgcttcgagtgcacacggtgcctctggatgcccgggatggcaatgaggtggagcctgatgatgaccacttctccattggtgtgggctcccgcctggatggtcttcgaaaccgggg

SEQ ID NO: 189185 - DNA, 5367 bp, Homo sapiens
  Payload ID: 17356
  Gene Symbol: TARDBP
  Gene Name: TAR DNA binding protein
  Uniprot ID: Q13148
  ENST ID: ENST00000240185
  CDS Start-End: 357-1601
aaaccatctgctacgttacgtggggggaggtcagctcctatacagccacacttttttcaatcttcagcttttcaggcctaggtcctggttttattttagctttcagagcttctctgtaggcttgaatttccaggaggcagcccgagtccctggggagagggtcatcgtggctctcgtcggtgccttccacctctggacaggcaaccggtgggagaggacgccggtgggcggggggaggaggcggccctagcgccattttgtgggagcgaagcggtggctgggctgcgcttgggtccgtcgctgcttcggtgtccctgtcgggcttcccagcagcggcctagcgggaaaagtaaaagatgtctgaatatattcgggtaaccgaagatgagaacgatgagcccattgaaataccatcggaagacgatgggacggtgctgctctccacggttacagcccagtttccaggggcgtgtgggcttcgctacaggaatccagtgtctcagtgtatgagaggtgtccggctggtagaaggaattctgcatgccccagatgctggctggggaaatctggtgtatgttgtcaactatccaaaagataacaaaagaaaaatggatgagacagatgcttcatcagcagtgaaagtgaaaagagcagtccagaaaacatccgatttaatagtgttgggtctcccatggaaaacaaccgaacaggacctgaaagagtattttagtacctttggagaagttcttatggtgcaggtcaagaaagatcttaagactggtcattcaaaggggtttggctttgttcgttttacggaatatgaaacacaagtgaaagtaatgtcacagcgacatatgatagatggacgatggtgtgactgcaaacttcctaattctaagcaaagccaagatgagcctttgagaagcagaaaagtgtttgtggggcgctgtacagaggacatgactgaggatgagctgcgggagttcttctctcagtacggggatgtgatggatgtcttcatccccaagccattcagggcctttgcctttgttacatttgcagatgatcagattgcgcagtctctttgtggagaggacttgatcattaaaggaatcagcgttcatatatccaatgccgaacctaagcacaatagcaatagacagttagaaagaagtggaagatttggtggtaatccaggtggctttgggaatcagggtggatttggtaatagcagagggggtggagctggtttgggaaacaatcaaggtagtaatatgggtggtgggatgaactttggtgcgttcagcattaatccagccatgatggctgccgcccaggcagcactacagagcagttggggtatgatgggcatgttagccagccagcagaaccagtcaggcccatcgggtaataaccaaaaccaaggcaacatgcagagggagccaaaccaggccttcggttctggaaataactcttatagtggctctaattctggtgcagcaattggttggggatcagcatccaatgcagggtcgggcagtggttttaatggaggctttggctcaagcatggattctaagtcttctggctggggaatgtagacagtggggttgtggttggttggtatagaatggtgggaattcaaatttttctaaactcatggtaagtatattgtaaaatacatatgtactaagaattttcaaaattggtttgttcagtgtggagtatattcagcagtatttttgacatttttctttagaaaaaggaagagctaaaggaattttataagttttgttacatgaaaggttgaaatattgagtggttgaaagtgaactgctgtttgcctgattggtaaaccaacacactacaattgatatcaaaaggtttctcctgtaatattttatccctggacttgtcaagtgaattctttgcatgttcaaaacggaaaccattgattagaactacattctttaccccttgttttaatttgaaccccaccatatggatttttttccttaagaaaatctccttttaggagatcatggtgtcacagtgtttggttcttttgttttgttttttaacacttgtctcccctcatacacaaaagtacaatatgaagccttcatttaatctctgcagttcatctcatttcaaatgtttatggaagaagcacttcattgaaagtagtgctgtaaatattctgccataggaatactgtctacatgctttctcattcaagaattcgtcatcacgcatcacaggccgcgtctttgacggtgggtgtcccatttttatccgctactctttatttcatggagtcgtatcaacgctatgaacgcaaggctgtgatatggaaccagaaggctgtctgaacttttgaaaccttgtgtgggattgatggtggtgccgaggcatgaaaggctagtatgagcgagaaaaggagagagcgcgtgcagagacttggtggtgcataatggatattttttaacttggcgagatgtgtctctcaatcctgtggctttggtgagagagtgtgcagagagcaatgatagcaaataatgtacgaatgttttttgcattcaaaggacatccacatctgttggaagacttttaagtgagtttttgttcttagataacccacattagatgaatgtgttaagtgaaatgatacttgtactccccctacccctttgtcaactgctgtgaatgctgtatggtgtgtgttctcttctgttactgatatgtaagtgtggcaatgtgaactgaagctgatgggctgagaacatggactgagcttgtggtgtgctttgcaggaggacttgaagcagagttcaccagtgagctcaggtgtctcaaagaagggtggaagttctaatgtctgttagctacccataagaatgctgtttgctgcagttctgtgtcctgtgcttggatgctttttataagagttgtcattgttggaaattcttaaataaaactgatttaaataatatgtgtctttgttttgcagccctgaatgcaaagaattcatagcagttaattccccttttttgacccttttgagatggaactttcataaagtttcttggcagtagtttattttgcttcaaataaacttatttgaaaagttgtctcaagtcaaatggattcatcacctgtcatgcattgacacctgatacccagacttaattggtatttgttcttgcattggccaaagtgaaaatttttttttttcttttgaaatctagttttgaataagtctgggtgaccgcacctaaaatggtaagcagtaccctccggctttttcttagtgcctctgtgcatttgggtgatgttctatttacatggcctgtgtaaatctccattgggaagtcatgccttctaaaaagattcttatttgggggagtgggcaaaatgttgattattttctaatgctttgtagcaaagcatatcaattgaaaagggaatatcagcaccttcctagtttgggatttgaaaagtggaattaattgcagtagggataaagtagaagaaaccacaaattatcttgtgcctgaaatccattaagaggcctgatagctttaagaattagggtgggttgtctgtctggaagtgttaagtggaatgggctttgtcctccaggaggtgggggaatgtggtaacattgaatacagttgaataaaatcgcttacaaaactcacactctcacaatgcattgttaagtatgtaaaagcaataacattgattctctgttgtacttttttgtaactaattctgtgagagttgagctcattttctagttggaagaatgtgatatttgttgtgttggtagtttacctaatgcccttacctaattagattatgataaataggtttgtcattttgcaagttacataaacatttatcaatgaagtcatcctttagacttgtaatcgccacattgtttcattattcagtttcctctgtaaagggatcttgagttgttttaattttttttttctgcatctgaatctgcatgatttccaaaccctgtaccatctgaattttgcattttagcacttgcactattactcagcagcagtaacatggtaacacttaaaatggtactcggggacctccaaagactaaactgacaagccttcaaggagcccaggggtaagttaacttgtcaacggcatggtttaatcccttctttacacttgtgtaaatttcagttactggtcatagaaggctttcaatgttgagtggccttttattaacatgtttatggtactgcatagatacgggtatttattttaccctaagaagattttgaagtttaaaagtacttaaactatttggcaaagatttgtttttaaaaatctatttggtcaatctaaatgcattcattctaaaaaattttttgaaccagataaataaaatttttttttgacaccacagtttagtgtctggagtcttactggaaaaacacgatttctttttatatgtgatatacagatgctggaaagttacctttaaaaattgagtctctaaagaaaaaagaaaataataaaaattgagtctcaagaagttgtacttcatatgcacaagagaaatgaggccaagactcacagtaagcttttacatggaatggtaacttttagttagactgaaaaacttgaatgttagctattaaaaccttttaggaaggaatagccagctaaaaccaaatgagatttttaaagttaaatcagcacttaagttgtgtccttagtaggaaaaagtaggaagttaactactccgtaatccaagagataatgtgtaacagtaagaatgattttgttgttgttgagtatgagcaaagtagcccctaagtgtgtattagggttctgtacttaactgttgtgtgatgtgtgcttttgttaggcatcactgtgcccaagtatttcatgttcattgtaaagaggaaaaatacagatttctctataatgtcaccacttatttctaatgccacttttcatcttgtggaaatgccatgttttgattcagtcttctgaatttgaacattattcaggttatttccaattgctgggaatatccttactgctaaaataaattcttagcattggaattgctaggtcaaagattatgcatgctttttaagggcttttgaaatgtattgccagtctgtggcctgccaccctccctgaacatgcctggtcttgcttaaaatgtattgccaaatagtccttgggaagtttatgttgtctttaacaatgtgaaatagtactactattcacgttccttttgtctgacaatttgataagtgaataattgtatcccaccattctgtagtattggtttttaacatggaaattttagtcaata

SEQ ID NO: 189186 - DNA, 1835 bp, Homo sapiens
  Payload ID: 17356
  Gene Symbol: TARDBP
  Gene Name: TAR DNA binding protein
  ENST ID: ENST00000315091
  CDS Start-End: 13-900
gaaaagtaaaagatgtctgaatatattcgggtaaccgaagatgagaacgatgagcccattgaaataccatcggaagacgatgggacggtgctgctctccacggttacagcccagtttccaggggcgtgtgggcttcgctacaggaatccagtgtctcagtgtatgagaggtgtccggctggtagaaggaattctgcatgccccagatgctggctggggaaatctggtgtatgttgtcaactatccaaaagataacaaaagaaaaatggatgagacagatgcttcatcagcagtgaaagtgaaaagagcagtccagaaaacatccgatttaatagtgttgggtctcccatggaaaacaaccgaacaggacctgaaagagtattttagtacctttggagaagttcttatggtgcaggtcaagaaagatcttaagactggtcattcaaaggggtttggctttgttcgttttacggaatatgaaacacaagtgaaagtaatgtcacagcgacatatgatagatggacgatggtgtgactgcaaacttcctaattctaagcaaagccaagatgagcctttgagaagcagaaaagtgtttgtggggcgctgtacagaggacatgactgaggatgagctgcgggagttcttctctcagtacggggatgtgatggatgtcttcatccccaagccattcagggcctttgcctttgttacatttgcagatgatcagattgcgcagtctctttgtggagaggacttgatcattaaaggaatcagcgttcatatatccaatgccgaacctaagcacaatagcaatagacagttagaaagaagtggaagatttggtgttcatctcatttcaaatgtttatggaagaagcacttcattgaaagtagtgctgtaaatattctgccataggaatactgtctacatgctttctcattcaagaattcgtcatcacgcatcacaggccgcgtctttgacggtgggtgtcccatttttatccgctactctttatttcatggagtcgtatcaacgctatgaacgcaaggctgtgatatggaaccagaaggctgtctgaacttttgaaaccttgtgtgggattgatggtggtgccgaggcatgaaaggctagtatgagcgagaaaaggagagagcgcgtgcagagacttggtggtgcataatggatattttttaacttggcgagatgtgtctctcaatcctgtggctttggtgagagagtgtgcagagagcaatgatagcaaataatgtacgaatgttttttgcattcaaaggacatccacatctgttggaagacttttaagtgagtttttgttcttagataacccacattagatgaatgtgttaagtgaaatgatacttgtactccccctacccctttgtcaactgctgtgaatgctgtatggtgtgtgttctcttctgttactgatatgtaagtgtggcaatgtgaactgaagctgatgggctgagaacatggactgagcttgtggtgtgctttgcaggaggacttgaagcagagttcaccagtgagctcaggtgtctcaaagaagggtggaagttctaatgtctgttagctacccataagaatgctgtttgctgcagttctgtgtcctgtgcttggatgctttttataagagttgtcattgttggaaattcttaaataaaactgatttaaataatatgtgtctttgttttgcagccctgaatgcaaagaattcatagcagttaattccccttttttgacccttttgagatggaactttcataaagtttcttggcagtagtttattttgcttcaaataaacttatttgaaaagtt

SEQ ID NO: 189187 - DNA, 1388 bp, Homo sapiens
  Payload ID: 17356
  Gene Symbol: TARDBP
  Gene Name: TAR DNA binding protein
  ENST ID: ENST00000439080
  CDS Start-End: 104-358
cattttgtgggagcgaagcggtggctgggctgcgcttgggtccgtcgctgcttcggtgtccctgtcgggcttcccagcagcggcctagcgggaaaagtaaaagatgtctgaatatattcgggtaaccgaagatgagaacgatgagcccattgaaataccatcggaagacgatgggacggtgctgctctccacggttacagcccagtttccaggggcgtgtgggcttcgctacaggaatccagtgtctcagtgtatgagaggtgtccggctggtagaaggaattctgcatgccccagatgctggctggggaaatctggtgtatgttgtcaactatccaaaaggtcaagaaagatcttaagactggtcattcaaaggggtttggctttgttcgttttacggaatatgaaacacaagtgaaagtaatgtcacagcgacatatgatagatggacgatggtgtgactgcaaacttcctaattctaagcaaagccaagatgagcctttgagaagcagaaaagtgtttgtggggcgctgtacagaggacatgactgaggatgagctgcgggagttcttctctcagtacggggatgtgatggatgtcttcatccccaagccattcagggcctttgcctttgttacatttgcagatgatcagattgcgcagtctctttgtggagaggacttgatcattaaaggaatcagcgttcatatatccaatgccgaacctaagcacaatagcaatagacagttagaaagaagtggaagatttggtggtaatccaggtggctttgggaatcagggtggatttggtaatagcagagggggtggagctggtttgggaaacaatcaaggtagtaatatgggtggtgggatgaactttggtgcgttcagcattaatccagccatgatggctgccgcccaggcagcactacagagcagttggggtatgatgggcatgttagccagccagcagaaccagtcaggcccatcgggtaataaccaaaaccaaggcaacatgcagagggagccaaaccaggccttcggttctggaaataactcttatagtggctctaattctggtgcagcaattggttggggatcagcatccaatgcagggtcgggcagtggttttaatggaggctttggctcaagcatggattctaagtcttctggctggggaatgtagacagtggggttgtggttggttggtatagaatggtgggaattcaaatttttctaaactcatggtaagtatattgtaaaatacatatgtactaagaattttcaaaattggtttgttcagtgtggagtatattcagcagtatttttgacatttttctttagaaaaaggaagagctaaaggaattttataagttttgttacatgaaag

SEQ ID NO: 189188 - DNA, 1946 bp, Homo sapiens
  Payload ID: 17356
  Gene Symbol: TARDBP
  Gene Name: TAR DNA binding protein
  ENST ID: ENST00000473869
  CDS Start-End: 13-909
gaaaagtaaaagatgtctgaatatattcgggtaaccgaagatgagaacgatgagcccattgaaataccatcggaagacgatgggacggtgctgctctccacggttacagcccagtttccaggggcgtgtgggcttcgctacaggaatccagtgtctcagtgtatgagaggtgtccggctggtagaaggaattctgcatgccccagatgctggctggggaaatctggtgtatgttgtcaactatccaaaagataacaaaagaaaaatggatgagacagatgcttcatcagcagtgaaagtgaaaagagcagtccagaaaacatccgatttaatagtgttgggtctcccatggaaaacaaccgaacaggacctgaaagagtattttagtacctttggagaagttcttatggtgcaggtcaagaaagatcttaagactggtcattcaaaggggtttggctttgttcgttttacggaatatgaaacacaagtgaaagtaatgtcacagcgacatatgatagatggacgatggtgtgactgcaaacttcctaattctaagcaaagccaagatgagcctttgagaagcagaaaagtgtttgtggggcgctgtacagaggacatgactgaggatgagctgcgggagttcttctctcagtacggggatgtgatggatgtcttcatccccaagccattcagggcctttgcctttgttacatttgcagatgatcagattgcgcagtctctttgtggagaggacttgatcattaaaggaatcagcgttcatatatccaatgccgaacctaagcacaatagcaatagacagttagaaagaagtggaagatttggtggtaatccagttcatctcatttcaaatgtttatggaagaagcacttcattgaaagtagtgctgtaaatattctgccataggaatactgtctacatgctttctcattcaagaattcgtcatcacgcatcacaggccgcgtctttgacgccctgaatgcaaagaattcatagcagttaattccccttttttgacccttttgagatggaactttcataaagtttcttggcagtagtttattttgcttcaaataaacttatttgaaaagttgtctcaagtcaaatggattcatcacctgtcatgcattgacacctgatacccagacttaattggtatttgttcttgcattggccaaagtgaaaatttttttttttcttttgaaatctagttttgaataagtctgggtgaccgcacctaaaatggtaagcagtaccctccggctttttcttagtgcctctgtgcatttgggtgatgttctatttacatggcctgtgtaaatctccattgggaagtcatgccttctaaaaagattcttatttgggggagtgggcaaaatgttgattattttctaatgctttgtagcaaagcatatcaattgaaaagggaatatcagcaccttcctagtttgggatttgaaaagtggaattaattgcagtagggataaagtagaagaaaccacaaattatcttgtgcctgaaatccattaagaggcctgatagctttaagaattagggtgggttgtctgtctggaagtgttaagtggaatgggctttgtcctccaggaggtgggggaatgtggtaacattgaatacagttgaataaaatcgcttacaaaactcacactctcacaatgcattgttaagtatgtaaaagcaataacattgattctctgttgtacttttttgtaactaattctgtgagagttgagctcattttctagttggaagaatgtgatatttgttgtgttggtagtttacctaatgcccttacctaattagattatgataaataggtttgtcattttgcaagttacataaacatttatcaatgaagtcatcctttagacttgtaatcgccacattgtttcattattcagtttcctctgt

SEQ ID NO: 189189 - DNA, 1001 bp, Homo sapiens
  Payload ID: 17356
  Gene Symbol: TARDBP
  Gene Name: TAR DNA binding protein
  ENST ID: ENST00000472476
  CDS Start-End: 103-345
attttgtgggagcgaagcggtggctgggctgcgcttgggtccgtcgctgcttcggtgtccctgtcgggcttcccagcagcggcctagcgggaaaagtaaaagatgtctgaatatattcgggtaaccgaagatgagaacgatgagcccattgaaataccatcggaagacgatgggacggtgctgctctccacggttacagcccagtttccaggggcgtgtgggcttcgctacaggaatccagtgtctcagtgtatgagaggtgtccggctggtagaaggaattctgcatgccccagatgctggctggggaaatctggtgtatgttgtcaactatccaaaagtatagacggcgtttcaccatcttggccaggctggtcttgaactcctgaccttgtgatccacctgcctcagactcccaaagtgctgggattacaagtgtgagccaccgcgcccagccagttatgtttttttaaataacaaaagaaaaatggatgagacagatgcttcatcagcagtgaaagtgaaaagagcagtccagaaaacatccgatttaatagtgttgggtctcccatggaaaacaaccgaacaggacctgaaagagtattttagtacctttggagaagttcttatggtgcaggtcaagaaagatcttaagactggtcattcaaaggggtttggctttgttcgttttacggaatatgaaacacaagtgaaagtaatgtcacagcgacatatgatagatggacgatggtgtgactgcaaacttcctaattctaagcaaagccaagatgagcctttgagaagcagaaaagtgtttgtggggcgctgtacagaggacatgactgaggatgagctgcgggagttcttctctcagtacggggatgtgatggatgtcttcatccccaagccattcagggcctttgcctttgttacatttgcagatgatcagattgcgcagtctctttgtggagaggacttgatcattaaaggaatcagcgttca

SEQ ID NO: 189190 - DNA, 701 bp, Homo sapiens
  Payload ID: 17356
  Gene Symbol: TARDBP
  Gene Name: TAR DNA binding protein
  ENST ID: ENST00000473118
  CDS Start-End: 98-701
gcgctttgaaagtgcgcgagctccgaccgagacctgggccggcggttggtcggccgaaaccatctgctacgttacgtggggggaggaaaagtaaaagatgtctgaatatattcgggtaaccgaagatgagaacgatgagcccattgaaataccatcggaagacgatgggacggtgctgctctccacggttacagcccagtttccaggggcgtgtgggcttcgctacaggaatccagtgtctcagtgtatgagaggtgtccggctggtagaaggaattctgcatgccccagatgctggctggggaaatctggtgtatgttgtcaactatccaaaagataacaaaagaaaaatggatgagacagatgcttcatcagcagtgaaagtgaaaagagcagtccagaaaacatccgatttaatagtgttgggtctcccatggaaaacaaccgaacaggacctgaaagagtattttagtacctttggagaagttcttatggtgcaggtcaagaaagatcttaagactggtcattcaaaggggtttggctttgttcgttttacggaatatgaaacacaagtgaaagtaatgtcacagcgacatatgatagatggacgatggtgtgactgcaaacttcctaattctaagcaaagccaagatgagcctttgagaagcagaaaagtgtttgtggggcgctgtacagaggaca

SEQ ID NO: 189191 - DNA, 409 bp, Homo sapiens
  Payload ID: 17356
  Gene Symbol: TARDBP
  Gene Name: TAR DNA binding protein
  ENST ID: ENST00000477447
  CDS Start-End: 1-196
tgcagatgatcagattgcgcagtctctttgtggagaggacttgatcattaaaggaatcagcgttcatatatccaatgccgaacctaagcacaatagcaatagacagttagaaagaagtggaagatttggtggtaatccagttcatctcatttcaaatgtttatggaagaagcacttcattgaaagtagtgctgtaaatattctgccataggaatactgtctacatgctttctcattcaagaattcgtcatcacgcatcacaggccgcgtctttgacgttttgaataagtctgggtgaccgcacctaaaatgcacttgcactattactcagcagcagtaacatggtaacacttaaaatggtactcggggacctccaaagactaaactgacaagccttcaaggagcccagg

SEQ ID NO: 189192 - DNA, 929 bp, Homo sapiens
  Payload ID: 17356
  Gene Symbol: TARDBP
  Gene Name: TAR DNA binding protein
  ENST ID: ENST00000476201
  CDS Start-End: 103-929
attttgtgggagcgaagcggtggctgggctgcgcttgggtccgtcgctgcttcggtgtccctgtcgggcttcccagcagcggcctagcgggaaaagtaaaagatgtctgaatatattcgggtaaccgaagatgagaacgatgagcccattgaaataccatcggaagacgatgggacggtgctgctctccacggttacagcccagtttccaggggcgtgtgggcttcgctacaggaatccagtgtctcagtgtatgagaggtgtccggctggtagaaggaattctgcatgccccagatgctggctggggaaatctggtgtatgttgtcaactatccaaaaggctggacatggtggctcacatctgtaatcccagctactcgggaggctgaggcaggagaatcacttgaacccgggaggcagaggttgcagagaggggagattgcgccactgcactccagcctagataacaaaagaaaaatggatgagacagatgcttcatcagcagtgaaagtgaaaagagcagtccagaaaacatccgatttaatagtgttgggtctcccatggaaaacaaccgaacaggacctgaaagagtattttagtacctttggagaagttcttatggtgcaggtcaagaaagatcttaagactggtcattcaaaggggtttggctttgttcgttttacggaatatgaaacacaagtgaaagtaatgtcacagcgacatatgatagatggacgatggtgtgactgcaaacttcctaattctaagcaaagccaagatgagcctttgagaagcagaaaagtgtttgtggggcgctgtacagaggacatgactgaggatgagctgcgggagttcttctctcagtacggggatgtgatggatgtcttcatccccaagccattcagggcctttgcctttgttacatttgc

SEQ ID NO: 189193 - DNA, 692 bp, Homo sapiens
  Payload ID: 17356
  Gene Symbol: TARDBP
  Gene Name: TAR DNA binding protein
  ENST ID: ENST00000496840
  CDS Start-End: 1-51
ctcatttcaaatgtttatggaagaagcacttcattgaaagtagtgctgtaaatattctgccataggaatactgtctacatgctttctcattcaagaattcgtcatcacgcatcacaggccgcgtctttgacgccctgaatgcaaagaattcatagcagttaattccccttttttgacccttttgagatggaactttcataaagtttcttggcagtagtttattttgcttcaaataaacttatttgaaaagttgtctcaagtcaaatggattcatcacctgtcatgcattgacacctgatacccagacttaattggtatttgttcttgcattggccaaagtgaaaatttttttttttcttttgaaatctagttttgaataagtctgggtgaccgcacctaaaatgcacttgcactattactcagcagcagtaacatggtaacacttaaaatggtactcggggacctccaaagactaaactgacaagccttcaaggagcccagggatgctggaaagttacctttaaaaattgagtctctaaagaaaaaagaaaataataaaaattgagtctcaagaagttgtacttcatatgcacaagagaaatgaggccaagactcacagtaagcttttacatggaatggtaacttttagttagactgaaaaacttgaatgttagctattaaaaccttttagg

SEQ ID NO: 189194 - DNA, 992 bp, Homo sapiens
  Payload ID: 17356
  Gene Symbol: TARDBP
  Gene Name: TAR DNA binding protein
  ENST ID: ENST00000621573
  CDS Start-End: 1-107
gtgcagcaattggttggggatcagcatccaatgcagggtcgggcagtggttttaatggaggctttggctcaagcatggattctaagtcttctggctggggaatgtagacagtggggttgtggttggttggtatagaatggtgggaattcaaatttttctaaactcatggtaagtatattgtaaaatacatatgtactaagaattttcaaaattggtttgttcagtgtggagtatattcagcagtatttttgacatttttctttagaaaaaggaagagctaaaggaattttataagttttgttacatgaaaggttgaaatattgagtggttgaaagtgaactgctgtttgcctgattggtaaaccaacacactacaattgatatcaaaaggtttctcctgtaatattttatccctggacttgtcaagtgaattctttgcatgttcaaaacggaaaccattgattagaactacattctttaccccttgttttaatttgaaccccaccatatggatttttttccttaagaaaatctccttttaggagatcatggtgtcacagtgtttggttcttttgttttgttttttaacacttgtctcccctcatacacaaaagtacaatatgaagccttcatttaatctctgcagttcatctcatttcaaatgtttatggaagaagcacttcattgaaagtagtgctgtaaatattctgccataggaatactgtctacatgctttctcattcaagaattcgtcatcacgcatcacaggccgcgtctttgacgccctgaatgcaaagaattcatagcagttaattccccttttttgacccttttgagatggaactttcataaagtttcttggcagtagtttattttgcttcaaataaacttatttgaaaagttgtctcaagtcaaatggattcatcacctgtcatgcattgacacctgatacccagacttaattggtatttgttcttgcattggccaaagtga

SEQ ID NO: 189195 - DNA, 980 bp, Homo sapiens
  Payload ID: 17356
  Gene Symbol: TARDBP
  Gene Name: TAR DNA binding protein
  ENST ID: ENST00000617172
  CDS Start-End: 1-638
agacagatgcttcatcagcagtgaaagtgaaaagagcagtccagaaaacatccgatttaatagtgttgggtctcccatggaaaacaaccgaacaggacctgaaagagtattttagtacctttggagaagttcttatggtgcaggtcaagaaagatcttaagactggtcattcaaaggggtttggctttgttcgttttacggaatatgaaacacaagtgaaagtaatgtcacagcgacatatgatagatggacgatggtgtgactgcaaacttcctaattctaagcaaagccaagatgagcctttgagaagcagaaaagtgtttgtggggcgctgtacagaggacatgactgaggatgagctgcgggagttcttctctcagtacggggatgtgatggatgtcttcatccccaagccattcagggcctttgcctttgttacatttgcagatgatcagattgcgcagtctctttgtggagaggacttgatcattaaaggaatcagcgttcatatatccaatgccgaacctaagcacaatagcaatagacagttagaaagaagtggaagatttggtggtaatccagttcatctcatttcaaatgtttatggaagaagcacttcattgaaagtagtgctgtaaatattctgccataggaatactgtctacatgctttctcattcaagaattcgtcatcacgcatcacaggccgcgtctttgacggtgggtgtcccatttttatccgctactctttatttcatggagtcgtatcaacgctatgaacgcaaggctgtgatatggaaccagaaggctgtctgaacttttgaaaccttgtgtgggattgatggtggtgccgaggcatgaaaggctagtatgagcgagaaaaggagagagcgcgtgcagagacttggtggtgcataatggatattttttaacttggcgagatgtgtctctcaatcctgtggctttggtgagagagtgtgc

SEQ ID NO: 189196 - DNA, 657 bp, Homo sapiens
  Payload ID: 17356
  Gene Symbol: TARDBP
  Gene Name: TAR DNA binding protein
  ENST ID: ENST00000620505
  CDS Start-End: 1-347
gaaacaatcaaggtagtaatatgggtggtgggatgaactttggtgcgttcagcattaatccagccatgatggctgccgcccaggcagcactacagagcagttggggtatgatgggcatgttagccagccagcagaaccagtcaggcccatcgggtaataaccaaaaccaaggcaacatgcagagggagccaaaccaggccttcggttctggaaataactcttatagtggctctaattctggtgcagcaattggttggggatcagcatccaatgcagggtcgggcagtggttttaatggaggctttggctcaagcatggattctaagtcttctggctggggaatgtagacagtggggttgtggttggttggtatagaatggtgggaattcaaatttttctaaactcatgttcatctcatttcaaatgtttatggaagaagcacttcattgaaagtagtgctgtaaatattctgccataggaatactgtctacatgctttctcattcaagaattcgtcatcacgcatcacaggccgcgtctttgacgcacttgcactattactcagcagcagtaacatggtaacacttaaaatggtactcggggacctccaaagactaaactgacaagccttcaaggagcccaggggtaagttaacttg

SEQ ID NO: 189197 - DNA, 682 bp, Homo sapiens
  Payload ID: 17356
  Gene Symbol: TARDBP
  Gene Name: TAR DNA binding protein
  ENST ID: ENST00000619555
  CDS Start-End: 1-415
tcgttttacggaatatgaaacacaagtgaaagtaatgtcacagcgacatatgatagatggacgatggtgtgactgcaaacttcctaattctaagcaaagccaagatgagcctttgagaagcagaaaagtgtttgtggggcgctgtacagaggacatgactgaggatgagctgcgggagttcttctctcagtacggggatgtgatggatgtcttcatccccaagccattcagggcctttgcctttgttacatttgcagatgatcagattgcgcagtctctttgtggagaggacttgatcattaaaggaatcagcgttcatatatccaatgccgaacctaagcacaatagcaatagacagttagaaagaagtggaagatttggtggtaatccagtacaatatgaagccttcatttaatctctgcagttcatctcatttcaaatgtttatggaagaagcacttcattgaaagtagtgctgtaaatattctgccataggaatactgtctacatgctttctcattcaagaattcgtcatcacgcatcacaggccgcgtctttgacgccctgaatgcaaagaattcatagcagttaattccccttttttgacccttttgagatggaactttcataaagtttcttggcagtagtttattttgcttcaaataaacttatttgaaaagttg

SEQ ID NO: 189198 - DNA, 816 bp, Homo sapiens
  Payload ID: 17356
  Gene Symbol: TARDBP
  Gene Name: TAR DNA binding protein
  ENST ID: ENST00000621715
  CDS Start-End: 87-816
gcggtggctgggctgcgcttgggtccgtcgctgcttcggtgtccctgtcgggcttcccagcagcggcctagcgggaaaagtaaaagatgtctgaatatattcgggtaaccgaagatgagaacgatgagcccattgaaataccatcggaagacgatgggacggtgctgctctccacggttacagcccagtttccaggggcgtgtgggcttcgctacaggaatccagtgtctcagtgtatgagaggtgtccggctggtagaaggaattctgcatgccccagatgctggctggggaaatctggtgtatgttgtcaactatccaaaagataacaaaagaaaaatggatgagacagatgcttcatcagcagtgaaagtgaaaagagcagtccagaaaacatccgatttaatagtgttgggtctcccatggaaaacaaccgaacaggacctgaaagagtattttagtacctttggagaagttcttatggtgcaggtcaagaaagatcttaagactggtcattcaaaggggtttggctttgttcgttttacggaatatgaaacacaagtgaaagtaatgtcacagcgacatatgatagatggacgatggtgtgactgcaaacttcctaattctaagattgcgcagtctctttgtggagaggacttgatcattaaaggaatcagcgttcatatatccaatgccgaacctaagcacaatagcaatagacagttagaaagaagtggaagatttggtggtaatccaggtggctttgggaatcagggtggatttggtaatagcagagggggtggagctggtttgggaa

SEQ ID NO: 189199 - DNA, 706 bp, Homo sapiens
  Payload ID: 17356
  Gene Symbol: TARDBP
  Gene Name: TAR DNA binding protein
  ENST ID: ENST00000620632
  CDS Start-End: 1-448
tcgttttacggaatatgaaacacaagtgaaagtaatgtcacagcgacatatgatagatggacgatggtgtgactgcaaacttcctaattctaagcaaagccaagatgagcctttgagaagcagaaaagtgtttgtggggcgctgtacagaggacatgactgaggatgagctgcgggagttcttctctcagtacggggatgtgatggatgtcttcatccccaagccattcagggcctttgcctttgttacatttgcagatgatcagattgcgcagtctctttgtggagaggacttgatcattaaaggaatcagcgttcatatatccaatgccgaacctaagcacaatagcaatagacagttagaaagaagtggaagatttggtggtaatccagttcatctcatttcaaatgtttatggaagaagcacttcattgaaagtagtgctgtaaatattctgccataggaatactgtctacatgctttctcattcaagaattcgtcatcacgcatcacaggccgcgtctttgacggaggacttgaagcagagttcaccagtgagctcaggtgtctcaaagaagggtggaagttctaatgtctgttagctacccataagaatgctgtttgctgcagttctgtgtcctgtgcttggatgctttttataagagttgtcattgttggaaattcttaaataaaactgatttaaataa

SEQ ID NO: 189200 - DNA, 706 bp, Homo sapiens
  Payload ID: 17356
  Gene Symbol: TARDBP
  Gene Name: TAR DNA binding protein
  ENST ID: ENST00000622057
  CDS Start-End: 1-602
tggatgagacagatgcttcatcagcagtgaaagtgaaaagagcagtccagaaaacatccgatttaatagtgttgggtctcccatggaaaacaaccgaacaggacctgaaagagtattttagtacctttggagaagttcttatggtgcaggtcaagaaagatcttaagactggtcattcaaaggggtttggctttgttcgttttacggaatatgaaacacaagtgaaagtaatgtcacagcgacatatgatagatggacgatggtgtgactgcaaacttcctaattctaagcaaagccaagatgagcctttgagaagcagaaaagtgtttgtggggcgctgtacagaggacatgactgaggatgagctgcgggagttcttctctcagtacggggatgtgatggatgtcttcatccccaagccattcagggcctttgcctttgttacatttgcagatgatcagattgcgcagtctctttgtggagaggacttgatcattaaaggaatcagcgttcatatatccaatgccgaacctaagcacaatagcaatagacagttagaaagaagtggaagatttggtgtacaatatgaagccttcatttaatctctgcagttcatctcatttcaaatgtttatggaagaagcacttcattgaaagtagtgctgtaaatattctgccataggaatactgtctacatgctttctcat

SEQ ID NO: 189201 - DNA, 739 bp, Homo sapiens
  Payload ID: 17356
  Gene Symbol: TARDBP
  Gene Name: TAR DNA binding protein
  ENST ID: ENST00000611963
  CDS Start-End: 1-528
aaagagtattttagtacctttggagaagttcttatggtgcaggtcaagaaagatcttaagactggtcattcaaaggggtttggctttgttcgttttacggaatatgaaacacaagtgaaagtaatgtcacagcgacatatgatagatggacgatggtgtgactgcaaacttcctaattctaagcaaagccaagatgagcctttgagaagcagaaaagtgtttgtggggcgctgtacagaggacatgactgaggatgagctgcgggagttcttctctcagtacggggatgtgatggatgtcttcatccccaagccattcagggcctttgcctttgttacatttgcagatgatcagattgcgcagtctctttgtggagaggacttgatcattaaaggaatcagcgttcatatatccaatgccgaacctaagcacaatagcaatagacagttagaaagaagtggaagatttggtgttcatctcatttcaaatgtttatggaagaagcacttcattgaaagtagtgctgtaaatattctgccataggaatactgtctacatgctttctcattcaagaattcgtcatcacgcatcacaggccgcgtctttgacgccctgaatgcaaagaattcatagcagttaattccccttttttgacccttttgagatggaactttcataaagtttcttggcagtagtttattttgcttcaaataaacttatttgaaaagttgtctcaagtc

SEQ ID NO: 189202 - DNA, 1008 bp, Homo sapiens
  Payload ID: 17356
  Gene Symbol: TARDBP
  Gene Name: TAR DNA binding protein
  ENST ID: ENST00000621790
  CDS Start-End: 1-915
atgtctgaatatattcgggtaaccgaagatgagaacgatgagcccattgaaataccatcggaagacgatgggacggtgctgctctccacggttacagcccagtttccaggggcgtgtgggcttcgctacaggaatccagtgtctcagtgtatgagaggtgtccggctggtagaaggaattctgcatgccccagatgctggctggggaaatctggtgtatgttgtcaactatccaaaagataacaaaagaaaaatggatgagacagatgcttcatcagcagtgaaagtgaaaagagcagtccagaaaacatccgatttaatagtgttgggtctcccatggaaaacaaccgaacaggacctgaaagagtattttagtacctttggagaagttcttatggtgcaggtcaagaaagatcttaagactggtcattcaaaggggtttggctttgttcgttttacggaatatgaaacacaagtgaaagtaatgtcacagcgacatatgatagatggacgatggtgtgactgcaaacttcctaattctaagcaaagccaagatgagcctttgagaagcagaaaagtgtttgtggggcgctgtacagaggacatgactgaggatgagctgcgggagttcttctctcagtacggggatgtgatggatgtcttcatccccaagccattcagggcctttgcctttgttacatttgcagatgatcagattgcgcagtctctttgtggagaggacttgatcattaaaggaatcagcgttcatatatccaatgccgaacctaagcacaatagcaatagacagttagaaagaagtggaagatttggtggtaatccaggtggctttgggaatcaggttcatctcatttcaaatgtttatggaagaagcacttcattgaaagtagtgctgtaaatattctgccataggaatactgtctacatgctttctcattcaagaattcgtcatcacgcatcacaggccgcgtctttgacggtgggtgtccca

SEQ ID NO: 189203 - DNA, 563 bp, Homo sapiens
  Payload ID: 17356
  Gene Symbol: TARDBP
  Gene Name: TAR DNA binding protein
  ENST ID: ENST00000610369
  CDS Start-End: 1-384
tgcaaacttcctaattctaagcaaagccaagatgagcctttgagaagcagaaaagtgtttgtggggcgctgtacagaggacatgactgaggatgagctgcgggagttcttctctcagtacggggatgtgatggatgtcttcatccccaagccattcagggcctttgcctttgttacatttgcagatgatcagattgcgcagtctctttgtggagaggacttgatcattaaaggaatcagcgttcatatatccaatgccgaacctaagcacaatagcaatagacagttagaaagaagtggaagatttggtggtaatccaggaatactgtctacatgctttctcattcaagaattcgtcatcacgcatcacaggccgcgtctttgacggaggacttgaagcagagttcaccagtgagctcaggtgtctcaaagaagggtggaagttctaatgtctgttagctacccataagaatgctgtttgctgcagttctgtgtcctgtgcttggatgctttttataagagttgtcattgttggaaattcttaaataaaactgatttaaataa

SEQ ID NO: 189204 - DNA, 515 bp, Homo sapiens
  Payload ID: 17356
  Gene Symbol: TARDBP
  Gene Name: TAR DNA binding protein
  ENST ID: ENST00000614494
  CDS Start-End: 1-236
gccaagatgagcctttgagaagcagaaaagtgtttgtggggcgctgtacagaggacatgactgaggatgagctgcgggagttcttctctcagtacggggatgtgatggatgtcttcatccccaagccattcagggcctttgcctttgttacatttgcagatgatcagattgcgcagtctctttgtggagaggacttgatcattaaaggaatcagcgttcataaaagtacaatatgaagccttcatttaatctctgcagttcatctcatttcaaatgtttatggaagaagcacttcattgaaagtagtgctgtaaatattctgccataggaatactgtctacatgctttctcattcaagaattcgtcatcacgcatcacaggccgcgtctttgacgccctgaatgcaaagaattcatagcagttaattccccttttttgacccttttgagatggaactttcataaagtttcttggcagtagtttattttgcttcaaataaacttatttgaaaagtt

SEQ ID NO: 189205 - DNA, 920 bp, Homo sapiens
  Payload ID: 17356
  Gene Symbol: TARDBP
  Gene Name: TAR DNA binding protein
  ENST ID: ENST00000616545
  CDS Start-End: 1-906
atgtctgaatatattcgggtaaccgaagatgagaacgatgagcccattgaaataccatcggaagacgatgggacggtgctgctctccacggttacagcccagtttccaggggcgtgtgggcttcgctacaggaatccagtgtctcagtgtatgagaggtgtccggctggtagaaggaattctgcatgccccagatgctggctggggaaatctggtgtatgttgtcaactatccaaaagataacaaaagaaaaatggatgagacagatgcttcatcagcagtgaaagtgaaaagagcagtccagaaaacatccgatttaatagtgttgggtctcccatggaaaacaaccgaacaggacctgaaagagtattttagtacctttggagaagttcttatggtgcaggtcaagaaagatcttaagactggtcattcaaaggggtttggctttgttcgttttacggaatatgaaacacaagtgaaagtaatgtcacagcgacatatgatagatggacgatggtgtgactgcaaacttcctaattctaagcaaagccaagatgagcctttgagaagcagaaaagtgtttgtggggcgctgtacagaggacatgactgaggatgagctgcgggagttcttctctcagtacggggatgtgatggatgtcttcatccccaagccattcagggcctttgcctttgttacatttgcagatgatcagattgcgcagtctctttgtggagaggacttgatcattaaaggaatcagcgttcatatatccaatgccgaacctaagcacaatagcaatagacagttagaaagaagtggaagatttggtggtaatccaggaatactgtctacatgctttctcattcaagaattcgtcatcacgcatcacaggccgcgtctttgacggtgggtgtccca

SEQ ID NO: 189206 - DNA, 1031 bp, Homo sapiens
  Payload ID: 17356
  Gene Symbol: TARDBP
  Gene Name: TAR DNA binding protein
  ENST ID: ENST00000629725
  CDS Start-End: 135-1031
ggtgggcggggggaggaggcggccctagcgccattttgtgggagcgaagcggtggctgggctgcgcttgggtccgtcgctgcttcggtgtccctgtcgggcttcccagcagcggcctagcgggaaaagtaaaagatgtctgaatatattcgggtaaccgaagatgagaacgatgagcccattgaaataccatcggaagacgatgggacggtgctgctctccacggttacagcccagtttccaggggcgtgtgggcttcgctacaggaatccagtgtctcagtgtatgagaggtgtccggctggtagaaggaattctgcatgccccagatgctggctggggaaatctggtgtatgttgtcaactatccaaaagataacaaaagaaaaatggatgagacagatgcttcatcagcagtgaaagtgaaaagagcagtccagaaaacatccgatttaatagtgttgggtctcccatggaaaacaaccgaacaggacctgaaagagtattttagtacctttggagaagttcttatggtgcaggtcaagaaagatcttaagactggtcattcaaaggggtttggctttgttcgttttacggaatatgaaacacaagtgaaagtaatgtcacagcgacatatgatagatggacgatggtgtgactgcaaacttcctaattctaagcaaagccaagatgagcctttgagaagcagaaaagtgtttgtggggcgctgtacagaggacatgactgaggatgagctgcgggagttcttctctcagtacggggatgtgatggatgtcttcatccccaagccattcagggcctttgcctttgttacatttgcagatgatcagattgcgcagtctctttgtggagaggacttgatcattaaaggaatcagcgttcatatatccaatgccgaacctaagcacaatagcaatagacagttagaaagaagtggaagatttggtggtaatccagttcatctcatttcaaatgtttatggaagaagcacttcattgaaagtagtgctgtaa

SEQ ID NO: 189207 - DNA, 2389 bp, Homo sapiens
  Payload ID: 17357
  Gene Symbol: TOE1
  Gene Name: target of EGR1, member 1 (nuclear)
  Uniprot ID: Q96GM8
  ENST ID: ENST00000372090
  CDS Start-End: 584-2116
cgctcttacaccctgggcagcctcctccgatggcccactccccgcctctttcactttctggagatcactgagctctccatcctctctgggaatttaccgatgcccagaacgcccttctttcccccacacgaccctctcctagtctaactcctgggcgtgctttaagctcagctcaggcagcgtcaccttctctggaaagcccaaacccagccaccccactacccgctacccgcggcccacgctgatgaagacagcagaacacggaggccccgcgttcccgccgcgagagcaggagagaaagattacctcccgcgagctctagcgcgcccggctttccggcgcactccagggggcgtggctcgggtccacccgggctgcgagccggcagcacaggccaataggcaattagcgcgcgccaggctgccttccccgcgccggacccgggacgtctgaacggaagttcgacccatcggcgacccgacggcgagaccccgccccatccccgactgcctgaaccgcgccaggagacggaccgcaagtccagcgtacccacagacgactcaggcgggagacgagcggtgtcatggccgccgacagtgacgatggcgcagtttcagctcccgcagcttccgacggtggtgtcagcaaaagcacaacatctggggaggagctagtagtccaggttcccgtagtggatgtgcaaagcaacaacttcaaggagatgtggccatccctcctgctagccataaagacagctaatttcgtggctgtggacacggagctgagtgggcttggggacaggaagagtttgctgaaccagtgcattgaggaacgttacaaggccgtgtgtcatgctgccaggacccgttctatcctttccctgggcctcgcctgcttcaagcggcagccagacaagggtgaacattcctatctggctcaagtgttcaatctcactctgctgtgcatggaggagtatgtcatagaaccaaagtctgtgcagttcctgatacagcatggcttcaacttcaaccagcagtatgcccaaggcatcccctaccataagggcaatgacaagggtgatgagagccagagccagtcagtacggaccctattcctggagctaatccgagcccgccggcccctggtgctacacaatggccttatagacttggtgttcctgtaccagaacttctatgcacacctccctgagagtctgggaaccttcaccgctgacctgtgtgagatgttcccagcaggcatttatgacaccaaatatgctgctgagtttcatgcccgtttcgtggcctcctacttagaatatgccttccggaaatgtgaacgggaaaatgggaagcagcgggcagctggcagcccacaccttaccctggagttctgcaactatccttccagcatgagggaccatattgattaccgctgctgcctgcccccagcaacccaccgtcctcatcccaccagcatctgtgacaacttctcggcttatggctggtgccccctgggaccacagtgtcctcagtctcacgatattgaccttatcattgacactgatgaggctgcggcagaggacaagcggcgacggcgacgacgtagggaaaaacggaagagggctttattgaacctaccggggacacagacctctggggaagctaaggatggtcctcccaagaagcaggtctgtggggatagcatcaagcctgaagaaaccgagcaggaggtggctgccgatgaaactaggaacctgcctcactccaagcaaggcaacaaaaatgacttagagatggggattaaggcagcaaggcctgaaatagctgatagagctacctcagaagtgccagggagccaagccagtcctaacccagtgcctggggatggattgcaccgggctggttttgatgcctttatgacaggttatgtgatggcctatgtggaagtgagccagggaccgcagccctgcagctctggaccctggctccctgaatgccacaataaggtatatttgagtggcaaagctgtacccctcacagtggccaagagccagttctctcgttcctccaaagcccacaatcagaagatgaagctcacttggggcagtagctgatgcaacttccaccttgctctcaggtggaacagaggtattttgggtctctctagcctgaaatgtcatcctcaactgctactgagtttaggggagggggaatgtcttgacagacatcactgcattgccctggaccgcctcctttatcccagtgtttgaggtacaagtaagaaggctgaccagcacctgtaacactgactttatttttaagtctgaaaatgtcttgggaaagttttacaaaaaaaaaaatcaacagaagcaagttatgaaaatatt

SEQ ID NO: 189208 - DNA, 1895 bp, Homo sapiens
  Payload ID: 17358
  Gene Symbol: TOM1L1
  Gene Name: target of myb1 like 1 membrane trafficking protein
  Uniprot ID: O75674
  ENST ID: ENST00000348161
  CDS Start-End: 207-1406
gagtcgggagccggagagcggtggaggcggatttcctgggcccggccctctggcgctaccatggcgtttggcaagagtcaccgggatccctacgcgacctccgtgggccacctcataggccaaaagatgcagtgaaagctttgaagaaaaggatttccaaaaactacaatcataaagaaatccaacttaccttgtcacttattgacatgtgtgtgcagaactgtggtccaagtttccagtctctgattgtgaagaaggaatttgttaaagagaatttagttaagctactgaatcccagatacaacttgccattagacattcagaatagaatcttgaatttcattaagacttggtcacagggcttcccaggaggtgtggatgtaagcgaagtcaaagaagtatacctcgacctggttaagaaaggcgttcagtttcctccctcagaagcagaggctgaaacagcaagacaagagactgctcaaatctcatcaaatcctccaacatctgtccctactgcaccagctctttcttctgtaattgctccaaagaactcgactgttacattggtcccagaacagattggaaaactgcacagtgaattggatatggtgaaaatgaatgtgcgagtgatgtccgccatattgatggagaatactcctgggtctgaaaaccatgaagacatagagcttctgcagaaactctataaaacaggtcgggagatgcaggagaggatcatggacctgcttgtggtggtggagaacgaagatgtaactgttgagctaattcaggtgaatgaggatttgaataatgctatccttggatatgagaggtttactagaaaccaacaaaggattttggagcaaaataagaaccagaaggaagccaccaatactaccagtgagccttctgccccatctcaagatctcctcgacctaagtcccagtccccggatgcctagggccactctgggagaactcaacaccatgaataatcaactttcaggcttaaatttcagccttccaagttctgatgtaacaaacaacttaaaacccagtcttcatccacagatgaacttgctagccttggagaatacagagatacccccgtttgcccaaaggaccagccaaaacctcacctcaagccacgcatatgataattttctggaacattcaaattcagtgtttctacagccagttagtctacaaaccattgcagcagcaccatcaaaccagagtctgccacctttgcccagcaatcatccagcgatgacaaaaagtgatctccagccacctaattactacgaggtaatggagtttgatcccttagctcctgctgtcactacagaagctatttatgaagaaattgatgctcaccagcacaaaggagctcaaaatgatggtgactgagaagaaagtggatgatcagctcactaccacatcaaaggtgccaactctctaaaacgtagactctgtgcagctttgaagcctggaagacaatacctaccaacatgtcaaagccatggtggcacatttctgctataatgaagattaaatagaataacagttccaggataacactgattcctgacaacagcgtgagatttcaacagaacttgtttggaacaaatactcacttaaaacttcagcagaagaaaaattacttagtccttaggccaaccaatttaactgcagtgtcatgtttcacaggccttcctacatttagaaatcgtcacacagctgtgataagagtagattattttactatgaaataattctgaatagatgaaagcataaaatgtgagaaactgaatgtattattcaggaagaatactgagtgccttcatttaactaaagttgaatgtaaaagtcaatttgcacttctttataatcctctgg

SEQ ID NO: 189209 - DNA, 2228 bp, Homo sapiens
  Payload ID: 17358
  Gene Symbol: TOM1L1
  Gene Name: target of myb1 like 1 membrane trafficking protein
  ENST ID: ENST00000445275
  CDS Start-End: 115-1512
agagcccgggaagcgctcgggcgaagaggaggagccaagggtaccgagcgggtggagtcgggagccggagagcggtggaggcggatttcctgggcccggccctctggcgctaccatggcgtttggcaagagtcaccgggatccctacgcgacctccgtgggccacctcatagaaaaggctacatttgctggagttcagactgaagattggggccagttcatgcacatctgtgacataattaacactacccaggatgggccaaaagatgcagtgaaagctttgaagaaaaggatttccaaaaactacaatcataaagaaatccaacttaccttgtcacttattgacatgtgtgtgcagaactgtggtccaagtttccagtctctgattgtgaagaaggaatttgttaaagagaatttagttaagctactgaatcccagatacaacttgccattagacattcagaatagaatcttgaatttcattaagacttggtcacagggcttcccaggaggtgtggatgtaagcgaagtcaaagaagtatacctcgacctggttaagaaaggcgttcagtttcctccctcagaagcagaggctgaaacagcaagacaagagactgctcaaatctcatcaaatcctccaacatctgtccctactgcaccagctctttcttctgtaattgctccaaagaactcgactgttacattggtcccagaacagattggaaaactgcacagtgaattggatatggtgaaaatgaatgtgcgagtgatgtccgccatattgatggagaatactcctgggtctgaaaaccatgaagacatagagcttctgcagaaactctataaaacaggtcgggagatgcaggagaggatcatggacctgcttgtggtggtggagaacgaagatgtaactgttgagctaattcaggtgaatgaggatttgaataatgctatccttggatatgagaggtttactagaaaccaacaaaggattttggagcaaaataagaaccagaaggaagccaccaatactaccagtgagccttctgccccatctcaagatctcctcgacctaagtcccagtccccggatgcctagggccactctgggagaactcaacaccatgaataatcaactttcaggcttaaatttcagccttccaagttctgatgtaacaaacaacttaaaacccagtcttcatccacagatgaacttgctagccttggagaatacagagatacccccgtttgcccaaaggaccagccaaaacctcacctcaagccacgcatatgataatccagttagtctacaaaccattgcagcagcaccatcaaaccagagtctgccacctttgcccagcaatcatccagcgatgacaaaaagtgatctccagccacctaattactacgaggtaatggagtttgatcccttagctcctgctgtcactacagaagctatttatgaagaaattgatgctcaccagcacaaaggagctcaaaatgatggtgactgagaagaaagtggatgatcagctcactaccacatcaaaggtgccaactctctaaaacgtagactctgtgcagctttgaagcctggaagacaatacctaccaacatgtcaaagccatggtggcacatttctgctataatgaagattaaatagaataacagttccaggataacactgattcctgacaacagcgtgagatttcaacagaacttgtttggaacaaatactcacttaaaacttcagcagaagaaaaattacttagtccttaggccaaccaatttaactgcagtgtcatgtttcacaggccttcctacatttagaaatcgtcacacagctgtgataagagtagattattttactatgaaataattctgaatagatgaaagcataaaatgtgagaaactgaatgtattattcaggaagaatactgagtgccttcatttaactaaagttgaatgtaaaagtcaatttgcacttctttataatcctctggtttagaattataaattgttaaaaccttgataattgtcatttaattatatttcaggtgtcctgaacaggtcactagactctacattgggcagcctttaaatatgattctttgtaatgctaaatagcctttttttctctttttactgcaacttaatatttctatttagaacacagaaaatgaaaatatttagaataagttgtacatttgatgacaaataaatcactatt

SEQ ID NO: 189210 - DNA, 1522 bp, Homo sapiens
  Payload ID: 17358
  Gene Symbol: TOM1L1
  Gene Name: target of myb1 like 1 membrane trafficking protein
  Uniprot ID: O75674
  ENST ID: ENST00000536554
  CDS Start-End: 81-1280
ctctggcgctaccatggcgtttggcaagagtcaccgggatccctacgcgacctccgtgggccacctcatagcttattgacatgtgtgtgcagaactgtggtccaagtttccagtctctgattgtgaagaaggaatttgttaaagagaatttagttaagctactgaatcccagatacaacttgccattagacattcagaatagaatcttgaatttcattaagacttggtcacagggcttcccaggaggtgtggatgtaagcgaagtcaaagaagtatacctcgacctggttaagaaaggcgttcagtttcctccctcagaagcagaggctgaaacagcaagacaagagactgctcaaatctcatcaaatcctccaacatctgtccctactgcaccagctctttcttctgtaattgctccaaagaactcgactgttacattggtcccagaacagattggaaaactgcacagtgaattggatatggtgaaaatgaatgtgcgagtgatgtccgccatattgatggagaatactcctgggtctgaaaaccatgaagacatagagcttctgcagaaactctataaaacaggtcgggagatgcaggagaggatcatggacctgcttgtggtggtggagaacgaagatgtaactgttgagctaattcaggtgaatgaggatttgaataatgctatccttggatatgagaggtttactagaaaccaacaaaggattttggagcaaaataagaaccagaaggaagccaccaatactaccagtgagccttctgccccatctcaagatctcctcgacctaagtcccagtccccggatgcctagggccactctgggagaactcaacaccatgaataatcaactttcaggcttaaatttcagccttccaagttctgatgtaacaaacaacttaaaacccagtcttcatccacagatgaacttgctagccttggagaatacagagatacccccgtttgcccaaaggaccagccaaaacctcacctcaagccacgcatatgataattttctggaacattcaaattcagtgtttctacagccagttagtctacaaaccattgcagcagcaccatcaaaccagagtctgccacctttgcccagcaatcatccagcgatgacaaaaagtgatctccagccacctaattactacgaggtaatggagtttgatcccttagctcctgctgtcactacagaagctatttatgaagaaattgatgctcaccagcacaaaggagctcaaaatgatggtgactgagaagaaagtggatgatcagctcactaccacatcaaaggtgccaactctctaaaacgtagactctgtgcagctttgaagcctggaagacaatacctaccaacatgtcaaagccatggtggcacatttctgctataatgaagattaaatagaataacagttccaggataacactgattcctgacaacagcgtgagatttcaacagaacttgtttggaacaaatactcacttaaaacttcagcag

SEQ ID NO: 189211 - DNA, 1524 bp, Homo sapiens
  Payload ID: 17358
  Gene Symbol: TOM1L1
  Gene Name: target of myb1 like 1 membrane trafficking protein
  ENST ID: ENST00000571319
  CDS Start-End: 14-205
ctctggcgctaccatggcgtttggcaagagtcaccgggatccctacgcgacctccgtgggccacctcatagaaaaggctacatttgctggagttcagactgaagattggggccagttcatgcacatctgtgacataattaacactacccaggatggcttattgacatgtgtgtgcagaactgtggtccaagtttccagtctctgattgtgaagaaggaatttgttaaagagaatttagttaagctactgaatcccagatacaacttgccattagacattcagaatagaatcttgaatttcattaagacttggtcacagggcttcccaggaggtgtggatgtaagcgaagtcaaagaagtatacctcgacctggttaagaaaggcgttcagtttcctccctcagaagcagaggctgaaacagcaagacaagagattggaaaactgcacagtgaattggatatggtgaaaatgaatgtgcgagtgatgtccgccatattgatggagaatactcctgggtctgaaaaccatgaagacatagagcttctgcagaaactctataaaacaggtcgggagatgcaggagaggatcatggacctgcttgtggtggtggagaacgaagatgtaactgttgagctaattcaggtgaatgaggatttgaataatgctatccttggatatgagaggtttactagaaaccaacaaaggattttggagcaaaataagaaccagaaggaagccaccaatactaccagtgagccttctgccccatctcaagatctcctcgacctaagtcccagtccccggatgcctagggccactctgggagaactcaacaccatgaataatcaactttcaggcttaaatttcagccttccaagttctgatgtaacaaacaacttaaaacccagtcttcatccacagatgaacttgctagccttggagaatacagagatacccccgtttgcccaaaggaccagccaaaacctcacctcaagccacgcatatgataattttctggaacattcaaattcagtgtttctacagccagttagtctacaaaccattgcagcagcaccatcaaaccagagtctgccacctttgcccagcaatcatccagcgatgacaaaaagtgatctccagccacctaattactacgaggtaatggagtttgatcccttagctcctgctgtcactacagaagctatttatgaagaaattgatgctcaccagcacaaaggagctcaaaatgatggtgactgagaagaaagtggatgatcagctcactaccacatcaaaggtgccaactctctaaaacgtagactctgtgcagctttgaagcctggaagacaatacctaccaacatgtcaaagccatggtggcacatttctgctataatgaagattaaatagaataacagttccaggataacactgattcctgacaacagcgtgagatttcaacagaacttgtttggaacaaatactcacttaaaacttcagcagaagaaaaattacttagtcctta

SEQ ID NO: 189212 - DNA, 2442 bp, Homo sapiens
  Payload ID: 17358
  Gene Symbol: TOM1L1
  Gene Name: target of myb1 like 1 membrane trafficking protein
  Uniprot ID: O75674
  ENST ID: ENST00000570371
  CDS Start-End: 1320-2360
tgagtaaggaagttgataaacggcaacatctgaaatagctactcgccctgaataggcaggtggagaatattagttacacgtgggacaaatcccattatgagacatatcatcacaacaagaatatttcattctagattttagaatcccaggttttggctcactttggtcaagaaaaattataaataattgagttacagataattaaatgttagcctcctggagtgcatggcaattggttttgacctctatattaaaattcacaagaccacggacataagtcaaaacaggtccccttcgtctccctagtcaccatctccagggctaaaaaacagacttgaaatgggtggcagttagactacaggaaacaggatctacaagcaccaggagctcatctatggctatctgacatcgcctggggacacctcactctctggcaggctcctgctggctggagattgttaacatcgccaatcagatgttaattgaatgcaaaggaataggaaataaattctggttctgaaggggcagctggaaaggtgttgggcttctcagattccaacctacattacaaagcaggcctaaagccaagcatactccttgccagaagaaacggaaagcccctctcccgtttttagaatcaggctggaaaacacggctcccagaaggtggggttagaaaacaagagcttgcgaggcggcgccctgtggtccctcgaggaaatagtagagagacaaagagggcctgctcctgggaagccctaaattcgaagccaatccttcctcctagacatgaccacaactttaaagggcagggcgcacacctcccctcccggatctctaggacaaagggcagccaaagaggcgcagagaagaatgacaaggtgcccagcaagcggcaggatcaaagcctgggtctctaattcccaggctggagattctgggctgcctgctcctcctgcacggggcgaaaagcccacctgggatccgagcgggcggccgcgccactctcgcaggctccatacacccgccactacccgcctgtaccacctgcagccggcagcgcagcctcctcgcgggtcccgcagggcgcgctgcaggtgcgctgggcgtcccgaagccccgccctcgcgtccctgccccgcgcccagctcctcacgctcggtgcccgcgccccgcagcggcagcgcagaacgcaccgcctctgccagagcccgggaagcgctcgggcgaagaggaggagccaagggtaccgagcgggtggagtcgggagccggagagcggtggaggcggatttcctgggcccggccctctggcgctaccatggcgtttggcaagagtcaccgggatccctacgcgacctccgtgggccacctcatagaaaaggctacatttgctggagttcagactgaagattggggccagttcatgcacatctgtgacataattaacactacccaggatgggccaaaagatgcagtgaaagctttgaagaaaaggatttccaaaaactacaatcataaagaaatccaacttaccttgtcacttattgacatgtgtgtgcagaactgtggtccaagtttccagtctctgattgtgaagaaggaatttgttaaagagaatttagttaagctactgaatcccagatacaacttgccattagacattcagaatagaatcttgaatttcattaagacttggtcacagggcttcccaggaggtgtggatgtaagcgaagtcaaagaagtatacctcgacctggttaagaaaggcgttcagtttcctccctcagaagcagaggctgaaacagcaagacaagagactgctcaaatctcatcaaatcctccaacatctgtccctactgcaccagctctttcttctgtaattgctccaaagaactcgactgttacattggtcccagaacagattggaaaactgcacagtgaattggatatggtgaaaatgaatgtgcgagtgatgtccgccatattgatggagaatactcctgggtctgaaaaccatgaagacatagagcttctgcagaaactctataaaacaggtcgggagatgcaggagaggatcatggacctgcttgtggtggtggagaacgaagatgtaactgttgagctaattcaggtgaatgaggatttgaataatgctatccttggatatgagaggtttactagaaaccaacaaaggattttggagcaaaataagaaccagaaggaagccaccaatactaccagtgagccttctgccccatctcaagatctcctcgacctaagtcccagtccccggatgcctagggccactctgggagaactcaacaccatgaataatcaactttcaggcttaagtaaataaacactcaggtcttttcagaccagcagaagagcttgatgttaaacagttctccttaattacgtgattaaataccacctaagaa

SEQ ID NO: 189213 - DNA, 754 bp, Homo sapiens
  Payload ID: 17358
  Gene Symbol: TOM1L1
  Gene Name: target of myb1 like 1 membrane trafficking protein
  ENST ID: ENST00000572576
  CDS Start-End: 1-754
caagagtcaccgggatccctacgcgacctccgtgggccacctcatagaaaaggctacatttgctggagttcagactgaagattggggccagttcatgcacatctgtgacataattaacactacccaggatgggccaaaagatgcagtgaaagctttgaagaaaaggatttccaaaaactacaatcataaagaaatccaacttaccttgtcaacttggtcacagggcttcccaggaggtgtggatgtaagcgaagtcaaagaagtatacctcgacctggttaagaaaggcgttcagtttcctccctcagaagcagaggctgaaacagcaagacaagagactgctcaaatctcatcaaatcctccaacatctgtccctactgcaccagctctttcttctgtaattgctccaaagaactcgactgttacattggtcccagaacagattggaaaactgcacagtgaattggatatggtgaaaatgaatgtgcgagtgatgtccgccatattgatggagaatactcctgggtctgaaaaccatgaagacatagagcttctgcagaaactctataaaacaggtcgggagatgcaggagaggatcatggacctgcttgtggtggtggagaacgaagatgtaactgttgagctaattcaggtgaatgaggatttgaataatgctatccttggatatgagaggtttactagaaaccaacaaaggattttggagcaaaataagaaccagaaggaagccaccaat

SEQ ID NO: 189214 - DNA, 1849 bp, Homo sapiens
  Payload ID: 17358
  Gene Symbol: TOM1L1
  Gene Name: target of myb1 like 1 membrane trafficking protein
  Uniprot ID: O75674
  ENST ID: ENST00000575333
  CDS Start-End: 10-1050
ggcgctaccatggcgtttggcaagagtcaccgggatccctacgcgacctccgtgggccacctcatagaaaaggctacatttgctggagttcagactgaagattggggccagttcatgcacatctgtgacataattaacactacccaggatgggccaaaagatgcagtgaaagctttgaagaaaaggatttccaaaaactacaatcataaagaaatccaacttaccttgtcacttattgacatgtgtgtgcagaactgtggtccaagtttccagtctctgattgtgaagaaggaatttgttaaagagaatttagttaagctactgaatcccagatacaacttgccattagacattcagaatagaatcttgaatttcattaagacttggtcacagggcttcccaggaggtgtggatgtaagcgaagtcaaagaagtatacctcgacctggttaagaaaggcgttcagtttcctccctcagaagcagaggctgaaacagcaagacaagagactgctcaaatctcatcaaatcctccaacatctgtccctactgcaccagctctttcttctgtaattgctccaaagaactcgactgttacattggtcccagaacagattggaaaactgcacagtgaattggatatggtgaaaatgaatgtgcgagtgatgtccgccatattgatggagaatactcctgggtctgaaaaccatgaagacatagagcttctgcagaaactctataaaacaggtcgggagatgcaggagaggatcatggacctgcttgtggtggtggagaacgaagatgtaactgttgagctaattcaggtgaatgaggatttgaataatgctatccttggatatgagaggtttactagaaaccaacaaaggattttggagcaaaataagaaccagaaggaagccaccaatactaccagtgagccttctgccccatctcaagatctcctcgacctaagtcccagtccccggatgcctagggccactctgggagaactcaacaccatgaataatcaactttcaggcttaagtaaataaacactcaggtcttttcagaccagcagaagagcttgatgttaaacagttctccttaattacgtgattaaataccacctaagaaggactgaagtcaggttgaatgtcagagcgctatgttaggagatgtgattacttcccggcaaatggttgagtcaaacccagtatagcaatgggatgtgtctgggcgaggaggtccttgaaactcatcctactcacttagaatctcatggaattcacctggcctgctttgtagaagttgttcagcccaatggccaatacttaaagtctactgtgaacctacacactattatcattgggtttttctgctatacctcagcatcaggtaagggagtatctctgatgcaagcggagaaattcagggattacaaggtatgaactgagtggttgtgaaatgtagaaggaaaaacacaggctttaaagtcagagaagtccaagttgaaatgccagttctgccacctctcagccacctaacttttgagagtctcactttataaaatgggaacaatgattgccttaaagggtggttgtcaaggttaacaaactaatgtttataaaatgcattgtagcaaagcttacaatgcattttataaacatttataaaagagttacctatcttacctgttatcttctgctgtccttattcccagcaagggtttggcaaattacaaaataaggatgatgaaaaatgctgaaatccagttttgtcaaattaaaagcagtttgtttttctcatatgtcatctgctgtttccggagtaaaaatattcagtatcactgaa

SEQ ID NO: 189215 - DNA, 567 bp, Homo sapiens
  Payload ID: 17358
  Gene Symbol: TOM1L1
  Gene Name: target of myb1 like 1 membrane trafficking protein
  ENST ID: ENST00000572298
  CDS Start-End: 248-567
ctctggcgctaccatggcgtttggcaagagtcaccgggatccctacgcgacctccgtgggccacctcataggctacatttgctggagttcagactgaagattggggccagttcatgcacatctgtgacataattaacactacccaggatgggccaaaagatgcagtgaaagctttgaagaaaaggatttccaaaaactacaatcataaagaaatccaacttaccttgtcatcacgttgcttattgacatgtgtgtgcagaactgtggtccaagtttccagtctctgattgtgaagaaggaatttgttaaagagaatttagttaagctactgaatcccagatacaacttgccattagacattcagaatagaatcttgaatttcattaagacttggtcacagggcttcccaggaggtgtggatgtaagcgaagtcaaagaagtatacctcgacctggttaagaaaggcgttcagtttcctccctcagaagcagaggctgaaacagcaagacaagagactgctcaaatctcatcaaatcctccaacatctgtccctactgcaccagctct

SEQ ID NO: 189216 - DNA, 1026 bp, Homo sapiens
  Payload ID: 17358
  Gene Symbol: TOM1L1
  Gene Name: target of myb1 like 1 membrane trafficking protein
  ENST ID: ENST00000570965
  CDS Start-End: 145-261
agcggcagcgcagaacgcaccgcctctgccagagcccgggaagcgctcgggcgaagaggaggagccaagggtaccgagcgggtggagtcgggagccggagagcggtggaggcggatttcctgggcccggccctctggcgctaccatggcgtttggcaagagtcaccgggatccctacgcgacctccgtgggccacctcatagctcagactcaacagctttttcttggcagaaaaggctacatttgctggagttcagactgaagattggggccagttcatgcacatctgtgacataattaacactacccaggatgggccaaaagatgcagtgaaagctttgaagaaaaggatttccaaaaactacaatcataaagaaatccaacttaccttgtcacttattgacatgtgtgtgcagaactgtggtccaagtttccagtctctgattgtgaagaaggaatttgttaaagagaatttagttaagctactgaatcccagatacaacttgccattagacattcagaatagaatcttgaatttcattaagacttggtcacagggcttcccaggaggtgtggatgtaagcgaagtcaaagaagtatacctcgacctggttaagaaaggcgttcagtttcctccctcagaagcagaggctgaaacagcaagacaagagactgctcaaatctcatcaaatcctccaacatctgtccctactgcaccagctctttcttctgtaattgctccaaagaactcgactgttacattggtcccagaacagattggaaaactgcacagtgaattggatatggtgaaaatgaatgtgcgagtgatgtccgccatattgatggagaatactcctgggtctgaaaaccatgaagacatagagcttctgcagaaactctataaaacaggtcgggagatgcaggagaggatcatggacctgcttgtggtggtggagaacgaagatgtaactgttgagctaattcaggtgaatgaggatttgaataatgctatccttggatatgagag

SEQ ID NO: 189217 - DNA, 708 bp, Homo sapiens
  Payload ID: 17358
  Gene Symbol: TOM1L1
  Gene Name: target of myb1 like 1 membrane trafficking protein
  ENST ID: ENST00000575909
  CDS Start-End: 21-708
aaaaatgtaccttcctttcgatgccgcctggggagtggaaccaaacagaaaaggctacatttgctggagttcagactgaagattggggccagttcatgcacatctgtgacataattaacactacccaggatgggccaaaagatgcagtgaaagctttgaagaaaaggatttccaaaaactacaatcataaagaaatccaacttaccttgtcacttattgacatgtgtgtgcagaactgtggtccaagtttccagtctctgattgtgaagaaggaatttgttaaagagaatttagttaagctactgaatcccagatacaacttgccattagacattcagaatagaatcttgaatttcattaagacttggtcacagggcttcccaggaggtgtggatgtaagcgaagtcaaagaagtatacctcgacctggttaagaaaggcgttcagtttcctccctcagaagcagaggctgaaacagcaagacaagagactgctcaaatctcatcaaatcctccaacatctgtccctactgcaccagctctttcttctgtaattgctccaaagaactcgactgttacattggtcccagaacagattggaaaactgcacagtgaattggatatggtgaaaatgaatgtgcgagtgatgtccgccatattgatggagaatactcctgggtctgaaaaccatgaagacatagagcttctgc

SEQ ID NO: 189218 - DNA, 576 bp, Homo sapiens
  Payload ID: 17358
  Gene Symbol: TOM1L1
  Gene Name: target of myb1 like 1 membrane trafficking protein
  ENST ID: ENST00000572360
  CDS Start-End: 4-282
accatggcgtttggcaagagtcaccgggatccctacgcgacctccgtgggccacctcatagaaaaggctacatttgctggagttcagactgaagattggggccagttcatgcacatctgtgacataattaacactacccaggatgggccaaaagatgcagtgaaagctttgaagaaaaggatttccaaaaactacaatcataaagaaatccaacttaccttgtcatcacgttgcttattgacatgtgtgtgcagaactgtggtccaagtttccagtctctgattgtgaagaaggaatttgttaaagagaatttagttaagctactgaatcccagatacaacttgccattagacattcagaatagaatcttgaatttcattaagacttggtcacagggcttcccaggaggtgtggatgtaagcgaagtcaaagaagtatacctcgacctggttaagaaaggcgttcagtttcctccctcagaagcagaggctgaaacagcaagacaagagactgctcaaatctcatcaaatcctccaacatctgtccctactgcaccagctctttcttctgtaattg

SEQ ID NO: 189219 - DNA, 2337 bp, Homo sapiens
  Payload ID: 17358
  Gene Symbol: TOM1L1
  Gene Name: target of myb1 like 1 membrane trafficking protein
  ENST ID: ENST00000572405
  CDS Start-End: 133-810
ggatttcctgggcccggccctctggcgctaccatggcgtttggcaagagtcaccgggatccctacgcgacctccgtgggccacctcataggctacatttgctggagttcagactgaagattggggccagttcatgcacatctgtgacataattaacactacccaggatgggccaaaagatgcagtgaaagctttgaagaaaaggatttccaaaaactacaatcataaagaaatccaacttaccttgtcacttattgacatgtgtgtgcagaactgtggtccaagtttccagtctctgattgtgaagaaggaatttgttaaagagaatttagttaagctactgaatcccagatacaacttgccattagacattcagaatagaatcttgaatttcattaagacttggtcacagggcttcccaggaggtgtggatgtaagcgaagtcaaagaagtatacctcgacctggttaagaaaggcgttcagtttcctccctcagaagcagaggctgaaacagcaagacaagagactgctcaaatctcatcaaatcctccaacatctgtccctactgcaccagctctttcttctgtaattgctccaaagaactcgactgttacattggtcccagaacagattggaaaactgcacagtgaattggatatggtgaaaatgaatgtgcgagtgatgtccgccatattgatggagaatactcctgggtctgaaaaccatgaagacatagagcttctgcaggtgttgtacgatttcagggactatcagtcaaagtgtctcttaaagttattctctaaactttgagtttggagatggaagacaccttaatattgtctagtacatcctcctacatcctgatttcagttgatttctaaacttaacaaaaatatccaagaatgactttgtcagaaatgcagtagtaacttagacatggtttttagcctcttgcaacaaataatttattataagttataaccttggtcatgtacaatcaattctctagttgttttaagtatgtaaaaattgcctctattttcatccactcaacaaacattgagtaactgtgatataggaagggatgtagaaatgagaaggaggctattctagtccttaagagtttatgcctaatgagcaagattggtttgtaaacaacaaacataatgaagtattatagatactgtagtataaatttgttcagtatatggtgggatcatgggtggggagaaggagagatgtgaggtttttaagaatggtctagatggaggcaatgctcgagctatagaggaacaagtagacagggcatttagacctgcatgagtagttctacagccctcctatgccttctgctatgtctgtgtatacatatactttatttttccctctaccagtttgctcttctaattattttaaattttaaaacttattaattttagaagcagttagaaaaaaaaatcagtttctagtttctaagtccctttgttgccaagttaagaagcttaagatatttttacttttctcagattcccactcgccacctctcatgttatttttcctttaacttcttagattgttagtaaataactttttccttgctcatttcttatttgggaaacaaaaaaattgtaaaaattttcccaacaatgtttcttagatatcactgctgtcgtgaatagtttgttttttccttgctgcagtacacccatgttggtaaactttggtgcaaactttgagtgcttgcatatccaaaaatgtcctctgattgtcatgttaaatgcaggttagtttagctagatataaaattctaggcacaaaattctaggcctttgaagatactgcttcactgttctcttacacccactaatgctgatagaagtattatattattctgcttcttaatcctttgattaataatatttttttctagttgcatttgttatttttctacgttaatatttcagaaattgtactgttccctctgaagagatatatgtacatgtgtgcagatgtttgtttaacttacttatcttccttagtagatgataggcttttttgccttatcaacttatgtgtatttttaattctaggaattctcagctcctactttaaatattgactttctaccattctttctattctcttcttatggaactttaagacgatgaaacttccagttggattcatttgtctcttaacatttcttttatacttttcatttcttcattctaagttctgggataatttctctgtttaatgtatttctctaaaacttgtaattgagttgcttattcagtccttctaataaatgtttcaacaatttctttctattaaaaa

SEQ ID NO: 189220 - DNA, 2507 bp, Homo sapiens
  Payload ID: 17358
  Gene Symbol: TOM1L1
  Gene Name: target of myb1 like 1 membrane trafficking protein
  Uniprot ID: O75674
  ENST ID: ENST00000575882
  CDS Start-End: 354-1784
aaaagcccacctgggatccgagcgggcggccgcgccactctcgcaggctccatacacccgccactacccgcctgtaccacctgcagccggcagcgcagcctcctcgcgggtcccgcagggcgcgctgcaggtgcgctgggcgtcccgaagccccgccctcgcgtccctgccccgcgcccagctcctcacgctcggtgcccgcgccccgcagcggcagcgcagaacgcaccgcctctgccagagcccgggaagcgctcgggcgaagaggaggagccaagggtaccgagcgggtggagtcgggagccggagagcggtggaggcggatttcctgggcccggccctctggcgctaccatggcgtttggcaagagtcaccgggatccctacgcgacctccgtgggccacctcatagaaaaggctacatttgctggagttcagactgaagattggggccagttcatgcacatctgtgacataattaacactacccaggatgggccaaaagatgcagtgaaagctttgaagaaaaggatttccaaaaactacaatcataaagaaatccaacttaccttgtcacttattgacatgtgtgtgcagaactgtggtccaagtttccagtctctgattgtgaagaaggaatttgttaaagagaatttagttaagctactgaatcccagatacaacttgccattagacattcagaatagaatcttgaatttcattaagacttggtcacagggcttcccaggaggtgtggatgtaagcgaagtcaaagaagtatacctcgacctggttaagaaaggcgttcagtttcctccctcagaagcagaggctgaaacagcaagacaagagactgctcaaatctcatcaaatcctccaacatctgtccctactgcaccagctctttcttctgtaattgctccaaagaactcgactgttacattggtcccagaacagattggaaaactgcacagtgaattggatatggtgaaaatgaatgtgcgagtgatgtccgccatattgatggagaatactcctgggtctgaaaaccatgaagacatagagcttctgcagaaactctataaaacaggtcgggagatgcaggagaggatcatggacctgcttgtggtggtggagaacgaagatgtaactgttgagctaattcaggtgaatgaggatttgaataatgctatccttggatatgagaggtttactagaaaccaacaaaggattttggagcaaaataagaaccagaaggaagccaccaatactaccagtgagccttctgccccatctcaagatctcctcgacctaagtcccagtccccggatgcctagggccactctgggagaactcaacaccatgaataatcaactttcaggcttaaatttcagccttccaagttctgatgtaacaaacaacttaaaacccagtcttcatccacagatgaacttgctagccttggagaatacagagatacccccgtttgcccaaaggaccagccaaaacctcacctcaagccacgcatatgataattttctggaacattcaaattcagtgtttctacagccagttagtctacaaaccattgcagcagcaccatcaaaccagagtctgccacctttgcccagcaatcatccagcgatgacaaaaagtgatctccagccacctaattactacgaggtaatggagtttgatcccttagctcctgctgtcactacagaagctatttatgaagaaattgatgctcaccagcacaaaggagctcaaaatgatggtgactgagaagaaagtggatgatcagctcactaccacatcaaaggtgccaactctctaaaacgtagactctgtgcagctttgaagcctggaagacaatacctaccaacatgtcaaagccatggtggcacatttctgctataatgaagattaaatagaataacagttccaggataacactgattcctgacaacagcgtgagatttcaacagaacttgtttggaacaaatactcacttaaaacttcagcagaagaaaaattacttagtccttaggccaaccaatttaactgcagtgtcatgtttcacaggccttcctacatttagaaatcgtcacacagctgtgataagagtagattattttactatgaaataattctgaatagatgaaagcataaaatgtgagaaactgaatgtattattcaggaagaatactgagtgccttcatttaactaaagttgaatgtaaaagtcaatttgcacttctttataatcctctggtttagaattataaattgttaaaaccttgataattgtcatttaattatatttcaggtgtcctgaacaggtcactagactctacattgggcagcctttaaatatgattctttgtaatgctaaatagcctttttttctctttttactgcaacttaatatttctatttagaacacagaaaatgaaaatatttagaataagttgtacatttgatgacaaataaatcactattaaaacaa

SEQ ID NO: 189221 - DNA, 596 bp, Homo sapiens
  Payload ID: 17358
  Gene Symbol: TOM1L1
  Gene Name: target of myb1 like 1 membrane trafficking protein
  ENST ID: ENST00000570499
  CDS Start-End: 1-596
cgtttggcaagagtcaccgggatccctacgcgacctccgtgggccacctcatagaaaaggctacatttgctggagttcagactgaagattggggccagttcatgcacatctgtgacataattaacactacccaggatgggccaaaagatgcagtgaaagctttgaagaaaaggatttccaaaaactacaatcataaagaaatccaacttaccttgtcacttattgacatgtgtgtgcagaactgtggtccaagtttccagtctctgattgtgaagaaggaatttgttaaagagaatttagttaagctactgaatcccagatacaacttgccattagacattcagaatagaatcttgaatttcattaagacttggtcacagggcttcccaggaggtgtggatgtaagcgaagtcaaagaagtatacctcgacctggttaagaaaggcgttcagtttcctccctcagaagcagaggctgaaacagcaagacaagagattggaaaactgcacagtgaattggatatggtgaaaatgaatgtgcgagtgatgtccgccatattgatggagaatactcctgggtctgaaaaccatgaagac

SEQ ID NO: 189222 - DNA, 1521 bp, Homo sapiens
  Payload ID: 17358
  Gene Symbol: TOM1L1
  Gene Name: target of myb1 like 1 membrane trafficking protein
  ENST ID: ENST00000572158
  CDS Start-End: 31-1440
atttcctgggcccggccctctggcgctaccatggcgtttggcaagagtcaccgggatccctacgcgacctccgtgggccacctcatagaaaaggctacatttgctggagttcagactgaagattggggccagttcatgcacatctgtgacataattaacactacccaggatgggccaaaagatgcagtgaaagctttgaagaaaaggatttccaaaaactacaatcataaagaaatccaacttaccttgtcaaactgtggtccaagtttccagtctctgattgtgaagaaggaatttgttaaagagaatttagttaagctactgaatcccagatacaacttgccattagacattcagaatagaatcttgaatttcattaagacttggtcacagggcttcccaggaggtgtggatgtaagcgaagtcaaagaagtatacctcgacctggttaagaaaggcgttcagtttcctccctcagaagcagaggctgaaacagcaagacaagagactgctcaaatctcatcaaatcctccaacatctgtccctactgcaccagctctttcttctgtaattgctccaaagaactcgactgttacattggtcccagaacagattggaaaactgcacagtgaattggatatggtgaaaatgaatgtgcgagtgatgtccgccatattgatggagaatactcctgggtctgaaaaccatgaagacatagagcttctgcagaaactctataaaacaggtcgggagatgcaggagaggatcatggacctgcttgtggtggtggagaacgaagatgtaactgttgagctaattcaggtgaatgaggatttgaataatgctatccttggatatgagaggtttactagaaaccaacaaaggattttggagcaaaataagaaccagaaggaagccaccaatactaccagtgagccttctgccccatctcaagatctcctcgacctaagtcccagtccccggatgcctagggccactctgggagaactcaacaccatgaataatcaactttcaggcttaaatttcagccttccaagttctgatgtaacaaacaacttaaaacccagtcttcatccacagatgaacttgctagccttggagaatacagagatacccccgtttgcccaaaggaccagccaaaacctcacctcaagccacgcatatgataattttctggaacattcaaattcagtgtttctacagccagttagtctacaaaccattgcagcagcaccatcaaaccagagtctgccacctttgcccagcaatcatccagcgatgacaaaaagtgatctccagccacctaattactacgaggtaatggagtttgatcccttagctcctgctgtcactacagaagctatttatgaagaaattgatgctcaccagcacaaaggagctcaaaatgatggtgactgagaagaaagtggatgatcagctcactaccacatcaaaggtgccaactctctaaaacgtagactctgtgcagctttgaagcct

SEQ ID NO: 189223 - DNA, 556 bp, Homo sapiens
  Payload ID: 17358
  Gene Symbol: TOM1L1
  Gene Name: target of myb1 like 1 membrane trafficking protein
  ENST ID: ENST00000573607
  CDS Start-End: 191-556
ttggccaactcactgtagaacctcagtcctcaaaaatgtaccttcctttcgatgccgcctggggagtggaaccaaacaggtgaaccgcgggagtcaggcatggagtgtttgggcctccacgaggagacaccagaaacttctcgaaaaggctacatttgctggagttcagactgaagattggggccagttcatgcacatctgtgacataattaacactacccaggatgggccaaaagatgcagtgaaagctttgaagaaaaggatttccaaaaactacaatcataaagaaatccaacttaccttgtcacttattgacatgtgtgtgcagaactgtggtccaagtttccagtctctgattgtgaagaaggaatttgttaaagagaatttagttaagctactgaatcccagatacaacttgccattagacattcagaatagaatcttgaatttcattaagacttggtcacagggcttcccaggaggtgtggatgtaagcgaagtcaaagaagtatacctcgacctggttaagaaaggcgttcagtttcctccctcagaa

SEQ ID NO: 189224 - DNA, 1252 bp, Homo sapiens
  Payload ID: 17358
  Gene Symbol: TOM1L1
  Gene Name: target of myb1 like 1 membrane trafficking protein
  ENST ID: ENST00000576932
  CDS Start-End: 100-1080
ggatttcctgggcccggccctctggcgctaccatggcgtttggcaagagtcaccgggatccctacgcgacctccgtgggccacctcatagcttattgacatgtgtgtgcagaactgtggtccaagtttccagtctctgattgtgaagaaggaatttgttaaagagaatttagttaagctactgaatcccagatacaacttgccattagacattcagaatagaatcttgaatttcattaagacttggtcacagggcttcccaggaggtgtggatgtaagcgaagtcaaagaagtatacctcgacctggttaagaaaggcgttcagtttcctccctcagaagcagaggctgaaacagcaagacaagagactgctcaaatctcatcaaatcctccaacatctgtccctactgcaccagctctttcttctgtaattgctccaaagaactcgactgttacattggtcccagaacagattggaaaactgcacagtgaattggatatggtgaaaatgaatgtgcgagtgatgtccgccatattgatggagaatactcctgggtctgaaaaccatgaagacatagagcttctgcagaaactctataaaacaggtcgggagatgcaggagaggatcatggacctgcttgtggtggtggagaacgaagatgtaactgttgagctaattcaggtgaatgaggatttgaataatgctatccttggatatgagaggtttactagaaaccaacaaaggattttggagcaaaataagaaccagaaggaagccaccaatactaccagtgagccttctgccccatctcaagatctcctcgacctaagtcccagtccccggatgcctagggccactctgggagaactcaacaccatgaataatcaactttcaggcttaaatttcagccttccaagttctgatgtaacaaacaacttaaaacccagtcttcatccacagatgaacttgctagccttggagaatacagagataccccctagagacctggttttaccatgttggccaggctgtggtctcaaactcctgacctacggtgatctgcccacctcggcttcctgaagtgctgggattacaggcatgagccactgtgcccggctcataggccatatttatgacccatttactaacaggcaacaagctaagaagtatagaaatgcttactaattacttaacctatgaggtttgcccaaaggaccagccaaaacctcacctcaagccacgcatatgataa

SEQ ID NO: 189225 - DNA, 552 bp, Homo sapiens
  Payload ID: 17358
  Gene Symbol: TOM1L1
  Gene Name: target of myb1 like 1 membrane trafficking protein
  ENST ID: ENST00000574318
  CDS Start-End: 1-377
atttcagccttccaagttctgatgtaacaaacaacttaaaacccagtcttcatccacagatgaacttgctagccttggagaatacagagatacccccgtttgcccaaaggaccagccaaaacctcacctcaagccacgcatatgataattttctggaacattcaaattcagtgtttctacagccagttagtctacaaaccattgcagcagcaccatcaaaccagagtctgccacctttgcccagcaatcatccagcgatgacaaaaagtgatctccagccacctaattactacgaggtaatggagtttgatcccttagctcctgctgtcactacagagtatattttccagctacagacatatgtaagacgcatataaagaattgaatgggcctggcatggtggcttatgcctctaatcccaacattttgagaggctgaagtggaaggatcacttgaacctgggaggtcgaagctgcaataagccatgattgcaccactgcactccagcctgggtgacagtgaccctgtctcaaaaaaaagaaaaaagaaaaa

SEQ ID NO: 189226 - DNA, 2259 bp, Homo sapiens
  Payload ID: 17359
  Gene Symbol: TOM1L2
  Gene Name: target of myb1 like 2 membrane trafficking protein
  Uniprot ID: Q6ZVM7
  ENST ID: ENST00000318094
  CDS Start-End: 85-1473
agtcaggacgggagtccggcgggttacagcggaggcctaggtggcagacagggggcccgggccgctgcgtgttgtccacccaagatggagttcctcctggggaacccgttcagcacaccagtggggcagtgcctcgaaaaggcaacagatggctccctgcaaagtgaggattggacgttgaatatggagatctgtgacatcatcaatgagacggaggaagggccaaaggatgccattcgagccctgaagaagcggctcaacgggaaccggaactacagagaggtgatgctggcattaacagtgctggagacatgtgtgaagaactgtggccaccgcttccacatccttgtggccaaccgagatttcatcgacagtgttctggtcaaaattatatctcccaagaacaaccctcccaccattgtacaggacaaagtgcttgctctgatccagagtgtccctgaagtggatccagctgcgaccatgcccaggtcccaatcacagcagaggacaagtgctggttcctattcctcgccgcctcctgctccctactccgcaccgcaggccccagctctgagtgtgactggccccatcacagccaattcagaacagattgccaggctgcggagtgaactggacgtcgttcgaggaaacacaaaagtcatgtctgagatgttaacagaaatggtccctggacaggaggattcatctgatctggagttgctgcaggagctcaacaggacctgtcgggccatgcagcagcgcatcgtggagctcatctcccgcgtgtccaatgaggaggtcaccgaggagctgctgcatgtgaacgatgacctcaacaacgtcttccttcgatacgagaggttcgaacgatacaggtctggccgatccgttcaaaatgccagtaatggagtactgaatgaagtaaccgaagacaacttaatagacctggggccagggtctccagccgtggtgagcccaatggtggggaacacagcgcccccatcttccctctcctcccagcttgcaggcttagacttggggacagagagcgtcagtggcaccctcagttcactccagcaatgtaatccccgtgacggctttgacatgtttgcccagacgagaggaaactccttggctgagcagcgcaagacggtaacctatgaggatcctcaggctgtcggaggacttgcttctgcactagacaatcgaaaacagagttcagaagggatccccgttgcgcagccatctgtcatggacgacattgaggtgtggctcaggaccgacctgaagggtgatgatctggaggagggtgtcacaagtgaagagtttgataaattccttgaagaaagagccaaagctgctgaaatggttcccgacctcccctcgccccccatggaggctcctgccccagcctcaaacccttctggccggaagaagccagagcggtcagaggatgccctcttcgccctgtgagcagctctgtggtttgcctccccagatggcgggtccccgctcgcaccccgtggacaccgggcactggccactcctacatccccagctccacacggcctgcacacctgtgtttccatggaaatgccaccgtgtctgctcccaggcctcccactagtcaggaccagcttcagccacttcttttctctgagtggtgggacaactgcagccagagactctctcccctcccaccatgggcccctctgcccatgtttcctcccaggaagagcgggcagagtggcccagccccaggcagtgcttcctgagcagaccacccggactgtctttcctccacccgcccatggagaaagagcacgcccggccccgccctgtgctcacctctgcctggctcagcgaccttctcaggcattctgccctcctgggcccctctctccctgaaggggctttgtggcatctctggaagagcagggtgtgctgcactcatgggcctggtctcactccttggacttgtcaccttgtgacatttggcttatcagcatttgagaaggctctgctgggtctccatggtgggggtctctcaccttcttgaccctctctccatcattcagctgccagcccaggcttcacacccaagctggctcagcagccgagcctggcaccgagggtccctgcaggctccctgggcagggagagggccaaggacaattgggagggcagcaggcagcccgcagatggtggccatgtggcacgctgctgagacgacactaccaataaaccaaactgccacgc

SEQ ID NO: 189227 - DNA, 2418 bp, Homo sapiens
  Payload ID: 17359
  Gene Symbol: TOM1L2
  Gene Name: target of myb1 like 2 membrane trafficking protein
  Uniprot ID: Q6ZVM7
  ENST ID: ENST00000379504
  CDS Start-End: 85-1608
agtcaggacgggagtccggcgggttacagcggaggcctaggtggcagacagggggcccgggccgctgcgtgttgtccacccaagatggagttcctcctggggaacccgttcagcacaccagtggggcagtgcctcgaaaaggcaacagatggctccctgcaaagtgaggattggacgttgaatatggagatctgtgacatcatcaatgagacggaggaagggccaaaggatgccattcgagccctgaagaagcggctcaacgggaaccggaactacagagaggtgatgctggcattaacagtgctggagacatgtgtgaagaactgtggccaccgcttccacatccttgtggccaaccgagatttcatcgacagtgttctggtcaaaattatatctcccaagaacaaccctcccaccattgtacaggacaaagtgcttgctctgatccaggcatgggctgatgcctttcgaagcagtcctgatctcaccggcgttgtgcacatatatgaggagctgaagaggaaaggggttgaatttcccatggcagacttggacgctctgtctcccatacacacaccacagcggagtgtccctgaagtggatccagctgcgaccatgcccaggtcccaatcacagcagaggacaagtgctggttcctattcctcgccgcctcctgctccctactccgcaccgcaggccccagctctgagtgtgactggccccatcacagccaattcagaacagattgccaggctgcggagtgaactggacgtcgttcgaggaaacacaaaagtcatgtctgagatgttaacagaaatggtccctggacaggaggattcatctgatctggagttgctgcaggagctcaacaggacctgtcgggccatgcagcagcgcatcgtggagctcatctcccgcgtgtccaatgaggaggtcaccgaggagctgctgcatgtgaacgatgacctcaacaacgtcttccttcgatacgagaggttcgaacgatacaggtctggccgatccgttcaaaatgccagtaatggagtactgaatgaagtaaccgaagacaacttaatagacctggggccagggtctccagccgtggtgagcccaatggtggggaacacagcgcccccatcttccctctcctcccagcttgcaggcttagacttggggacagagagcgtcagtggcaccctcagttcactccagcaatgtaatccccgtgacggctttgacatgtttgcccagacgagaggaaactccttggctgagcagcgcaagacggtaacctatgaggatcctcaggctgtcggaggacttgcttctgcactagacaatcgaaaacagagttcagaagggatccccgttgcgcagccatctgtcatggacgacattgaggtgtggctcaggaccgacctgaagggtgatgatctggaggagggtgtcacaagtgaagagtttgataaattccttgaagaaagagccaaagctgctgaaatggttcccgacctcccctcgccccccatggaggctcctgccccagcctcaaacccttctggccggaagaagccagagcggtcagaggatgccctcttcgccctgtgagcagctctgtggtttgcctccccagatggcgggtccccgctcgcaccccgtggacaccgggcactggccactcctacatccccagctccacacggcctgcacacctgtgtttccatggaaatgccaccgtgtctgctcccaggcctcccactagtcaggaccagcttcagccacttcttttctctgagtggtgggacaactgcagccagagactctctcccctcccaccatgggcccctctgcccatgtttcctcccaggaagagcgggcagagtggcccagccccaggcagtgcttcctgagcagaccacccggactgtctttcctccacccgcccatggagaaagagcacgcccggccccgccctgtgctcacctctgcctggctcagcgaccttctcaggcattctgccctcctgggcccctctctccctgaaggggctttgtggcatctctggaagagcagggtgtgctgcactcatgggcctggtctcactccttggacttgtcaccttgtgacatttggcttatcagcatttgagaaggctctgctgggtctccatggtgggggtctctcaccttcttgaccctctctccatcattcagctgccagcccaggcttcacacccaagctggctcagcagccgagcctggcaccgagggtccctgcaggctccctgggcagggagagggccaaggacaattgggagggcagcaggcagcccgcagatggtggccatgtggcacgctgctgagacgacactaccaataaaccaaactgccacgcacacactgcaggctcacacccgca

SEQ ID NO: 189228 - DNA, 1766 bp, Homo sapiens
  Payload ID: 17359
  Gene Symbol: TOM1L2
  Gene Name: target of myb1 like 2 membrane trafficking protein
  Uniprot ID: Q6ZVM7
  ENST ID: ENST00000395739
  CDS Start-End: 92-1480
aagtgtcagtcaggacgggagtccggcgggttacagcggaggcctaggtggcagacagggggcccgggccgctgcgtgttgtccacccaagatggagttcctcctggggaacccgttcagcacaccagtggggcagtgcctcgaaaaggcaacagatggctccctgcaaagtgaggattggacgttgaatatggagatctgtgacatcatcaatgagacggaggaagggccaaaggatgccattcgagccctgaagaagcggctcaacgggaaccggaactacagagaggtgatgctggcattaacagtgctggagacatgtgtgaagaactgtggccaccgcttccacatccttgtggccaaccgagatttcatcgacagtgttctggtcaaaattatatctcccaagaacaaccctcccaccattgtacaggacaaagtgcttgctctgatccagagtgtccctgaagtggatccagctgcgaccatgcccaggtcccaatcacagcagaggacaagtgctggttcctattcctcgccgcctcctgctccctactccgcaccgcaggccccagctctgagtgtgactggccccatcacagccaattcagaacagattgccaggctgcggagtgaactggacgtcgttcgaggaaacacaaaagtcatgtctgagatgttaacagaaatggtccctggacaggaggattcatctgatctggagttgctgcaggagctcaacaggacctgtcgggccatgcagcagcgcatcgtggagctcatctcccgcgtgtccaatgaggaggtcaccgaggagctgctgcatgtgaacgatgacctcaacaacgtcttccttcgatacgagaggttcgaacgatacaggtctggccgatccgttcaaaatgccagtaatggagtactgaatgaagtaaccgaagacaacttaatagacctggggccagggtctccagccgtggtgagcccaatggtggggaacacagcgcccccatcttccctctcctcccagcttgcaggcttagacttggggacagagagcgtcagtggcaccctcagttcactccagcaatgtaatccccgtgacggctttgacatgtttgcccagacgagaggaaactccttggctgagcagcgcaagacggtaacctatgaggatcctcaggctgtcggaggacttgcttctgcactagacaatcgaaaacagagttcagaagggatccccgttgcgcagccatctgtcatggacgacattgaggtgtggctcaggaccgacctgaagggtgatgatctggaggagggtgtcacaagtgaagagtttgataaattccttgaagaaagagccaaagctgctgaaatggttcccgacctcccctcgccccccatggaggctcctgccccagcctcaaacccttctggccggaagaagccagagcggtcagaggatgccctcttcgccctgtgagcagctctgtggtttgcctccccagatggcgggtccccgctcgcaccccgtggacaccgggcactggccactcctacatccccagctccacacggcctgcacacctgtgtttccatggaaatgccaccgtgtctgctcccaggcctcccactagtcaggaccagcttcagccacttcttttctctgagtggtgggacaactgcagccagagactctctcccctcccaccatgggcccctctgcccatgtttcctcccaggaagagcgggcagagtggcccagcccc

SEQ ID NO: 189229 - DNA, 1420 bp, Homo sapiens
  Payload ID: 17359
  Gene Symbol: TOM1L2
  Gene Name: target of myb1 like 2 membrane trafficking protein
  ENST ID: ENST00000540946
  CDS Start-End: 85-1254
agtcaggacgggagtccggcgggttacagcggaggcctaggtggcagacagggggcccgggccgctgcgtgttgtccacccaagatggagttcctcctggggaacccgttcagcacaccagtggggcagtgcctcgaaaaggcaacagatggctccctgcaaagtgaggattggacgttgaatatggagatctgtgacatcatcaatgagacggaggaagggccaaaggatgccattcgagccctgaagaagcggctcaacgggaaccggaactacagagaggtgatgctggcattaacagtgctggagacatgtgtgaagaactgtggccaccgcttccacatccttgtggccaaccgagatttcatcgacagtgttctggtcaaaattatatctcccaagaacaaccctcccaccattgtacaggacaaagtgcttgctctgatccagattgccaggctgcggagtgaactggacgtcgttcgaggaaacacaaaagtcatgtctgagatgttaacagaaatggtccctggacaggaggattcatctgatctggagttgctgcaggagctcaacaggacctgtcgggccatgcagcagcgcatcgtggagctcatctcccgcgtgtccaatgaggaggtcaccgaggagctgctgcatgtgaacgatgacctcaacaacgtcttccttcgatacgagaggttcgaacgatacaggtctggccgatccgttcaaaatgccagtaatggagtactgaatgaagtaaccgaagacaacttaatagacctggggccagggtctccagccgtggtgagcccaatggtggggaacacagcgcccccatcttccctctcctcccagcttgcaggcttagacttggggacagagagcgtcagtggcaccctcagttcactccagcaatgtaatccccgtgacggctttgacatgtttgcccagacgagaggaaactccttggctgagcagcgcaagacggtaacctatgaggatcctcaggctgtcggaggacttgcttctgcactagacaatcgaaaacagagttcagaagggaagggtgatgatctggaggagggtgtcacaagtgaagagtttgataaattccttgaagaaagagccaaagctgctgaaatggttcccgacctcccctcgccccccatggaggctcctgccccagcctcaaacccttctggccggaagaagccagagcggtcagaggatgccctcttcgccctgtgagcagctctgtggtttgcctccccagatggcgggtccccgctcgcaccccgtggacaccgggcactggccactcctacatccccagctccacacggcctgcacacctgtgtttccatggaaatgccaccgtgtctgctcccaggcctcccactagtcaggaccagct

SEQ ID NO: 189230 - DNA, 1748 bp, Homo sapiens
  Payload ID: 17359
  Gene Symbol: TOM1L2
  Gene Name: target of myb1 like 2 membrane trafficking protein
  Uniprot ID: Q6ZVM7
  ENST ID: ENST00000535933
  CDS Start-End: 108-1559
agagtggggagggggcaagtgtcagtcaggacgggagtccggcgggttacagcggaggcctaggtggcagacagggggcccgggccgctgcgtgttgtccacccaagatggagttcctcctggggaacccgttcagcacaccagtggggcagtgcctcgaaaaggcaacagatggctccctgcaaagtgaggattggacgttgaatatggagatctgtgacatcatcaatgagacggaggaagggccaaaggatgccattcgagccctgaagaagcggctcaacgggaaccggaactacagagaggtgatgctggcattaacagtgctggagacatgtgtgaagaactgtggccaccgcttccacatccttgtggccaaccgagatttcatcgacagtgttctggtcaaaattatatctcccaagaacaaccctcccaccattgtacaggacaaagtgcttgctctgatccaggcatgggctgatgcctttcgaagcagtcctgatctcaccggcgttgtgcacatatatgaggagctgaagaggaaaggggttgaatttcccatggcagacttggacgctctgtctcccatacacacaccacagcggattgccaggctgcggagtgaactggacgtcgttcgaggaaacacaaaagtcatgtctgagatgttaacagaaatggtccctggacaggaggattcatctgatctggagttgctgcaggagctcaacaggacctgtcgggccatgcagcagcgcatcgtggagctcatctcccgcgtgtccaatgaggaggtcaccgaggagctgctgcatgtgaacgatgacctcaacaacgtcttccttcgatacgagaggttcgaacgatacaggtctggccgatccgttcaaaatgccagtaatggagtactgaatgaagtaaccgaagacaacttaatagacctggggccagggtctccagccgtggtgagcccaatggtggggaacacagcgcccccatcttccctctcctcccagcttgcaggcttagacttggggacagagagcgtcagtggcaccctcagttcactccagcaatgtaatccccgtgacggctttgacatgtttgcccagacgagaggaaactccttggctgagcagcgcaagacggtaacctatgaggatcctcaggctgtcggaggacttgcttctgcactagacaatcgaaaacagagttcagaagggacttttctgtcctcggcccagaagagaggtagaggtggggagtctgacctggagcccatagacagctggcttataacccaaggaatgatccccgttgcgcagccatctgtcatggacgacattgaggtgtggctcaggaccgacctgaagggtgatgatctggaggagggtgtcacaagtgaagagtttgataaattccttgaagaaagagccaaagctgctgaaatggttcccgacctcccctcgccccccatggaggctcctgccccagcctcaaacccttctggccggaagaagccagagcggtcagaggatgccctcttcgccctgtgagcagctctgtggtttgcctccccagatggcgggtccccgctcgcaccccgtggacaccgggcactggccactcctacatccccagctccacacggcctgcacacctgtgtttccatggaaatgccaccgtgtctgctcccaggcctcccactagtcaggaccagcttcagccacttcttttctctgagt

SEQ ID NO: 189231 - DNA, 1320 bp, Homo sapiens
  Payload ID: 17359
  Gene Symbol: TOM1L2
  Gene Name: target of myb1 like 2 membrane trafficking protein
  ENST ID: ENST00000542206
  CDS Start-End: 88-1254
gtcagtcaggacgggagtccggcgggttacagcggaggcctaggtggcagacagggggcccgggccgctgcgtgttgtccacccaagatggagttcctcctggggaacccgttcagcacaccagtggggcagtgcctcgaaaaggcaacagatggctccctgcaaagtgaggattggacgttgaatatggagatctgtgacatcatcaatgagacggaggaagggccaaaggatgccattcgagccctgaagaagcggctcaacgggaaccggaactacagagaggtgatgctggcattaacaattgccaggctgcggagtgaactggacgtcgttcgaggaaacacaaaagtcatgtctgagatgttaacagaaatggtccctggacaggaggattcatctgatctggagttgctgcaggagctcaacaggacctgtcgggccatgcagcagcgcatcgtggagctcatctcccgcgtgtccaatgaggaggtcaccgaggagctgctgcatgtgaacgatgacctcaacaacgtcttccttcgatacgagaggttcgaacgatacaggtctggccgatccgttcaaaatgccagtaatggagtactgaatgaagtaaccgaagacaacttaatagacctggggccagggtctccagccgtggtgagcccaatggtggggaacacagcgcccccatcttccctctcctcccagcttgcaggcttagacttggggacagagagcgtcagtggcaccctcagttcactccagcaatgtaatccccgtgacggctttgacatgtttgcccagacgagaggaaactccttggctgagcagcgcaagacggtaacctatgaggatcctcaggctgtcggaggacttgcttctgcactagacaatcgaaaacagagttcagaagggacttttctgtcctcggcccagaagagaggtagaggtggggagtctgacctggagcccatagacagctggcttataacccaaggaatgatccccgttgcgcagccatctgtcatggacgacattgaggtgtggctcaggaccgacctgaagggtgatgatctggaggagggtgtcacaagtgaagagtttgataaattccttgaagaaagagccaaagctgctgaaatggttcccgacctcccctcgccccccatggaggctcctgccccagcctcaaacccttctggccggaagaagccagagcggtcagaggatgccctcttcgccctgtgagcagctctgtggtttgcctccccagatggcgggtccccgctcgcaccccgtggacaccgggcactg

SEQ ID NO: 189232 - DNA, 2098 bp, Homo sapiens
  Payload ID: 17359
  Gene Symbol: TOM1L2
  Gene Name: target of myb1 like 2 membrane trafficking protein
  Uniprot ID: Q6ZVM7
  ENST ID: ENST00000478943
  CDS Start-End: 566-1288
caatccagaccacgtctggcaggccccaaggcccaggcagctttttgagagcccctctcctgcctggcctggggacatgagccattcacaacagaggagagttggccacaaaaagagagaccacaatctaaatgtccagcaatagaagaatggcgagatacattatgaaacacacagaaaggaatgaggcagtctgtaccaagtgatggagaacggtgtctggaatattttgttgagaaaaagcaatctggaaagaatcacattttaatattttttaatgatttgtacaagcatgtacttgtatacatacaacagtatgtctggacatttgtctgctgaaaaagtacttgtttcctctgcggaaggaggggcaggcagtgaagagggaacttctactttgaattcggcacatgtctggttttatgaacaagcatgtactccttttgtgacttttaagaatcagtacaaattttttcaaaggagatagaatgtgacgaaaagcacacccagcaggctacccagaggtgcatgtgttccctaggagctcaacaggacctgtcgggccatgcagcagcgcatcgtggagctcatctcccgcgtgtccaatgaggaggtcaccgaggagctgctgcatgtgaacgatgacctcaacaacgtcttccttcgatacgagaggttcgaacgatacaggtctggccgatccgttcaaaatgccagtaatggagtactgaatgaagtaaccgaagacaacttaatagacctggggccagggtctccagccgtggtgagcccaatggtggggaacacagcgcccccatcttccctctcctcccagcttgcaggcttagacttggggacagagagcgtcagtggcaccctcagttcactccagcaatgtaatccccgtgacggctttgacatgtttgcccagacgagaggaaactccttggctgagcagcgcaagacggtaacctatgaggatcctcaggctgtcggaggacttgcttctgcactagacaatcgaaaacagagttcagaagggatccccgttgcgcagccatctgtcatggacgacattgaggtgtggctcaggaccgacctgaagggtgatgatctggaggagggtgtcacaagtgaagagtttgataaattccttgaagaaagagccaaagctgctgaaatggttcccgacctcccctcgccccccatggaggctcctgccccagcctcaaacccttctggccggaagaagccagagcggtcagaggatgccctcttcgccctgtgagcagctctgtggtttgcctccccagatggcgggtccccgctcgcaccccgtggacaccgggcactggccactcctacatccccagctccacacggcctgcacacctgtgtttccatggaaatgccaccgtgtctgctcccaggcctcccactagtcaggaccagcttcagccacttcttttctctgagtggtgggacaactgcagccagagactctctcccctcccaccatgggcccctctgcccatgtttcctcccaggaagagcgggcagagtggcccagccccaggcagtgcttcctgagcagaccacccggactgtctttcctccacccgcccatggagaaagagcacgcccggccccgccctgtgctcacctctgcctggctcagcgaccttctcaggcattctgccctcctgggcccctctctccctgaaggggctttgtggcatctctggaagagcagggtgtgctgcactcatgggcctggtctcactccttggacttgtcaccttgtgacatttggcttatcagcatttgagaaggctctgctgggtctccatggtgggggtctctcaccttcttgaccctctctccatcattcagctgccagcccaggcttcacacccaagctggctcagcagccgagcctggcaccgagggtccctgcaggctccctgggcagggagagggccaaggacaattgggagggcagcaggcagcccgcagatggtggccatgtggcacgctgctgagacgacactaccaataaaccaaactgccacgcacacactgcaggctcacacccgca

SEQ ID NO: 189233 - DNA, 5595 bp, Homo sapiens
  Payload ID: 17359
  Gene Symbol: TOM1L2
  Gene Name: target of myb1 like 2 membrane trafficking protein
  Uniprot ID: Q6ZVM7
  ENST ID: ENST00000581396
  CDS Start-End: 98-1471
gggggcaagtgtcagtcaggacgggagtccggcgggttacagcggaggcctaggtggcagacagggggcccgggccgctgcgtgttgtccacccaagatggagttcctcctggggaacccgttcagcacaccagtggggcagtgcctcgaaaaggcaacagatggctccctgcaaagtgaggattggacgttgaatatggagatctgtgacatcatcaatgagacggaggaagggccaaaggatgccattcgagccctgaagaagcggctcaacgggaaccggaactacagagaggtgatgctggcattaacagcatgggctgatgcctttcgaagcagtcctgatctcaccggcgttgtgcacatatatgaggagctgaagaggaaaggggttgaatttcccatggcagacttggacgctctgtctcccatacacacaccacagcggagtgtccctgaagtggatccagctgcgaccatgcccaggtcccaatcacagcagaggacaagtgctggttcctattcctcgccgcctcctgctccctactccgcaccgcaggccccagctctgagtgtgactggccccatcacagccaattcagaacagattgccaggctgcggagtgaactggacgtcgttcgaggaaacacaaaagtcatgtctgagatgttaacagaaatggtccctggacaggaggattcatctgatctggagttgctgcaggagctcaacaggacctgtcgggccatgcagcagcgcatcgtggagctcatctcccgcgtgtccaatgaggaggtcaccgaggagctgctgcatgtgaacgatgacctcaacaacgtcttccttcgatacgagaggttcgaacgatacaggtctggccgatccgttcaaaatgccagtaatggagtactgaatgaagtaaccgaagacaacttaatagacctggggccagggtctccagccgtggtgagcccaatggtggggaacacagcgcccccatcttccctctcctcccagcttgcaggcttagacttggggacagagagcgtcagtggcaccctcagttcactccagcaatgtaatccccgtgacggctttgacatgtttgcccagacgagaggaaactccttggctgagcagcgcaagacggtaacctatgaggatcctcaggctgtcggaggacttgcttctgcactagacaatcgaaaacagagttcagaagggatccccgttgcgcagccatctgtcatggacgacattgaggtgtggctcaggaccgacctgaagggtgatgatctggaggagggtgtcacaagtgaagagtttgataaattccttgaagaaagagccaaagctgctgaaatggttcccgacctcccctcgccccccatggaggctcctgccccagcctcaaacccttctggccggaagaagccagagcggtcagaggatgccctcttcgccctgtgagcagctctgtggtttgcctccccagatggcgggtccccgctcgcaccccgtggacaccgggcactggccactcctacatccccagctccacacggcctgcacacctgtgtttccatggaaatgccaccgtgtctgctcccaggcctcccactagtcaggaccagcttcagccacttcttttctctgagtggtgggacaactgcagccagagactctctcccctcccaccatgggcccctctgcccatgtttcctcccaggaagagcgggcagagtggcccagccccaggcagtgcttcctgagcagaccacccggactgtctttcctccacccgcccatggagaaagagcacgcccggccccgccctgtgctcacctctgcctggctcagcgaccttctcaggcattctgccctcctgggcccctctctccctgaaggggctttgtggcatctctggaagagcagggtgtgctgcactcatgggcctggtctcactccttggacttgtcaccttgtgacatttggcttatcagcatttgagaaggctctgctgggtctccatggtgggggtctctcaccttcttgaccctctctccatcattcagctgccagcccaggcttcacacccaagctggctcagcagccgagcctggcaccgagggtccctgcaggctccctgggcagggagagggccaaggacaattgggagggcagcaggcagcccgcagatggtggccatgtggcacgctgctgagacgacactaccaataaaccaaactgccacgcacacactgcaggctcacacccgcacacctggtcctggcttgtggagggacttgcactggaggtattgctctggcttgcctggggaagtgtcacagatgtgcacatgggccacactcagtgctgtggcctggcctgccgtagcctcacacatctgcctcaagagccagcagcaaacagctttgtggcatccttggaggttcccagtgactgagaggcctgggcagcactaaggcccctgctctgctccctggcataggccttggcctccttgcacagactctcctgacagtctggcctcctcccacctcagaggtcctctggccaccaatttatactctctccccaagctgatcctgaaggcaggcagagcagctaggggctggtaacatgtattcccatcccgtgtcctcactggtgtgtctcctggccatgggcaagggactcgggtcatcccaggccctggtccagccagacacctggccccacacctcccaccaggctgctgttgctcagaaggagaatactgcagctgtatgcatccccgtgtgtcttgggcccagctcgctgggtcagtctgctcctgtcccctccagcatgcactgcctaggtcagcacaggttcctgatccatggtgtagttagcccttcccacctggcaggacggcccagaccaccagccaagcagggaaagggggctgggcttgacgggagaagagaccagcgacatggtcgttggggagcattcaggatggcgacttcagctgggggtcatgctgagcaccaacaggaactattccagtgaagagcaagtgctgcccgacccaggaccctgtgccaggctagcagccctccagctccctccagagaggaaacctctgtctggctgagggtgggactagctgggatgtctcactccagttgctcaggttcacccaggaagctcctccgtggagtggccagcctgattctagccctgtcctctctggcagcacatgccacacctgcctgggccttctgctccctgatgcttgatgagcccctgcctcctcaatgtttctcaaagacagacccccctgaggccagcttgaatgtgaagactgctgaagttagctggcttcacttgagctgcagaaaaggtggctgggatggcccaggtgcacccagaggccccagccctttggctgcctttgggttgtgacttgggttgtctctgaggccctgccagagctgggcctgcgggtggtgggcggtccgacctcgggcagtcagtgctccgcagcctcagcactgcatcccagacccagtgtcctcagagggaagagccagcctccctgcctcatggaaccaggagtcccaaaaagtcaggagcctggaggctctgaaaggagcagggattccatagtgcgtgaagctgaaataggcgccctcctggggagcccccagcaaaactgtttttcatacccactcccagaactgccccgctccagctccagcgccagcgccagctggttgccaggcatcattggagaggcctggctgccccaggggcagcagggagtggtggacctgtatgggctggcaggaggccattggccatgctgacaagtgtcacctgccttcctagcctggagccacccctcaggtggcctgcttgcacctcctatccggaggtagcctgccccacctgtaggcagagggggctcttgcttgaggcctgcacaggaagcaagtatagccccggtgccccagagtgggttccacttagccctggcgagatggcctgtcctgagatctctgctcccagaccccaccatctggggagcacagtccttaggctgcctggtccaggaagggggtgcggctctgtcaggaaacctggactctcaaggcccaccagcctctccgtgagtgttagaaatcacagatacagtatatacttaattacactaaattattgctgggattccttataagcactaattatacctgattataggttaaaatatttattttgtcaaaatattttcttgggaatgtgtttaaccctttctgcgttcattgttgctgagatgtgaaaactaaccattccctcctgcctacctttttggccactgggcggcagagaatggcgctatgtgcagttgggcccctggcaccatgggcctttggcctgcctgctgcagagtagccctgcctgggcagtctccaggcactgagcaggccatctgtggccaggctgagagaatgactggctcgcttaccagcgtgcatgggacaaggagctttggagcctcaaggggttgttgctggcctgggctagagggaaaggtgaccatccgtctgtcctcctgtctttctattagcgcctccatgtgagtgatggtgccttggttcactagccttcccccaccaccccaccatgccacctggtggtcttggggcctgtgctgtcactccagcccctggggaggagaggacccagcccggagagttggggcaagggctccacatggcccaagggcaacagatgctcgcagggcagctgctgccgatgctcacgctcctgcccccctccttcccgctgccacaccccaccctgggcccccgcagacacgcatctctaactcagttgggcccagccttctggatggcttggggtaggccatgggcccacctggggccaggccagcccctggggcagctctggaagagcagtgtggaggagcacttgcttgcagcctggcttcagcctctggcactgctggagtggtccctgggagcttctgcactgtcggctttggggacgtctcacccacttgggttacagtaggccttccccacccagagagaagtgtttccaccccagagacattgtctgtcagcccctgaagtgctcgcctcccccagtgcccgtcaccagcccttcctatctgtggggtccaagtcaggcttcccctgcggccaccagccatagggagcagccatcagcccccgagtcagaactgcttctgtctgtccatacctccaggctctcccggagagggggacggatatttatttcctaaagtttgcacttaattgtgaggattctcaggattgttgggggctactgaaaagaggaatgtgttgaatgtcgcgtttgctgtccactcgtcctagaagtttagtgtttttgtcactgtcatgtgtttctgtgggcagagctggttctggagggtgggtcagtgcacccgaggctcagagcatccatccaccccactggccctccttccagataccctctctctaattgggttcttgcatgtaaaatactccacaataaataaataattgaacaaa

SEQ ID NO: 189234 - DNA, 575 bp, Homo sapiens
  Payload ID: 17359
  Gene Symbol: TOM1L2
  Gene Name: target of myb1 like 2 membrane trafficking protein
  ENST ID: ENST00000468944
  CDS Start-End: 1-120
gacatgtttgcccagacgagaggaaactccttggctgagcagcgcaagacacaccaccctgcctggcccctcatccacaggagaagcttggaagcaggagggtgcagccatgcagggtgaacccattccttacagcgagattttcctgactaaaataagtggtcagagcagaggctcctctgatagcagctctggctaggatgagccatctggaattcagggagttgattccaaaagagagaatctcctacatctcagggaggcactgtacatgttttgagctttctgttcagcctaaaggcgggtgaaacacactttttcccacctttcccagggacccagcatcttggtgcactcagcaccctgagtcctgcttggggctcagtagggtaagcagaaacccaaggtcccatgtacccttcaccaccaaaggttgattgtaaaacagatatagctaaaggagtcggagagtggaggaagacctcccataatcagtgacaggcccgggtcccagagaccaccttccctgtcaaatgccactgaggctgctgctaataaaataagaattaatgtta

SEQ ID NO: 189235 - DNA, 453 bp, Homo sapiens
  Payload ID: 17359
  Gene Symbol: TOM1L2
  Gene Name: target of myb1 like 2 membrane trafficking protein
  ENST ID: ENST00000579586
  CDS Start-End: 204-453
agagagtggggagggggcaagtgtcagtcaggacgggagtccggcgggttacagcggaggcctaggtggcagacagggggcccgggccgctgcgtgttgtccacccaagatggagttcctcctggggaacccgttcagcacaccagtggggcagtgcctcggcaacagatggctccctgcaaagtgaggattggacgttgaatatggagatctgtgacatcatcaatgagacggaggaagggccaaaggatgccattcgagccctgaagaagcggctcaacgggaaccggaactacagagaggtgatgctggcattaacagtgctggagacatgtgtgaagaactgtggccaccgcttccacatccttgtggccaaccgagatttcatcgacagtgttctggtcaaaattatatctcccaagaacaaccctcccaccattgtacaggacaaag

SEQ ID NO: 189236 - DNA, 1300 bp, Homo sapiens
  Payload ID: 17360
  Gene Symbol: TOM1
  Gene Name: target of myb1 membrane trafficking protein
  ENST ID: ENST00000382034
  CDS Start-End: 61-690
gtggcgctggcggttgctgtcagctgattcccggggttggtggcagcggcggtagcagcaatggactttctcctggggaacccgttcagctctccagtgggacagcgcatcgagaaagccacagatggctccctgcagagcgaggactgggccctcaacatggagatctgcgacatcatcaacgagacggaggaaggtcccaaagatgccctccgagcagtaaagaagagaatcgtggggaataagaacttccacgaggtgatgctggctctcacagtcttagaaacctgtgtcaagaactgcgggcaccgcttccacgtgctggtggccagccaggacttcgtggagagtgtgctggtgaggaccatcctgcccaagaacaacccacccaccatcgtgcatgacaaagtgctcaacctcatccagtcctgggctgacgcgttccgcagctcgcccgatctgacaggtgtggtcaccatctatgaggacctgcggaggaaaggcctggagttccccatgactgacctggacatgctgtcacccatccacacacccagaggaccgtgttcaactcagagacacaatcaggacaggattctgtgggcactgactccagccagcaagaggactctggccagcatgctgcccctctgcccgccccgcccatactctccggtgacacgcccatagcaccaaccccggaacagattgggaagctgcgcagtgagctggagatggtgagtgggaacgtgagggtgatgtcggagatgctgacggagctggtgcccacccaggccgagcccgcagacctggagctgctgcaggagctcaaccgcacgtgccgagccatgcagcagcgggtcctgagtgataccctgctccgggcccatgccccaaggagcccttcagagcccacactgccagtcgaggcctggctggaggctggccacagtggaaattctgccgagcctcttgtcccttccctgctctgctgcatggggccccatggctttggctggccactgagggtagggtgtggaggtgtggaggccccctgaggagctgcggcggcccaggtacgaagctgcaactctgcgcgcagtgggcgagatctcatcagccccaggctgcaggtgaggcttcaggggatgctggggccccactgcccctccgctgccttgccctccatccttcctctgttccttctggccgggcaccacagcactggggctcacctcttggttgatcctcttgtactgggagaggtgccttttgtatccccaattaaaggtagaaaacc

SEQ ID NO: 189237 - DNA, 560 bp, Homo sapiens
  Payload ID: 17360
  Gene Symbol: TOM1
  Gene Name: target of myb1 membrane trafficking protein
  ENST ID: ENST00000395736
  CDS Start-End: 40-441
agctgattcccggggttggtggcagcggcggtagcagcaatggactttctcctggggaacccgttcagctctccagtgggacagcgcatcgagaaagccacagatggctccctgcagagcgaggactgggccctcaacatggagatctgcgacatcatcaacgagacggaggaaggtcccaaagatgccctccgagcagtaaagaagagaatcgtggggaataagaacttccacgaggtgatgctggctctcacagtcttagaaacctgtgtcaagaactgcgggcaccgcttccacgtgctggtggccagccaggacttcgtggagagtgtgctggtgaggaccatcctgcccaagaacaacccacccaccatcgtgcatgacaaagtgctcaacctcatccagctcgcccgatctgacaggtgtggtcaccatctatgaggacctgcggaggaaaggcctggagttccccatgactgacctggacatgctgtcacccatccacacaccccagaggaccgtgttcaactcagagacacaatcaggacaggattctgtgg

SEQ ID NO: 189238 - DNA, 2622 bp, Homo sapiens
  Payload ID: 17360
  Gene Symbol: TOM1
  Gene Name: target of myb1 membrane trafficking protein
  ENST ID: ENST00000404284
  CDS Start-End: 74-283
acgtgacgggtcggtggcgctggcggttgctgtcagctgattcccggggttggtggcagcggcggtagcagcaatggactttctcctggggaacccgttcagctctccagtgggacagcgcatcgagaaagccacagatggctccctgcagagcgaggactgggccctcaacatggagatctgcgacatcatcaacgagacggaggaaggtgactctgctgctggaggtccaggggccacaggttgtgagtccctgctaagcaatgggctaggaagattctgatgtgatcagaacctggctggatacacaaaacagtcccaaagatgccctccgagcagtaaagaagagaatcgtggggaataagaacttccacgaggtgatgctggctctcacagtcttagaaacctgtgtcaagaactgcgggcaccgcttccacgtgctggtggccagccaggacttcgtggagagtgtgctggtgaggaccatcctgcccaagaacaacccacccaccatcgtgcatgacaaagtgctcaacctcatccagtcctgggctgacgcgttccgcagctcgcccgatctgacaggtgtggtcaccatctatgaggacctgcggaggaaaggcctggagttccccatgactgacctggacatgctgtcacccatccacacaccccagaggaccgtgttcaactcagagacacaatcaggacaggattctgtgggcactgactccagccagcaagaggactctggccagcatgctgcccctctgcccgccccgcccatactctccggtgacacgcccatagcaccaaccccggaacagattgggaagctgcgcagtgagctggagatggtgagtgggaacgtgagggtgatgtcggagatgctgacggagctggtgcccacccaggccgagcccgcagacctggagctgctgcaggagctcaaccgcacgtgccgagccatgcagcagcgggtcctggagctcatccctcagatcgccaatgagcagctgacagaggagctgctcatcgtcaatgacaatctcaacaatgtgttcctgcgccatgaacgagacaggggtctcactgtgttgcccaggctagtctcaaactcttggcctcaagcagtcctccctccttggcctccgaaagcattggtattacaggcatgagccaccacacccacctgcccaccttgtatcattctgttcaagagtcacatccccaagagagacttggattggctgagcttcattgtgcctaccagctggggtttgaacggttccgaacaggccagaccaccaaggccccaagtgaggccgagccggcagctgacctgatcgacatgggccctgacccagcagccaccggcaacctctcatcccagctggcaggaatgaacctgggctccagcagtgtgagagctggcctgcagtctctggaggcctctggtcgactggaagatgagtttgacatgtttgcgctgacacggggcagctcactggctgaccaacggaaagaggtaaaatacgaagccccccaagcaacagacggcctggctggagccctggacgcccggcagcagagcactggcgcgatcccagtcacccaggcctgcctcatggaggacatcgagcagtggctgtccactgacgtgggtaatgatgcggaagagcctaagggggtcaccagcgaagaatttgacaaattcctggaagaacgggccaaagccgcggaccgattgcccaacctctccagcccctcagctgaggggcccccgggtcccccatctggcccagcgccccggaagaagacccaggagaaagatgatgacatgctgtttgccttatgagtgtggggtctggcaccctgcagcccaggtccccactgctctcacacccttaggctgggacctccctccctcctctggtgttaaggctgctttgggggtggcttgttacccccttttcctcctctttgaagacggagctgccccagctgtggctgggggtgtggaggcagtgggatgaactgggggacaggtctgcgctgcagtgggatctggctgctctgcctcctttcccaccccagctgaccatgagactttgctgagaagtggaggccccaggacaggctggctggctggctggctgcttgacccagtgtgactctccttcactgagtgataccctgctccgggcccatgccccaaggagcccttcagagcccacactgccagtcgaggcctggctggaggctggccacagtggaaattctgccgagcctcttgtcccttccctgctctgctgcatggggccccatggctttggctggccactgagggtagggtgtggaggtgtggaggccccctgaggagctgcggcggcccaggtacgaagctgcaactctgcgcgcagtgggcgagatctcatcagccccaggctgcaggtgaggcttcaggggatgctggggccccactgcccctccgctgccttgccctccatccttcctctgttccttctggccgggcaccacagcactggggctcacctcttggttgatcctcttgtactgggagaggtgccttttgtatccccaattaaaggtagaaaacca

SEQ ID NO: 189239 - DNA, 567 bp, Homo sapiens
  Payload ID: 17360
  Gene Symbol: TOM1
  Gene Name: target of myb1 membrane trafficking protein
  ENST ID: ENST00000443206
  CDS Start-End: 114-567
agtgtgttcagaagcacagaagcctgaggagggtgatggggtggctgcgggcgatcagctgagctgagaaagccacagatggctccctgcagagcgaggactgggccctcaacatggagatctgcgacatcatcaacgagacggaggaaggtcccaaagatgccctccgagcagtaaagaagagaatcgtggggaataagaacttccacgaggtgatgctggctctcacagtcttagaaacctgtgtcaagaactgcgggcaccgcttccacgtgctggtggccagccaggacttcgtggagagtgtgctggtgaggaccatcctgcccaagaacaacccacccaccatcgtgcatgacaaagtgctcaacctcatccagtcctgggctgacgcgttccgcagctcgcccgatctgacaggtgtggtcaccatctatgaggacctgcggaggaaaggcctggagttccccatgactgacctggacatgctgtcacccatccacacaccccagaggaccgtgttcaactcagagacacaatcaggacaggattctgtgggcactgact

SEQ ID NO: 189240 - DNA, 593 bp, Homo sapiens
  Payload ID: 17360
  Gene Symbol: TOM1
  Gene Name: target of myb1 membrane trafficking protein
  ENST ID: ENST00000449508
  CDS Start-End: 36-329
gattcccggggttggtggcagcggcggtagcagcaatggactttctcctggggaacccgttcagctctccagtgggacagcgcatcgagaaagccacagatggctccctgcagagcgaggactgggccctcaacatggagatctgcgacatcatcaacgagacggaggaagggtgctcgacggcacctctcggccctccaggtcttagaaacctgtgtcaagaactgcgggcaccgcttccacgtgctggtggccagccaggacttcgtggagagtgtgctggtgaggaccatcctgcccaagaacaacccacccaccatcgtgcatgacaaagtgctcaacctcatccagtcctgggctgacgcgttccgcagctcgcccgatctgacaggtgtggtcaccatctatgaggacctgcggaggaaaggcctggagttccccatgactgacctggacatgctgtcacccatccacacaccccagaggaccgtgttcaactcagagacacaatcaggacaggattctgtgggcactgactccagccagcaagaggactctggccagcatgctgcccctctgcccgccccgcccat

SEQ ID NO: 189241 - DNA, 1133 bp, Homo sapiens
  Payload ID: 17360
  Gene Symbol: TOM1
  Gene Name: target of myb1 membrane trafficking protein
  ENST ID: ENST00000456128
  CDS Start-End: 130-1133
gagcttcgcggtgccaccgccccgcccacgcctcctcgccggcctccgagtgcgtcacgtgacgggtcggtggcgctggcggttgctgtcagctgattcccggggttggtggcagcggcggtagcagcaatggactttctcctggggaacccgttcagctctccagtgggacagcgcatcgagaaagccacagatggctccctgcagagcgaggactgggccctcaacatggagatctgcgacatcatcaacgagacggaggaaggtcccaaagatgccctccgagcagtaaagaagagaatcgtggggaataagaacttccacgaggtcttagaaacctgtgtcaagaactgcgggcaccgcttccacgtgctggtggccagccaggacttcgtggagagtgtgctggtgaggaccatcctgcccaagaacaacccacccaccatcgtgcatgacaaagtgctcaacctcatccagtcctgggctgacgcgttccgcagctcgcccgatctgacaggtgtggtcaccatctatgaggacctgcggaggaaaggcctggagttccccatgactgacctggacatgctgtcacccatccacacaccccagaggaccgtgttcaactcagagacacaatcaggacaggattctgtgggcactgactccagccagcaagaggactctggccagcatgctgcccctctgcccgccccgcccatactctccggtgacacgcccatagcaccaaccccggaacagattgggaagctgcgcagtgagctggagatggtgagtgggaacgtgagggtgatgtcggagatgctgacggagctggtgcccacccaggccgagcccgcagacctggagctgctgcaggagctcaaccgcacgtgccgagccatgcagcagcgggtcctggagctcatccctcagatcgccaatgagcagctgacagaggagctgctcatcgtcaatgacaatctcaacaatgtgttcctgcgccatgaacggtttgaacggttccgaacaggccagaccaccaaggccccaagtgaggccgagccggcagctgacctgatcgacatgggccctgacccagcagccaccggcaacctctcatcccagctggcagg

SEQ ID NO: 189242 - DNA, 2389 bp, Homo sapiens
  Payload ID: 17360
  Gene Symbol: TOM1
  Gene Name: target of myb1 membrane trafficking protein
  Uniprot ID: O60784
  ENST ID: ENST00000449058
  CDS Start-End: 126-1604
ttcgcggtgccaccgccccgcccacgcctcctcgccggcctccgagtgcgtcacgtgacgggtcggtggcgctggcggttgctgtcagctgattcccggggttggtggcagcggcggtagcagcaatggactttctcctggggaacccgttcagctctccagtgggacagcgcatcgagaaagccacagatggctccctgcagagcgaggactgggccctcaacatggagatctgcgacatcatcaacgagacggaggaaggtcccaaagatgccctccgagcagtaaagaagagaatcgtggggaataagaacttccacgaggtgatgctggctctcacagtcttagaaacctgtgtcaagaactgcgggcaccgcttccacgtgctggtggccagccaggacttcgtggagagtgtgctggtgaggaccatcctgcccaagaacaacccacccaccatcgtgcatgacaaagtgctcaacctcatccagtcctgggctgacgcgttccgcagctcgcccgatctgacaggtgtggtcaccatctatgaggacctgcggaggaaaggcctggagttccccatgactgacctggacatgctgtcacccatccacacaccccagaggaccgtgttcaactcagagacacaatcaggacaggattctgtgggcactgactccagccagcaagaggactctggccagcatgctgcccctctgcccgccccgcccatactctccggtgacacgcccatagcaccaaccccggaacagattgggaagctgcgcagtgagctggagatggtgagtgggaacgtgagggtgatgtcggagatgctgacggagctggtgcccacccaggccgagcccgcagacctggagctgctgcaggagctcaaccgcacgtgccgagccatgcagcagcgggtcctggagctcatccctcagatcgccaatgagcagctgacagaggagctgctcatcgtcaatgacaatctcaacaatgtgttcctgcgccatgaacggtttgaacggttccgaacaggccagaccaccaaggccccaagtgaggccgagccggcagctgacctgatcgacatgggccctgacccagcagccaccggcaacctctcatcccagctggcaggaatgaacctgggctccagcagtgtgagagctggcctgcagtctctggaggcctctggtcgactggaagatgagtttgacatgtttgcgctgacacggggcagctcactggctgaccaacggaaagaggtaaaatacgaagccccccaagcaacagacggcctggctggagccctggacgcccggcagcagagcactggcgcgatcccagtcacccaggcctgcctcatggaggacatcgagcagtggctgtccactgacgtgggtaatgatgcggaagagcctaagggggtcaccagcgaagaatttgacaaattcctggaagaacgggccaaagccgcggaccgattgcccaacctctccagcccctcagctgaggggcccccgggtcccccatctggcccagcgccccggaagaagacccaggagaaagatgatgacatgctgtttgccttatgagtgtggggtctggcaccctgcagcccaggtccccactgctctcacacccttaggctgggacctccctccctcctctggtgttaaggctgctttgggggtggcttgttacccccttttcctcctctttgaagacggagctgccccagctgtggctgggggtgtggaggcagtgggatgaactgggggacaggtctgcgctgcagtgggatctggctgctctgcctcctttcccaccccagctgaccatgagactttgctgagaagtggaggccccaggacaggctggctggctggctggctgcttgacccagtgtgactctccttcactgagtgataccctgctccgggcccatgccccaaggagcccttcagagcccacactgccagtcgaggcctggctggaggctggccacagtggaaattctgccgagcctcttgtcccttccctgctctgctgcatggggccccatggctttggctggccactgagggtagggtgtggaggtgtggaggccccctgaggagctgcggcggcccaggtacgaagctgcaactctgcgcgcagtgggcgagatctcatcagccccaggctgcaggtgaggcttcaggggatgctggggccccactgcccctccgctgccttgccctccatccttcctctgttccttctggccgggcaccacagcactggggctcacctcttggttgatcctcttgtactgggagaggtgccttttgtatccccaattaaaggtagaaaaccaccctgctagcagcattgtcaa

SEQ ID NO: 189243 - DNA, 2252 bp, Homo sapiens
  Payload ID: 17360
  Gene Symbol: TOM1
  Gene Name: target of myb1 membrane trafficking protein
  Uniprot ID: O60784
  ENST ID: ENST00000425375
  CDS Start-End: 126-1469
ttcgcggtgccaccgccccgcccacgcctcctcgccggcctccgagtgcgtcacgtgacgggtcggtggcgctggcggttgctgtcagctgattcccggggttggtggcagcggcggtagcagcaatggactttctcctggggaacccgttcagctctccagtgggacagcgcatcgagaaagccacagatggctccctgcagagcgaggactgggccctcaacatggagatctgcgacatcatcaacgagacggaggaaggtcccaaagatgccctccgagcagtaaagaagagaatcgtggggaataagaacttccacgaggtgatgctggctctcacagtcttagaaacctgtgtcaagaactgcgggcaccgcttccacgtgctggtggccagccaggacttcgtggagagtgtgctggtgaggaccatcctgcccaagaacaacccacccaccatcgtgcatgacaaagtgctcaacctcatccagaccgtgttcaactcagagacacaatcaggacaggattctgtgggcactgactccagccagcaagaggactctggccagcatgctgcccctctgcccgccccgcccatactctccggtgacacgcccatagcaccaaccccggaacagattgggaagctgcgcagtgagctggagatggtgagtgggaacgtgagggtgatgtcggagatgctgacggagctggtgcccacccaggccgagcccgcagacctggagctgctgcaggagctcaaccgcacgtgccgagccatgcagcagcgggtcctggagctcatccctcagatcgccaatgagcagctgacagaggagctgctcatcgtcaatgacaatctcaacaatgtgttcctgcgccatgaacggtttgaacggttccgaacaggccagaccaccaaggccccaagtgaggccgagccggcagctgacctgatcgacatgggccctgacccagcagccaccggcaacctctcatcccagctggcaggaatgaacctgggctccagcagtgtgagagctggcctgcagtctctggaggcctctggtcgactggaagatgagtttgacatgtttgcgctgacacggggcagctcactggctgaccaacggaaagaggtaaaatacgaagccccccaagcaacagacggcctggctggagccctggacgcccggcagcagagcactggcgcgatcccagtcacccaggcctgcctcatggaggacatcgagcagtggctgtccactgacgtgggtaatgatgcggaagagcctaagggggtcaccagcgaagaatttgacaaattcctggaagaacgggccaaagccgcggaccgattgcccaacctctccagcccctcagctgaggggcccccgggtcccccatctggcccagcgccccggaagaagacccaggagaaagatgatgacatgctgtttgccttatgagtgtggggtctggcaccctgcagcccaggtccccactgctctcacacccttaggctgggacctccctccctcctctggtgttaaggctgctttgggggtggcttgttacccccttttcctcctctttgaagacggagctgccccagctgtggctgggggtgtggaggcagtgggatgaactgggggacaggtctgcgctgcagtgggatctggctgctctgcctcctttcccaccccagctgaccatgagactttgctgagaagtggaggccccaggacaggctggctggctggctggctgcttgacccagtgtgactctccttcactgagtgataccctgctccgggcccatgccccaaggagcccttcagagcccacactgccagtcgaggcctggctggaggctggccacagtggaaattctgccgagcctcttgtcccttccctgctctgctgcatggggccccatggctttggctggccactgagggtagggtgtggaggtgtggaggccccctgaggagctgcggcggcccaggtacgaagctgcaactctgcgcgcagtgggcgagatctcatcagccccaggctgcaggtgaggcttcaggggatgctggggccccactgcccctccgctgccttgccctccatccttcctctgttccttctggccgggcaccacagcactggggctcacctcttggttgatcctcttgtactgggagaggtgccttttgtatccccaattaaaggtagaaaaccaccctgctagcagcattgtc

SEQ ID NO: 189244 - DNA, 800 bp, Homo sapiens
  Payload ID: 17360
  Gene Symbol: TOM1
  Gene Name: target of myb1 membrane trafficking protein
  ENST ID: ENST00000439512
  CDS Start-End: 56-307
gctggcggttgctgtcagctgattcccggggttggtggcagcggcggtagcagcaatggactttctcctggggaacccgttcagctctccagtgggacagcgcatcgagaaagccacagatggctccctgcagagcgaggactgggccctcaacatggagatctgcgacatcatcaacgagacggaggaaggtcccaaagatgccctccgagcagtaaagaagagaatcgtggggaataagaacttccacgaggtgatgctggctctcacagtgctcgacggcacctctcggccctccaggtcttagaaacctgtgtcaagaactgcgggcaccgcttccacgtgctggtggccagccaggacttcgtggagagtgtgctggtgaggaccatcctgcccaagaacaacccacccaccatcgtgcatgacaaagtgctcaacctcatccagtcctgggctgacgcgttccgcagctcgcccgatctgacaggtgtggtcaccatctatgaggacctgcggaggaaaggcctggagttccccatgactgacctggacatgctgtcacccatccacacaccccagaggaccgtgttcaactcagagacacaatcaggacaggattctgtgggcactgactccagccagcaagaggactctggccagcatgctgcccctctgcccgccccgcccatactctccggtgacacgcccatagcaccaaccccggaacagattgggaagctgcgcagtgagctggagatggtgagtgggaacgtgagggtgatgtcggagatgctgac

SEQ ID NO: 189245 - DNA, 2211 bp, Homo sapiens
  Payload ID: 17360
  Gene Symbol: TOM1
  Gene Name: target of myb1 membrane trafficking protein
  ENST ID: ENST00000424387
  CDS Start-End: 46-123
gctgtcagctgattcccggggttggtggcagcggcggtagcagcaatggactttctcctggggaacccgttcagctctccagtgggacagcgcatcgtcccaaagatgccctccgagcagtaaagaagagaatcgtggggaataagaacttccacgaggtgatgctggctctcacagtcttagaaacctgtgtcaagaactgcgggcaccgcttccacgtgctggtggccagccaggacttcgtggagagtgtgctggtgaggaccatcctgcccaagaacaacccacccaccatcgtgcatgacaaagtgctcaacctcatccagtcctgggctgacgcgttccgcagctcgcccgatctgacaggtgtggtcaccatctatgaggacctgcggaggaaaggcctggagttccccatgactgacctggacatgctgtcacccatccacacaccccagaggaccgtgttcaactcagagacacaatcaggacaggattctgtgggcactgactccagccagcaagaggactctggccagcatgctgcccctctgcccgccccgcccatactctccggtgacacgcccatagcaccaaccccggaacagattgggaagctgcgcagtgagctggagatggtgagtgggaacgtgagggtgatgtcggagatgctgacggagctggtgcccacccaggccgagcccgcagacctggagctgctgcaggagctcaaccgcacgtgccgagccatgcagcagcgggtcctggagctcatccctcagatcgccaatgagcagctgacagaggagctgctcatcgtcaatgacaatctcaacaatgtgttcctgcgccatgaacggtttgaacggttccgaacaggccagaccaccaaggccccaagtgaggccgagccggcagctgacctgatcgacatgggccctgacccagcagccaccggcaacctctcatcccagctggcaggaatgaacctgggctccagcagtgtgagagctggcctgcagtctctggaggcctctggtcgactggaagatgagtttgacatgtttgcgctgacacggggcagctcactggctgaccaacggaaagaggtaaaatacgaagccccccaagcaacagacggcctggctggagccctggacgcccggcagcagagcactggcgcgatcccagtcacccaggcctgcctcatggaggacatcgagcagtggctgtccactgacgtgggtaatgatgcggaagagcctaagggggtcaccagcgaagaatttgacaaattcctggaagaacgggccaaagccgcggaccgattgcccaacctctccagcccctcagctgaggggcccccgggtcccccatctggcccagcgccccggaagaagacccaggagaaagatgatgacatgctgtttgccttatgagtgtggggtctggcaccctgcagcccaggtccccactgctctcacacccttaggctgggacctccctccctcctctggtgttaaggctgctttgggggtggcttgttacccccttttcctcctctttgaagacggagctgccccagctgtggctgggggtgtggaggcagtgggatgaactgggggacaggtctgcgctgcagtgggatctggctgctctgcctcctttcccaccccagctgaccatgagactttgctgagaagtggaggccccaggacaggctggctggctggctggctgcttgacccagtgtgactctccttcactgagtgataccctgctccgggcccatgccccaaggagcccttcagagcccacactgccagtcgaggcctggctggaggctggccacagtggaaattctgccgagcctcttgtcccttccctgctctgctgcatggggccccatggctttggctggccactgagggtagggtgtggaggtgtggaggccccctgaggagctgcggcggcccaggtacgaagctgcaactctgcgcgcagtgggcgagatctcatcagccccaggctgcaggtgaggcttcaggggatgctggggccccactgcccctccgctgccttgccctccatccttcctctgttccttctggccgggcaccacagcactggggctcacctcttggttgatcctcttgtactgggagaggtgccttttgtatccccaattaaaggtagaaaaccaccctgcta

SEQ ID NO: 189246 - DNA, 2317 bp, Homo sapiens
  Payload ID: 17360
  Gene Symbol: TOM1
  Gene Name: target of myb1 membrane trafficking protein
  Uniprot ID: O60784
  ENST ID: ENST00000447733
  CDS Start-End: 152-1534
gctttttgccatcctgggcgctagagggaattgcgctgcaattcattaaattgcctctcagtctcaacagatgacaaaccccttgcccttgcctctgatttaagagaaagccacagatggctccctgcagagcgaggactgggccctcaacatggagatctgcgacatcatcaacgagacggaggaaggtcccaaagatgccctccgagcagtaaagaagagaatcgtggggaataagaacttccacgaggtgatgctggctctcacagtcttagaaacctgtgtcaagaactgcgggcaccgcttccacgtgctggtggccagccaggacttcgtggagagtgtgctggtgaggaccatcctgcccaagaacaacccacccaccatcgtgcatgacaaagtgctcaacctcatccagtcctgggctgacgcgttccgcagctcgcccgatctgacaggtgtggtcaccatctatgaggacctgcggaggaaaggcctggagttccccatgactgacctggacatgctgtcacccatccacacaccccagaggaccgtgttcaactcagagacacaatcaggacaggattctgtgggcactgactccagccagcaagaggactctggccagcatgctgcccctctgcccgccccgcccatactctccggtgacacgcccatagcaccaaccccggaacagattgggaagctgcgcagtgagctggagatggtgagtgggaacgtgagggtgatgtcggagatgctgacggagctggtgcccacccaggccgagcccgcagacctggagctgctgcaggagctcaaccgcacgtgccgagccatgcagcagcgggtcctggagctcatccctcagatcgccaatgagcagctgacagaggagctgctcatcgtcaatgacaatctcaacaatgtgttcctgcgccatgaacggtttgaacggttccgaacaggccagaccaccaaggccccaagtgaggccgagccggcagctgacctgatcgacatgggccctgacccagcagccaccggcaacctctcatcccagctggcaggaatgaacctgggctccagcagtgtgagagctggcctgcagtctctggaggcctctggtcgactggaagatgagtttgacatgtttgcgctgacacggggcagctcactggctgaccaacggaaagaggtaaaatacgaagccccccaagcaacagacggcctggctggagccctggacgcccggcagcagagcactggcgcgatcccagtcacccaggcctgcctcatggaggacatcgagcagtggctgtccactgacgtgggtaatgatgcggaagagcctaagggggtcaccagcgaaggtaaatttgacaaattcctggaagaacgggccaaagccgcggaccgattgcccaacctctccagcccctcagctgaggggcccccgggtcccccatctggcccagcgccccggaagaagacccaggagaaagatgatgacatgctgtttgccttatgagtgtggggtctggcaccctgcagcccaggtccccactgctctcacacccttaggctgggacctccctccctcctctggtgttaaggctgctttgggggtggcttgttacccccttttcctcctctttgaagacggagctgccccagctgtggctgggggtgtggaggcagtgggatgaactgggggacaggtctgcgctgcagtgggatctggctgctctgcctcctttcccaccccagctgaccatgagactttgctgagaagtggaggccccaggacaggctggctggctggctggctgcttgacccagtgtgactctccttcactgagtgataccctgctccgggcccatgccccaaggagcccttcagagcccacactgccagtcgaggcctggctggaggctggccacagtggaaattctgccgagcctcttgtcccttccctgctctgctgcatggggccccatggctttggctggccactgagggtagggtgtggaggtgtggaggccccctgaggagctgcggcggcccaggtacgaagctgcaactctgcgcgcagtgggcgagatctcatcagccccaggctgcaggtgaggcttcaggggatgctggggccccactgcccctccgctgccttgccctccatccttcctctgttccttctggccgggcaccacagcactggggctcacctcttggttgatcctcttgtactgggagaggtgccttttgtatccccaattaaaggtagaaaaccaccctgctagcagcattgtc

SEQ ID NO: 189247 - DNA, 2390 bp, Homo sapiens
  Payload ID: 17360
  Gene Symbol: TOM1
  Gene Name: target of myb1 membrane trafficking protein
  Uniprot ID: O60784
  ENST ID: ENST00000411850
  CDS Start-End: 126-1607
ttcgcggtgccaccgccccgcccacgcctcctcgccggcctccgagtgcgtcacgtgacgggtcggtggcgctggcggttgctgtcagctgattcccggggttggtggcagcggcggtagcagcaatggactttctcctggggaacccgttcagctctccagtgggacagcgcatcgagaaagccacagatggctccctgcagagcgaggactgggccctcaacatggagatctgcgacatcatcaacgagacggaggaaggtcccaaagatgccctccgagcagtaaagaagagaatcgtggggaataagaacttccacgaggtgatgctggctctcacagtcttagaaacctgtgtcaagaactgcgggcaccgcttccacgtgctggtggccagccaggacttcgtggagagtgtgctggtgaggaccatcctgcccaagaacaacccacccaccatcgtgcatgacaaagtgctcaacctcatccagtcctgggctgacgcgttccgcagctcgcccgatctgacaggtgtggtcaccatctatgaggacctgcggaggaaaggcctggagttccccatgactgacctggacatgctgtcacccatccacacaccccagaggaccgtgttcaactcagagacacaatcaggacaggattctgtgggcactgactccagccagcaagaggactctggccagcatgctgcccctctgcccgccccgcccatactctccggtgacacgcccatagcaccaaccccggaacagattgggaagctgcgcagtgagctggagatggtgagtgggaacgtgagggtgatgtcggagatgctgacggagctggtgcccacccaggccgagcccgcagacctggagctgctgcaggagctcaaccgcacgtgccgagccatgcagcagcgggtcctggagctcatccctcagatcgccaatgagcagctgacagaggagctgctcatcgtcaatgacaatctcaacaatgtgttcctgcgccatgaacggtttgaacggttccgaacaggccagaccaccaaggccccaagtgaggccgagccggcagctgacctgatcgacatgggccctgacccagcagccaccggcaacctctcatcccagctggcaggaatgaacctgggctccagcagtgtgagagctggcctgcagtctctggaggcctctggtcgactggaagatgagtttgacatgtttgcgctgacacggggcagctcactggctgaccaacggaaagaggtaaaatacgaagccccccaagcaacagacggcctggctggagccctggacgcccggcagcagagcactggcgcgatcccagtcacccaggcctgcctcatggaggacatcgagcagtggctgtccactgacgtgggtaatgatgcggaagagcctaagggggtcaccagcgaaggtaaatttgacaaattcctggaagaacgggccaaagccgcggaccgattgcccaacctctccagcccctcagctgaggggcccccgggtcccccatctggcccagcgccccggaagaagacccaggagaaagatgatgacatgctgtttgccttatgagtgtggggtctggcaccctgcagcccaggtccccactgctctcacacccttaggctgggacctccctccctcctctggtgttaaggctgctttgggggtggcttgttacccccttttcctcctctttgaagacggagctgccccagctgtggctgggggtgtggaggcagtgggatgaactgggggacaggtctgcgctgcagtgggatctggctgctctgcctcctttcccaccccagctgaccatgagactttgctgagaagtggaggccccaggacaggctggctggctggctggctgcttgacccagtgtgactctccttcactgagtgataccctgctccgggcccatgccccaaggagcccttcagagcccacactgccagtcgaggcctggctggaggctggccacagtggaaattctgccgagcctcttgtcccttccctgctctgctgcatggggccccatggctttggctggccactgagggtagggtgtggaggtgtggaggccccctgaggagctgcggcggcccaggtacgaagctgcaactctgcgcgcagtgggcgagatctcatcagccccaggctgcaggtgaggcttcaggggatgctggggccccactgcccctccgctgccttgccctccatccttcctctgttccttctggccgggcaccacagcactggggctcacctcttggttgatcctcttgtactgggagaggtgccttttgtatccccaattaaaggtagaaaaccaccctgctagcagcattgtc

SEQ ID NO: 189248 - DNA, 553 bp, Homo sapiens
  Payload ID: 17360
  Gene Symbol: TOM1
  Gene Name: target of myb1 membrane trafficking protein
  ENST ID: ENST00000608749
  CDS Start-End: 152-553
gctttttgccatcctgggcgctagagggaattgcgctgcaattcattaaattgcctctcagtctcaacagatgacaaaccccttgcccttgcctctgatttaagagaaagccacagatggctccctgcagagcgaggactgggccctcaacatggagatctgcgacatcatcaacgagacggaggaaggtcccaaagatgccctccgagcagtaaagaagagaatcgtggggaataagaacttccacgaggtgatgctggctctcacagtcttagaaacctgtgtcaagaactgcgggcaccgcttccacgtgctggtggccagccaggacttcgtggagagtgtgctggtgaggaccatcctgcccaagaacaacccacccaccatcgtgcatgacaaagtgctcaacctcatccagtcctgggctgacgcgttccgcagctcgcccgatctgacaggtgtggtcaccatctatgaggacctgcggaggaaaggcctggagttccccatgactgacctggacatgctgtcacccatccacacaccccagagg

SEQ ID NO: 189249 - DNA, 541 bp, Homo sapiens
  Payload ID: 17360
  Gene Symbol: TOM1
  Gene Name: target of myb1 membrane trafficking protein
  ENST ID: ENST00000608674
  CDS Start-End: 167-541
aaggtaagataatttgggctgcgagcagggtgcatcttggagcggggagaccttgacatcaaacaggaagagtcttaccgggacaaggagacaacagcccagagaggctgtcacccaggagaaagccacagatggctccctgcagagcgaggactgggccctcaacatggagatctgcgacatcatcaacgagacggaggaaggtcccaaagatgccctccgagcagtaaagaagagaatcgtggggaataagaacttccacgaggtgatgctggctctcacagtcttagaaacctgtgtcaagaactgcgggcaccgcttccacgtgctggtggccagccaggacttcgtggagagtgtgctggtgaggaccatcctgcccaagaacaacccacccaccatcgtgcatgacaaagtgctcaacctcatccagtcctgggctgacgcgttccgcagctcgcccgatctgacaggtgtggtcaccatctatgaggacctgcggaggaaaggcctggagttccccatgactgacctggacatg

SEQ ID NO: 189250 - DNA, 2352 bp, Homo sapiens
  Payload ID: 17361
  Gene Symbol: TASP1
  Gene Name: taspase, threonine aspartase, 1
  Uniprot ID: Q9H6P5
  ENST ID: ENST00000337743
  CDS Start-End: 122-1384
gggcgggtgactacttccggtgcagtgaaggctcggggctgaagcggggtaattcctctcctgcaattacttttggatggaagtatgcccctttctcagtagaagatggtaatcttggagaatgaccatggagaaggggatgagttctggagaagggctgccttccagatcatctcaggtttcggctggtaaaataacagccaaagagttggaaacaaagcagtcctataaagagaaacgaggaggctttgtgttggtgcatgcaggtgcaggttatcattctgaatccaaagccaaggagtataaacatgtatgcaaacgagcttgtcagaaggcaattgaaaagctgcaggccggtgctcttgcaactgacgcagtcactgcagcactggtggaacttgaggattctccttttacaaatgcaggaatgggatctaatctaaatctgttaggtgaaattgagtgtgatgccagcataatggatggaaaatccttaaattttggagcagttggagcactgagtggaatcaagaacccagtctcggttgccaacagactcttatgtgaagggcagaagggcaagctctcggctggcagaattcctccctgctttttagttggagaaggagcctacagatgggcagtagatcatggaataccctcttgccctcctaacatcatgaccacaagattcagtttagctgcatttaaaagaaacaagaggaaactagagctggcagaaagggtggacacagattttatgcaactaaagaaaagaagacaatcaagtgagaaggaaaatgactcaggcactttggacacggtaggcgctgtggttgtggaccacgaagggaatgttgctgctgctgtctccagtggaggcttggccttgaaacatccggggagagttgggcaggctgctctttatggatgtggctgctgggctgaaaatactggagctcataacccctactccacagctgtgagtacctcaggatgtggagagcatcttgtgcgcaccatactggctagagaatgttcacatgctttacaagctgaggatgctcaccaagccctgttggagactatgcaaaacaagtttatcagttcacctttccttgccagtgaagatggcgtgcttggcggagtgattgtcctccgttcatgcagatgttctgccgagcctgactcctcccaaaataagcagacacttctagtggaatttctgtggagccacacgacggagagcatgtgtgtcggatatatgtcagcccaggatgggaaagccaagactcacatttcaagacttcctcctggtgcggtggcaggacagtctgtggcaatcgaaggtggggtgtgccgcctggagagcccagtgaactgacccttcaggctgagtgtgaagcgtctcagaggcatttcagaacctgagcttttgggggtttttaactgaagttggttgttttatctttcttgttttataattcctattgcaacctcgtgcactgctcgagacacaagtgctgctgtagttagcgcttagtgacacgcgggcctttggtgggtgagcgggactgtgtgtgagtgtgtgcgcgtatgtgcgcacatatgtgtatgtgtggagtatgtgtgtttgcttctccgtggatgaaatagaaactcctcattgtgtgaccaggaatggttaaatcatctttacaaaatgtgtgctttaactgtttacaagtaaaacctaaagttgcaggaaacattttttatttcgtaaagaggtaccaactgtcgctgatgtgatatgtcagaactgaagagtaaatctacttgtttaaatgacttgacagtggtagtgctccatttaataacagtaataagtaataaagtgtttttatttgttaaccagtttaagtggatcctgtggtaacttaaactgttgttctcatcccttatatggggcatttttctttaacaaagaatggtttcagtgaaacaatctagcagagaattaatgtcagaacctttttaaataatagtctgattgatacagtttgtacttatttcatcaagcttttctaagcttaaatattgcatagcttcgagctgtatggactatattatgaaagaatatgtaaagagaacatacagtaatgcacagtccttaatttgtgtataatggaaagttatttacaatataacactgtaaataagaaagcaaagtttatgggaaaattcaatattatctttgtttttgtttaaatatatttttaagataaaggcacaaaaataaaagaagcgtattactgggtatagtatgtgactcctcttctcagactaataaattatcttttgaatccttgg

SEQ ID NO: 189251 - DNA, 426 bp, Homo sapiens
  Payload ID: 17361
  Gene Symbol: TASP1
  Gene Name: taspase, threonine aspartase, 1
  ENST ID: ENST00000434275
  CDS Start-End: 1-332
gtaaaataacagccaaagagttggaaacaaagcagtcctataaagagaaacgaggaggctttgtgttggtgcatgcaggtgcaggttatcattctgaatccaaagccaaggagtataaacatgtatgcaaacgagcttgtcagaaggcaattgaaaagctgcaggccggtgctcttgcaactgacgcagtcactgcagcactggtggaacttgagctcatgtggaaaggacaatttcaggtactgtgtgtgctaactaacctcttcctggacatcataaagaatccaactaaaacaaagtttaaaactatttcaaatgtgaaagtttattgaagccaatattctattttagagatttgtgttatgtttttgacaagtaactgtactgtaattatgtggctttcaattaaaaaatgtgaaaactgtt

SEQ ID NO: 189252 - DNA, 1000 bp, Homo sapiens
  Payload ID: 17361
  Gene Symbol: TASP1
  Gene Name: taspase, threonine aspartase, 1
  ENST ID: ENST00000455532
  CDS Start-End: 85-1000
gctgaagcggggtaattcctctcctgcaattacttttggatggaagtatgcccctttctcagtagaagatggtaatcttggagaatgaccatggagaaggggatgagttctggagaagggctgccttccagatcatctcaggtttcggctggtaaaataacagccaaagagttggaaacaaagcagtcctataaagagaaacgaggaggctttgtgttggtgcatgcaggtgcaggttatcattctgaatccaaagccaaggagtataaacatgtatgcaaacgagcttgtcagaaggattctccttttacaaatgcaggaatgggatctaatctaaatctgttaggtgaaattgagtgtgatgccagcataatggatggaaaatccttaaattttggagcagttggagcactgagtggaatcaagaacccagtctcggttgccaacagactcttatgtgaagggcagaagggcaagctctcggctggcagaattcctccctgctttttagttggagaaggagcctacagatgggcagtagatcatggaataccctcttgccctcctaacatcatgaccacaagattcagtttagctgcatttaaaagaaacaagaggaaactagagctggcagaaagggtggacacagattttatgcaactaaagaaaagaagacaatcaagtgagaaggaaaatgactcaggcactttggacacggtaggcgctgtggttgtggaccacgaagggaatgttgctgctgctgtctccagtggaggcttggccttgaaacatccggggagagttgggcaggctgctctttatggatgtggctgctgggctgaaaatactggagctcataacccctactccacagctgtgagtacctcaggatgtggagagcatcttgtgcgcaccatactggctagagaatgttcacatgctttacaagctgaggatgctcaccaagccctgttggagactatgcaaaacaagtttatca

SEQ ID NO: 189253 - DNA, 1871 bp, Homo sapiens
  Payload ID: 17362
  Gene Symbol: TAS1R1
  Gene Name: taste receptor, type 1, member 1
  Uniprot ID: Q7RTX1
  ENST ID: ENST00000351136
  CDS Start-End: 66-1829
atttaagcaactggcctccttagaggccactccttggccatgccaggcgcgggcatctggccagcatgctgctctgcacggctcgcctggtcggcctgcagcttctcatttcctgctgctgggcctttgcctgccatagcacggagtcttctcctgacttcaccctccccggagattacctcctggcaggcctgttccctctccattctggctgtctgcaggtgaggcacagacccgaggtgaccctgtgtgacaggtcttgtagcttcaatgagcatggctaccacctcttccaggctatgcggcttggggttgaggagataaacaactccacggccctgctgcccaacatcaccctggggtaccagctgtatgatgtgtgttctgactctgccaatgtgtatgccacgctgagagtgctctccctgccagggcaacaccacatagagctccaaggagaccttctccactattcccctacggtgctggcagtgattgggcctgacagcaccaaccgtgctgccaccacagccgccctgctgagccctttcctggtgcccatgcttttggagcagatccacaaggtgcatttccttctacacaaggacactgtggcgtttaatgacaacagagatcccctcagtagctataacataattgcctgggactggaatggacccaagtggaccttcacggtcctcggttcctccacatggtctccagttcagctaaacataaatgagaccaaaatccagtggcacggaaaggacaaccaggtgcctaagtctgtgtgttccagcgactgtcttgaagggcaccagcgagtggttacgggtttccatcactgctgctttgagtgtgtgccctgtggggctgggaccttcctcaacaagagtgacctctacagatgccagccttgtgggaaagaagagtgggcacctgagggaagccagacctgcttcccgcgcactgtggtgtttttggctttgcgtgagcacacctcttgggtgctgctggcagctaacacgctgctgctgctgctgctgcttgggactgctggcctgtttgcctggcacctagacacccctgtggtgaggtcagcagggggccgcctgtgctttcttatgctgggctccctggcagcaggtagtggcagcctctatggcttctttggggaacccacaaggcctgcgtgcttgctacgccaggccctctttgcccttggtttcaccatcttcctgtcctgcctgacagttcgctcattccaactaatcatcatcttcaagttttccaccaaggtacctacattctaccacgcctgggtccaaaaccacggtgctggcctgtttgtgatgatcagctcagcggcccagctgcttatctgtctaacttggctggtggtgtggaccccactgcctgctagggaataccagcgcttcccccatctggtgatgcttgagtgcacagagaccaactccctgggcttcatactggccttcctctacaatggcctcctctccatcagtgcctttgcctgcagctacctgggtaaggacttgccagagaactacaacgaggccaaatgtgtcaccttcagcctgctcttcaacttcgtgtcctggatcgccttcttcaccacggccagcgtctacgacggcaagtacctgcctgcggccaacatgatggctgggctgagcagcctgagcagcggcttcggtgggtattttctgcctaagtgctacgtgatcctctgccgcccagacctcaacagcacagagcacttccaggcctccattcaggactacacgaggcgctgcggctccacctgaccagtgggtcagcaggcacggctggcagccttctctgccctg

SEQ ID NO: 189254 - DNA, 1810 bp, Homo sapiens
  Payload ID: 17362
  Gene Symbol: TAS1R1
  Gene Name: taste receptor, type 1, member 1
  ENST ID: ENST00000328191
  CDS Start-End: 12-926
tcttccaggctatgcggcttggggttgaggagataaacaactccacggccctgctgcccaacatcaccctggggtaccagctgtatgatgtgtgttctgactctgccaatgtgtatgccacgctgagagtgctctccctgccagggcaacaccacatagagctccaaggagaccttctccactattcccctacggtgctggcagtgattgggcctgacagcaccaaccgtgctgccaccacagccgccctgctgagccctttcctggtgcccatgattagctatgcggccagcagcgagacgctcagcgtgaagcggcagtatccctctttcctgcgcaccatccccaatgacaagtaccaggtggagaccatggtgctgctgctgcagaagttcgggtggacctggatctctctggttggcagcagtgacgactatgggcagctaggggtgcaggcactggagaaccaggccactggtcaggggatctgcattgctttcaaggacatcatgcccttctctgcccaggtgggcgatgagaggatgcagtgcctcatgcgccacctggcccaggccggggccaccgtcgtggttgttttttccagccggcagttggccagggtgtttttcgagtccgtggtgctgaccaacctgactggcaaggtgtgggtcgcctcagaagcctgggccctctccaggcacatcactggggtgcccgggatccagcgcattgggatggtgctgggcgtggccatccagaagagggctgtccctggcctgaaggcgtttgaagaacctatgcccgggcagacaagaaggcccctaggccttgccacaagggctcctggtgcagcagcaatcagctctgcagagaatgccaagctttcatggcacacacgatgcccaagctcaaagccttctccatgagttctgcctacaacgcataccgggctgtgtatgcggtggcccatggcctccaccagctcctgggctgtgcctctggagcttgttccaggggccgagtctacccctggcagacctctacagatgccagccttgtgggaaagaagagtgggcacctgagggaagccagacctgcttcccgcgcactgtggtgtttttggctttgcgtgagcacacctcttgggtgctgctggcagctaacacgctgctgctgctgctgctgcttgggactgctggcctgtttgcctggcacctagacacccctgtggtgaggtcagcagggggccgcctgtgctttcttatgctgggctccctggcagcaggtagtggcagcctctatggcttctttggggaacccacaaggcctgcgtgcttgctacgccaggccctctttgcccttggtttcaccatcttcctgtcctgcctgacagttcgctcattccaactaatcatcatcttcaagttttccaccaaggtacctacattctaccacgcctgggtccaaaaccacggtgctggcctgtttgtgatgatcagctcagcggcccagctgcttatctgtctaacttggctggtggtgtggaccccactgcctgctagggaataccagcgcttcccccatctggtgatgcttgagtgcacagagaccaactccctgggcttcatactggccttcctctacaatggcctcctctccatcagtgcctttgcctgcagctacctgggtaaggacttgccagagaactacaacgaggccaaatgtgtcaccttcagcctgctcttcaacttcgtgtcctggatcgccttcttcaccacggccagcgtctacgacggcaagtacctgcctg

SEQ ID NO: 189255 - DNA, 2892 bp, Homo sapiens
  Payload ID: 17362
  Gene Symbol: TAS1R1
  Gene Name: taste receptor, type 1, member 1
  Uniprot ID: Q7RTX1
  ENST ID: ENST00000333172
  CDS Start-End: 194-2719
cctgcccagttcctgagtgggaccgcaggcccggaatgtcaaggcaaacagtcctgcttcagccactgggctccagtcccaccccttttgggggcctgaagttaggaagcatccggcagctgccttctatttaagcaactggcctccttagaggccactccttggccatgccaggcgcgggcatctggccagcatgctgctctgcacggctcgcctggtcggcctgcagcttctcatttcctgctgctgggcctttgcctgccatagcacggagtcttctcctgacttcaccctccccggagattacctcctggcaggcctgttccctctccattctggctgtctgcaggtgaggcacagacccgaggtgaccctgtgtgacaggtcttgtagcttcaatgagcatggctaccacctcttccaggctatgcggcttggggttgaggagataaacaactccacggccctgctgcccaacatcaccctggggtaccagctgtatgatgtgtgttctgactctgccaatgtgtatgccacgctgagagtgctctccctgccagggcaacaccacatagagctccaaggagaccttctccactattcccctacggtgctggcagtgattgggcctgacagcaccaaccgtgctgccaccacagccgccctgctgagccctttcctggtgcccatgattagctatgcggccagcagcgagacgctcagcgtgaagcggcagtatccctctttcctgcgcaccatccccaatgacaagtaccaggtggagaccatggtgctgctgctgcagaagttcgggtggacctggatctctctggttggcagcagtgacgactatgggcagctaggggtgcaggcactggagaaccaggccactggtcaggggatctgcattgctttcaaggacatcatgcccttctctgcccaggtgggcgatgagaggatgcagtgcctcatgcgccacctggcccaggccggggccaccgtcgtggttgttttttccagccggcagttggccagggtgtttttcgagtccgtggtgctgaccaacctgactggcaaggtgtgggtcgcctcagaagcctgggccctctccaggcacatcactggggtgcccgggatccagcgcattgggatggtgctgggcgtggccatccagaagagggctgtccctggcctgaaggcgtttgaagaagcctatgcccgggcagacaagaaggcccctaggccttgccacaagggctcctggtgcagcagcaatcagctctgcagagaatgccaagctttcatggcacacacgatgcccaagctcaaagccttctccatgagttctgcctacaacgcataccgggctgtgtatgcggtggcccatggcctccaccagctcctgggctgtgcctctggagcttgttccaggggccgagtctacccctggcagcttttggagcagatccacaaggtgcatttccttctacacaaggacactgtggcgtttaatgacaacagagatcccctcagtagctataacataattgcctgggactggaatggacccaagtggaccttcacggtcctcggttcctccacatggtctccagttcagctaaacataaatgagaccaaaatccagtggcacggaaaggacaaccaggtgcctaagtctgtgtgttccagcgactgtcttgaagggcaccagcgagtggttacgggtttccatcactgctgctttgagtgtgtgccctgtggggctgggaccttcctcaacaagagtgacctctacagatgccagccttgtgggaaagaagagtgggcacctgagggaagccagacctgcttcccgcgcactgtggtgtttttggctttgcgtgagcacacctcttgggtgctgctggcagctaacacgctgctgctgctgctgctgcttgggactgctggcctgtttgcctggcacctagacacccctgtggtgaggtcagcagggggccgcctgtgctttcttatgctgggctccctggcagcaggtagtggcagcctctatggcttctttggggaacccacaaggcctgcgtgcttgctacgccaggccctctttgcccttggtttcaccatcttcctgtcctgcctgacagttcgctcattccaactaatcatcatcttcaagttttccaccaaggtacctacattctaccacgcctgggtccaaaaccacggtgctggcctgtttgtgatgatcagctcagcggcccagctgcttatctgtctaacttggctggtggtgtggaccccactgcctgctagggaataccagcgcttcccccatctggtgatgcttgagtgcacagagaccaactccctgggcttcatactggccttcctctacaatggcctcctctccatcagtgcctttgcctgcagctacctgggtaaggacttgccagagaactacaacgaggccaaatgtgtcaccttcagcctgctcttcaacttcgtgtcctggatcgccttcttcaccacggccagcgtctacgacggcaagtacctgcctgcggccaacatgatggctgggctgagcagcctgagcagcggcttcggtgggtattttctgcctaagtgctacgtgatcctctgccgcccagacctcaacagcacagagcacttccaggcctccattcaggactacacgaggcgctgcggctccacctgaccagtgggtcagcaggcacggctggcagccttctctgccctgagggtcgaaggtcgagcaggccgggggtgtccgggaggtctttgggcatcgcggtctggggttgggacgtgtaagcgcctgggagagcctagaccaggctccgggctgccaataaagaagtgaaatgcgta

SEQ ID NO: 189256 - DNA, 740 bp, Homo sapiens
  Payload ID: 17362
  Gene Symbol: TAS1R1
  Gene Name: taste receptor, type 1, member 1
  ENST ID: ENST00000415267
  CDS Start-End: 1-740
tcttccaggctatgcggcttggggttgaggagataaacaactccacggccctgctgcccaacatcaccctggggtaccagctgtatgatgtgtgttctgactctgccaatgtgtatgccacgctgagagtgctctccctgccagggcaacaccacatagagctccaaggagaccttctccactattcccctacggtgctggcagtgattgggcctgacagcaccaaccgtgctgccaccacagccgccctgctgagccctttcctggtgcccatgcttttggagcagatccacaaggtgcatttccttctacacaaggacactgtggcgtttaatgacaacagagatcccctcagtagctataacataattgcctgggactggaatggacccaagtggaccttcacggtcctcggttcctccacatggtctccagttcagctaaacataaatgagaccaaaatccagtggcacggaaaggacaaccaggtgcctaagtctgtgtgttccagcgactgtcttgaagggcaccagcgagtggttacgggtttccatcactgctgctttgagtgtgtgccctgtggggctgggaccttcctcaacaagagtgctacctgggtaaggacttgccagagaactacaacgaggccaaatgtgtcaccttcagcctgctcttcaacttcgtgtcctggatcgccttcttcaccacggccagcgtctacgacggcaagtacctgcctg

SEQ ID NO: 189257 - DNA, 1811 bp, Homo sapiens
  Payload ID: 17362
  Gene Symbol: TAS1R1
  Gene Name: taste receptor, type 1, member 1
  ENST ID: ENST00000411823
  CDS Start-End: 1-1220
tcttccaggctatgcggcttggggttgaggagataaacaactccacggccctgctgcccaacatcaccctggggtaccagctgtatgatgtgtgttctgactctgccaatgtgtatgccacgctgagagtgctctccctgccagggcaacaccacatagagctccaaggagaccttctccactattcccctacggtgctggcagtgattgggcctgacagcaccaaccgtgctgccaccacagccgccctgctgagccctttcctggtgcccatgattagctatgcggccagcagcgagacgctcagcgtgaagcggcagtatccctctttcctgcgcaccatccccaatgacaagtaccaggtggagaccatggtgctgctgctgcagaagttcgggtggacctggatctctctggttggcagcagtgacgactatgggcagctaggggtgcaggcactggagaaccaggccactggtcaggggatctgcattgctttcaaggacatcatgcccttctctgcccaggtgggcgatgagaggatgcagtgcctcatgcgccacctggcccaggccggggccaccgtcgtggttgttttttccagccggcagttggccagggtgtttttcgagtccgtggtgctgaccaacctgactggcaaggtgtgggtcgcctcagaagcctgggccctctccaggcacatcactggggtgcccgggatccagcgcattgggatggtgctgggcgtggccatccagaagagggctgtccctggcctgaaggcgtttgaagaagcctatgcccgggcagacaagaaggcccctaggccttgccacaagggctcctggtgcagcagcaatcagctctgcagagaatgccaagctttcatggcacacacgatgcccaagctcaaagccttctccatgagttctgcctacaacgcataccgggctgtgtatgcggtggcccatggcctccaccagctcctgggctgtgcctctggagcttgttccaggggccgagtctacccctggcagacctctacagatgccagccttgtgggaaagaagagtgggcacctgagggaagccagacctgcttcccgcgcactgtggtgtttttggctttgcgtgagcacacctcttgggtgctgctggcagctaacacgctgctgctgctgctgctgcttgggactgctggcctgtttgcctggcacctagacacccctgtggtgaggtcagcagggggccgcctgtgctttcttatgctgggctccctggcagcaggtagtggcagcctctatggcttctttggggaacccacaaggcctgcgtgcttgctacgccaggccctctttgcccttggtttcaccatcttcctgtcctgcctgacagttcgctcattccaactaatcatcatcttcaagttttccaccaaggtacctacattctaccacgcctgggtccaaaaccacggtgctggcctgtttgtgatgatcagctcagcggcccagctgcttatctgtctaacttggctggtggtgtggaccccactgcctgctagggaataccagcgcttcccccatctggtgatgcttgagtgcacagagaccaactccctgggcttcatactggccttcctctacaatggcctcctctccatcagtgcctttgcctgcagctacctgggtaaggacttgccagagaactacaacgaggccaaatgtgtcaccttcagcctgctcttcaacttcgtgtcctggatcgccttcttcaccacggccagcgtctacgacggcaagtacctgcctg

SEQ ID NO: 189258 - DNA, 2542 bp, Homo sapiens
  Payload ID: 17363
  Gene Symbol: TAS1R2
  Gene Name: taste receptor, type 1, member 2
  Uniprot ID: Q8TE23
  ENST ID: ENST00000375371
  CDS Start-End: 23-2542
ctgagaccatcacttcccagccatggggcccagggcaaagaccatctcctccctgttcttcctcctatgggtcctggctgagccggctgagaactcggacttctacctgcctggggattacctcctgggtggcctcttctccctccatgccaacatgaagggcattgttcaccttaacttcctgcaggtgcccatgtgcaaggagtatgaagtgaaggtgataggctacaacctcatgcaggccatgcgctttgcggtggaggagatcaacaatgacagcagcctgctgcctggtgtgctgctgggctatgagatcgtggatgtgtgctacatctccaacaatgtccagccggtgctctacttcctggcacacgaggacaacctccttcccatccaagaggactacagtaactacatttcccgtgtggtggctgtcattggccctgacaactccgagtctgtcatgactgtggccaacttcctctccctatttctccttccacagatcacctacagcgccatcagcgatgagctgcgagacaaggtgcgcttcccggctttgctgcgtaccacacccagcgccgaccaccacatcgaggccatggtgcagctgatgctgcacttccgctggaactggatcattgtgctggtgagcagcgacacctatggccgcgacaatggccagctgcttggcgagcgcgtggcccggcgcgacatctgcatcgccttccaggagacgctgcccacactgcagcccaaccagaacatgacgtcagaggagcgccagcgcctggtgaccattgtggacaagctgcagcagagcacagcgcgcgtcgtggtcgtgttctcgcccgacctgaccctgtaccacttcttcaatgaggtgctgcgccagaacttcactggcgccgtgtggatcgcctccgagtcctgggccatcgacccggtcctgcacaacctcacggagctgcgccacttgggcaccttcctgggcatcaccatccagagcgtgcccatcccgggcttcagtgagttccgcgagtggggcccacaggctgggccgccacccctcagcaggaccagccagagctatacctgcaaccaggagtgcgacaactgcctgaacgccaccttgtccttcaacaccattctcaggctctctggggagcgtgtcgtctacagcgtgtactctgcggtctatgctgtggcccatgccctgcacagcctcctcggctgtgacaaaagcacctgcaccaagagggtggtctacccctggcagctgcttgaggagatctggaaggtcaacttcactctcctggaccaccaaatcttcttcgacccgcaaggggacgtggctctgcacttggagattgtccagtggcaatgggaccggagccagaatcccttccagagcgtcgcctcctactaccccctgcagcgacagctgaagaacatccaagacatctcctggcacaccatcaacaacacgatccctatgtccatgtgttccaagaggtgccagtcagggcaaaagaagaagcctgtgggcatccacgtctgctgcttcgagtgcatcgactgccttcccggcaccttcctcaaccacactgaagatgaatatgaatgccaggcctgcccgaataacgagtggtcctaccagagtgagacctcctgcttcaagcggcagctggtcttcctggaatggcatgaggcacccaccatcgctgtggccctgctggccgccctgggcttcctcagcaccctggccatcctggtgatattctggaggcacttccagacacccatagttcgctcggctgggggccccatgtgcttcctgatgctgacactgctgctggtggcatacatggtggtcccggtgtacgtggggccgcccaaggtctccacctgcctctgccgccaggccctctttcccctctgcttcacaatctgcatctcctgtatcgccgtgcgttctttccagatcgtctgcgccttcaagatggccagccgcttcccacgcgcctacagctactgggtccgctaccaggggccctacgtctctatggcatttatcacggtactcaaaatggtcattgtggtaattggcatgctggccacgggcctcagtcccaccacccgtactgaccccgatgaccccaagatcacaattgtctcctgtaaccccaactaccgcaacagcctgctgttcaacaccagcctggacctgctgctctcagtggtgggtttcagcttcgcctacatgggcaaagagctgcccaccaactacaacgaggccaagttcatcaccctcagcatgaccttctatttcacctcatccgtctccctctgcaccttcatgtctgcctacagcggggtgctggtcaccatcgtggacctcttggtcactgtgctcaacctcctggccatcagcctgggctacttcggccccaagtgctacatgatcctcttctacccggagcgcaacacgcccgcctacttcaacagcatgatccagggctacaccatgaggagggactag

SEQ ID NO: 189259 - DNA, 3433 bp, Homo sapiens
  Payload ID: 17364
  Gene Symbol: TAS1R3
  Gene Name: taste receptor, type 1, member 3
  Uniprot ID: Q7RTX0
  ENST ID: ENST00000339381
  CDS Start-End: 33-2591
acctgccgtgcctgttggaagttgcctctgccatgctgggccctgctgtcctgggcctcagcctctgggctctcctgcaccctgggacgggggccccattgtgcctgtcacagcaacttaggatgaagggggactacgtgctgggggggctgttccccctgggcgaggccgaggaggctggcctccgcagccggacacggcccagcagccctgtgtgcaccaggttctcctcaaacggcctgctctgggcactggccatgaaaatggccgtggaggagatcaacaacaagtcggatctgctgcccgggctgcgcctgggctacgacctctttgatacgtgctcggagcctgtggtggccatgaagcccagcctcatgttcctggccaaggcaggcagccgcgacatcgccgcctactgcaactacacgcagtaccagccccgtgtgctggctgtcatcgggccccactcgtcagagctcgccatggtcaccggcaagttcttcagcttcttcctcatgccccaggtcagctacggtgctagcatggagctgctgagcgcccgggagaccttcccctccttcttccgcaccgtgcccagcgaccgtgtgcagctgacggccgccgcggagctgctgcaggagttcggctggaactgggtggccgccctgggcagcgacgacgagtacggccggcagggcctgagcatcttctcggccctggccgcggcacgcggcatctgcatcgcgcacgagggcctggtgccgctgccccgtgccgatgactcgcggctggggaaggtgcaggacgtcctgcaccaggtgaaccagagcagcgtgcaggtggtgctgctgttcgcctccgtgcacgccgcccacgccctcttcaactacagcatcagcagcaggctctcgcccaaggtgtgggtggccagcgaggcctggctgacctctgacctggtcatggggctgcccggcatggcccagatgggcacggtgcttggcttcctccagaggggtgcccagctgcacgagttcccccagtacgtgaagacgcacctggccctggccaccgacccggccttctgctctgccctgggcgagagggagcagggtctggaggaggacgtggtgggccagcgctgcccgcagtgtgactgcatcacgctgcagaacgtgagcgcagggctaaatcaccaccagacgttctctgtctacgcagctgtgtatagcgtggcccaggccctgcacaacactcttcagtgcaacgcctcaggctgccccgcgcaggaccccgtgaagccctggcagctcctggagaacatgtacaacctgaccttccacgtgggcgggctgccgctgcggttcgacagcagcggaaacgtggacatggagtacgacctgaagctgtgggtgtggcagggctcagtgcccaggctccacgacgtgggcaggttcaacggcagcctcaggacagagcgcctgaagatccgctggcacacgtctgacaaccagaagcccgtgtcccggtgctcgcggcagtgccaggagggccaggtgcgccgggtcaaggggttccactcctgctgctacgactgtgtggactgcgaggcgggcagctaccggcaaaacccagacgacatcgcctgcaccttttgtggccaggatgagtggtccccggagcgaagcacacgctgcttccgccgcaggtctcggttcctggcatggggcgagccggctgtgctgctgctgctcctgctgctgagcctggcgctgggccttgtgctggctgctttggggctgttcgttcaccatcgggacagcccactggttcaggcctcgggggggcccctggcctgctttggcctggtgtgcctgggcctggtctgcctcagcgtcctcctgttccctggccagcccagccctgcccgatgcctggcccagcagcccttgtcccacctcccgctcacgggctgcctgagcacactcttcctgcaggcggccgagatcttcgtggagtcagaactgcctctgagctgggcagaccggctgagtggctgcctgcgggggccctgggcctggctggtggtgctgctggccatgctggtggaggtcgcactgtgcacctggtacctggtggccttcccgccggaggtggtgacggactggcacatgctgcccacggaggcgctggtgcactgccgcacacgctcctgggtcagcttcggcctagcgcacgccaccaatgccacgctggcctttctctgcttcctgggcactttcctggtgcggagccagccgggctgctacaaccgtgcccgtggcctcacctttgccatgctggcctacttcatcacctgggtctcctttgtgcccctcctggccaatgtgcaggtggtcctcaggcccgccgtgcagatgggcgccctcctgctctgtgtcctgggcatcctggctgccttccacctgcccaggtgttacctgctcatgcggcagccagggctcaacacccccgagttcttcctgggagggggccctggggatgcccaaggccagaatgacgggaacacaggaaatcaggggaaacatgagtgacccaaccctgtgatctcagccccggtgaacccagacttagctgcgatcccccccaagccagcaatgacccgtgtctcgctacagagaccctcccgctctaggttctgaccccaggttgtctcctgaccctgaccccacagtgagccctaggcctggagcacgtggacacccctgtgaccatctgggccccagagccaagctgtgtccctgtccctctgtgcccagaccaggcctgcccaggtaacccagacccactgttctggaaagaggcccggagggctcccagggtacccgcaacccacaccgtgagctcaggaaaaggacgcagggaggccccggccagatggctggaagcccaaatcaggccctgccgacctgaccatgtcccaccagggcccccatcctgcaccctgccaggcaccacagcagtgggaggccaggtgggggcacacaggcatatgcccagggcagagcccgccgaggtaggggtggcacccagcttcctactctgccctttgcccagtgggtagacagcatcatgactgtcaccagtaccagggacagagcccaggtggggtgggggcggggtccagcaccacggccagcaccgaccaccaggaccccggagccagcaccatggacagaaaactgcccaccaggatctgacgccagcacgccgccaggcccacacagggtctccggtcagagtcccagggtcagctcccagcagggcctaggggaggctggaccagctccctgtgcctcattccaaggcagcccagccggagagaaggggcacaggccacacatctgtcccataaaattaaacgctttttagtgtt

SEQ ID NO: 189260 - DNA, 1359 bp, Homo sapiens
  Payload ID: 17365
  Gene Symbol: TAS2R1
  Gene Name: taste receptor, type 2, member 1
  Uniprot ID: Q9NYW7
  ENST ID: ENST00000382492
  CDS Start-End: 324-1223
gctgttctcccagctgtctgaaggtgtctgattccattatttgcctgtgatgactttgaaagctaggtaaacctgtaaaatgcaaaagccatcaataagaagcaaattgatgctagagtatctcctccttatttgactgtctcagaactaaatagagaaagcagtgacataaacaaatgtacaccaccttcctgccccatgcctttattgttagtcttcttccccagaggagtcctgatctaattgaagagcgtgaacaacccaacctgtccaaaactttataacttcattattttttaagtaaataattttttattcctaaaatgctagagtctcacctcattatctattttcttcttgcagtgatacaatttcttcttgggattttcacaaatggcatcattgtggtggtgaatggcattgacttgatcaagcacagaaaaatggctccgctggatctccttctttcttgtctggcagtttctagaatttttctgcagttgttcatcttctacgttaatgtgattgttatcttcttcatagaattcatcatgtgttctgcgaattgtgcaattctcttatttataaatgaattggaactttggcttgccacatggctcggcgttttctattgtgccaaggttgccagcgtccgtcacccactcttcatctggttgaagatgaggatatccaagctggtcccatggatgatcctggggtctctgctatatgtatctatgatttgtgttttccatagcaaatatgcagggtttatggtcccatacttcctaaggaaatttttctcccaaaatgccacaattcaaaaagaagatacactggctatacagattttctcttttgttgctgagttctcagtgccattgcttatcttcctttttgctgttttgctcttgattttctctctggggaggcacacccggcaaatgagaaacacagtggccggcagcagggttcctggcaggggtgcacccatcagcgcgttgctgtctatcctgtccttcctgatcctctacttctcccactgcatgataaaagtttttctctcttctctaaagtttcacatcagaaggttcatctttctgttcttcatccttgtgattggtatatacccttctggacactctctcatcttaattttaggaaatcctaaattgaaacaaaatgcaaaaaagttcctcctccacagtaagtgctgtcagtgagagagaagttggatcagttcaaagaacccatgattcaatgatttacccatgcctgccacacttccctcagccagacaaagcagcctgttcataaatatacaacatgtccccttcaggcctgtttatccagcctgag

SEQ ID NO: 189261 - DNA, 454 bp, Homo sapiens
  Payload ID: 17365
  Gene Symbol: TAS2R1
  Gene Name: taste receptor, type 2, member 1
  ENST ID: ENST00000506620
  CDS Start-End: 271-454
aaacactgatgcctaaagggaccaggcagtagacctgactggggagctaagtgatctcgtgtgactctctatgcctcgttgccaccagcgtgggccatctccaggggctctcaaaccgatagaagaccttgcggtgtgggaaaacagctccagagcttctaagctgagcggattgttcctagtgaggaagtgatacaatttcttcttgggattttcacaaatggcatcattgtggtggtgaatggcattgacttgatcaagcacagaaaaatggctccgctggatctccttctttcttgtctggcagtttctagaatttttctgcagttgttcatcttctacgttaatgtgattgttatcttcttcatagaattcatcatgtgttctgcgaattgtgcaattctcttatttataaatgaattggaactttggcttgccacatggctcggcgttt

SEQ ID NO: 189262 - DNA, 754 bp, Homo sapiens
  Payload ID: 17365
  Gene Symbol: TAS2R1
  Gene Name: taste receptor, type 2, member 1
  ENST ID: ENST00000514078
  CDS Start-End: 288-754
ggtgtttgaccaaactactgggcaccataccccagccaagtcagcatataatgtgaaccatcacagtgggagacatgtcacaaagtggtaagacagcaagaattggtggtctgggctggattccagagaacctggactgtgcctatgaagcaccactgccctgtagacctgggataataaacactgatgcctaaagggaccaggcagtgatacaatttcttcttgggattttcacaaatggcatcattgtggtggtgaatggcattgacttgatcaagcacagaaaaatggctccgctggatctccttctttcttgtctggcagtttctagaatttttctgcagttgttcatcttctacgttaatgtgattgttatcttcttcatagaattcatcatgtgttctgcgaattgtgcaattctcttatttataaatgaattggaactttggcttgccacatggctcggcgttttctattgtgccaaggttgccagcgtccgtcacccactcttcatctggttgaagatgaggatatccaagctggtcccatggatgatcctggggtctctgctatatgtatctatgatttgtgttttccatagcaaatatgcagggtttatggtcccatacttcctaaggaaatttttctcccaaaatgccacaattcaaaaagaagatacactggctatacagattttctcttttgttgctgagttctcagtgccattgcttatcttcctttttgctgttttgct

SEQ ID NO: 189263 - DNA, 1042 bp, Homo sapiens
  Payload ID: 17366
  Gene Symbol: TAS2R10
  Gene Name: taste receptor, type 2, member 10
  Uniprot ID: Q9NYW0
  ENST ID: ENST00000240619
  CDS Start-End: 90-1013
cacttccgtcgagcagccaatatatgcctcattctgcagcaggtaatctaagatagatgtaacagaagcaatattaagaattagcagatatgctacgtgtagtggaaggcatcttcatttttgttgtagttagtgagtcagtgtttggggttttggggaatggatttattggacttgtaaactgcattgactgtgccaagaataagttatctacgattggctttattctcaccggcttagctatttcaagaatttttctgatatggataataattacagatggatttatacagatattctctccaaatatatatgcctccggtaacctaattgaatatattagttacttttgggtaattggtaatcaatcaagtatgtggtttgccaccagcctcagcatcttctatttcctgaagatagcaaatttttccaactacatatttctctggttgaagagcagaacaaatatggttcttcccttcatgatagtattcttacttatttcatcgttacttaattttgcatacattgcgaagattcttaatgattataaaacgaagaatgacacagtctgggatctcaacatgtataaaagtgaatactttattaaacagattttgctaaatctgggagtcattttcttctttacactatccctaattacatgtatttttttaatcatttccctttggagacacaacaggcagatgcaatcgaatgtgacaggattgagagactccaacacagaagctcatgtgaaggcaatgaaagttttgatatctttcatcatcctctttatcttgtattttataggcatggccatagaaatatcatgttttactgtgcgagaaaacaaactgctgcttatgtttggaatgacaaccacagccatctatccctggggtcactcatttatcttaattctaggaaacagcaagctaaagcaagcctctttgagggtactgcagcaattgaagtgctgtgagaaaaggaaaaatctcagagtcacatagacaccttgggaagagatggatgttccacg

SEQ ID NO: 189264 - DNA, 1042 bp, Homo sapiens; identical to SEQ ID NO: 189263
  Payload ID: 17366
  Gene Symbol: TAS2R10
  Gene Name: taste receptor, type 2, member 10
  Uniprot ID: Q9NYW0
  ENST ID: ENST00000576159
  CDS Start-End: 90-1013

SEQ ID NO: 189265 - DNA, 1042 bp, Homo sapiens; identical to SEQ ID NO: 189263
  Payload ID: 17366
  Gene Symbol: TAS2R10
  Gene Name: taste receptor, type 2, member 10
  Uniprot ID: Q9NYW0
  ENST ID: ENST00000611256
  CDS Start-End: 90-1013

SEQ ID NO: 189266 - DNA, 1637 bp, Homo sapiens
  Payload ID: 17367
  Gene Symbol: TAS2R13
  Gene Name: taste receptor, type 2, member 13
  Uniprot ID: Q9NYV9
  ENST ID: ENST00000390677
  CDS Start-End: 265-1176
tctgcccatggtgaagacataaatatcttagctagggctcagcagagaaattgaagaaaaataaagatatcaccagaacagttatgtgaagatcgatcagcaaactttagagatttctgctttgacgttgagccaacaatgaaagaaggagcagaaaaaggagaaggaagaagaactccactggacactcaaggatgtgaatagcattttagatcagtgaataaccagcagtgacattagacattgaactttctctgttctgacatggaaagtgccctgccgagtatcttcactcttgtaataattgcagaattcataattgggaatttgagcaatggatttatagtactgatcaactgcattgactgggtcagtaaaagagagctgtcctcagtcgataaactcctcattatcttggcaatctccagaattgggctgatctgggaaatattagtaagttggtttttagctctgcattatctagccatatttgtgtctggaacaggattaagaattatgatttttagctggatagtttctaatcacttcaatctctggcttgctacaatcttcagcatcttttatttgctcaaaatagcgagtttctctagccctgcttttctctatttgaagtggagagtaaacaaagtgattctgatgatactgctaggaaccttggtcttcttatttttaaatctgatacaaataaacatgcatataaaagactggctggaccgatatgaaagaaacacaacttggaatttcagtatgagtgactttgaaacattttcagtgtcggtcaaattcactatgactatgttcagtctaacaccatttactgtggccttcatctcttttctcctgttaattttctccctgcagaaacatctccagaaaatgcaactcaattacaaaggacacagagaccccaggaccaaggtccatacaaatgccttgaaaattgtgatctcattccttttattctatgctagtttctttctatgtgttctcatatcatggatttctgagctgtatcagaacacagtgatctacatgctttgtgagacgattggagtcttctctccttcaagccactcctttcttctgattctaggaaacgctaagttaagacaggcctttcttttggtggcagctaaggtatgggctaaacgatgagaaactcacaatttcataagccattcagaccacagattattgaatattgcagacagaaacaggagtctacaaggagtttaaaagatattttatgcttcccctggtttcttttattgtgaaggtcactgtaaatgttttaaattcttctctataatagcatcttacctaagaatattatgtatttatgacatgtatttctacattattaggaatttgaaacttatttgaggaaattattggcagattctattgtaaattaaaaacatatactacagcatacttagatgttaattgtaaatctacaatcttttgtttggcaatggctcttcaattctaaatcattcattgagatgggtgatttaggtaattattttattatctcaagtactcctatttaaatggtgagctacagataattagaacagttatttggaatagaattagggaagtttggacttgcc

SEQ ID NO: 189267 - DNA, 1637 bp, Homo sapiens; identical to SEQ ID NO: 189266
  Payload ID: 17367
  Gene Symbol: TAS2R13
  Gene Name: taste receptor, type 2, member 13
  Uniprot ID: Q9NYV9
  ENST ID: ENST00000574870
  CDS Start-End: 265-1176

SEQ ID NO: 189268 - DNA, 1637 bp, Homo sapiens; identical to SEQ ID NO: 189266
  Payload ID: 17367
  Gene Symbol: TAS2R13
  Gene Name: taste receptor, type 2, member 13
  Uniprot ID: Q9NYV9
  ENST ID: ENST00000613662
  CDS Start-End: 265-1176

SEQ ID NO: 189269 - DNA, 1858 bp, Homo sapiens
  Payload ID: 17368
  Gene Symbol: TAS2R14
  Gene Name: taste receptor, type 2, member 14
  Uniprot ID: Q9NYV8
  ENST ID: ENST00000537503
  CDS Start-End: 57-1010
tgcattaagaagtcttcagcagtgatattagacattggggcatgctcttacaggcaatgggtggtgtcataaagagcatatttacattcgttttaattgtggaatttataattggaaatttaggaaatagtttcatagcactggtgaactgtattgactgggtcaagggaagaaagatctcttcggttgatcggatcctcactgctttggcaatctctcgaattagcctggtttggttaatattcggaagctggtgtgtgtctgtgtttttcccagctttatttgccactgaaaaaatgttcagaatgcttactaatatctggacagtgatcaatcattttagtgtctggttagctacaggcctcggtactttttattttctcaagatagccaatttttctaactctatttttctctacctaaagtggagggttaaaaaggtggttttggtgctgcttcttgtgacttcggtcttcttgtttttaaatattgcactgataaacatccatataaatgccagtatcaatggatacagaagaaacaagacttgcagttctgattcaagtaactttacacgattttccagtcttattgtattaaccagcactgtgttcattttcataccctttactttgtccctggcaatgtttcttctcctcatcttctccatgtggaaacatcgcaagaagatgcagcacactgtcaaaatatccggagacgccagcaccaaagcccacagaggagttaaaagtgtgatcactttcttcctactctatgccattttctctctgtcttttttcatatcagtttggacctctgaaaggttggaggaaaatctaattattctttcccaggtgatgggaatggcttatccttcatgtcactcatgtgttctgattcttggaaacaagaagctgagacaggcctctctgtcagtgctactgtggctgaggtacatgttcaaagatggggagccctcaggtcacaaagaatttagagaatcatcttgaatatattagaaaaaaaatagctcctaagaaattcttgtatgttatataaatttatacttccttaagattctttcattgtgtataactttgtgaattttacaaagatatgcttggaatcaacaccatccaaacatatcacaaattaggatatatgaaagtatgtatattaccatacagagaagaatgcgaatactataaagagttcttatacaaacagataatatagattttgtatcaatcattcaccttttttgagatttttaaatgagaaaacctataatgtataaaatacatgtgtgtatgtatgtatgtgacacagttactaaaaataggcttcttaaacttacatctcaatctggtagataaagtacataaaagaatatggaattttagtacctatattaagtgtttttaatttttgtataatatttagtacctgattagcgtgtatgcaaaaaagtaatttgcttcgtttgttgaattagaagccagctgccttactaaactaccacatttgctttgctcattctcttggctttgcagatagaaaattatatcatctgcatatagtgacttataatgattattttacttctccattttactacttgtaattcttttttggtatcagttgtataatgaaatggtttgaacattcaaagtgttaagtaatcctgatcgtaactgctgtctttgcaaatggagtgttttctagtgttttaacaataaacgtaatactgactctagctttgagataaattcttttaaaaatattcttcagggagaatatttgtttcctatcttcctgtgtatagtattgtaataaaatctctgttaaaaactatcaa

SEQ ID NO: 189270 - DNA, 1858 bp, Homo sapiens; identical to SEQ ID NO: 189269
  Payload ID: 17368
  Gene Symbol: TAS2R14
  Gene Name: taste receptor, type 2, member 14
  Uniprot ID: Q9NYV8
  ENST ID: ENST00000575008
  CDS Start-End: 57-1010

SEQ ID NO: 189271 - DNA, 1859 bp, Homo sapiens
  Payload ID: 17368
  Gene Symbol: TAS2R14
  Gene Name: taste receptor, type 2, member 14
  Uniprot ID: Q9NYV8
  ENST ID: ENST00000614274
  CDS Start-End: 57-1010
tgcattaagaagtcttcagcagtgatattagacattggggcatgctcttacaggcaatgggtggtgtcataaagagcatatttacattcgttttaattgtggaatttataattggaaatttaggaaatagtttcatagcactggtgaactgtattgactgggtcaagggaagaaagatctcttcggttgatcggatcctcactgctttggcaatctctcgaattagcctggtttggttaatattcggaagctggtgtgtgtctgtgtttttcccagctttatttgccactgaaaaaatgttcagaatgcttactaatatctggacagtgatcaatcattttagtgtctggttagctacaggcctcggtactttttattttctcaagatagccaatttttctaactctatttttctctacctaaagtggagggttaaaaaggtggttttggtgctgcttcttgtgacttcggtcttcttgtttttaaatattgcactgataaacatccatataaatgccagtatcaatggatacagaagaaacaagacttgcagttctgattcaagtaactttacacgattttccagtcttattgtattaaccagcactgtgttcattttcataccctttactttgtccctggcaatgtttcttctcctcatcttctccatgtggaaacatcgcaagaagatgcagcacactgtcaaaatatccggagacgccagcaccaaagcccacagaggagttaaaagtgtgatcactttcttcctactctatgccattttctctctgtcttttttcatatcagtttggacctctgaaaggttggaggaaaatctaattattctttcccaggtgatgggaatggcttatccttcatgtcactcatgtgttctgattcttggaaacaagaagctgagacaggcctctctgtcagtgctactgtggctgaggtacatgttcaaagatggggagccctcaggtcacaaagaatttagagaatcatcttgaatatattagaaaaaaaatagctcctaagaaattcttgtatgttatataaatttatacttccttaagattctttcattgtgtataactttgtgaattttacaaagatatgcttggaatcaacaccatccaaacatatcacaaattaggatatatgaaagtatgtatattaccatacagagaagaatgcgaatactataaagagttcttatacaaacagataatatagattttgtatcaatcattcaccttttttgagatttttaaatgagaaaacctataatgtataaaatacatgtgtgtatgtatgtatgtgacacagttactaaaaataggcttcttaaacttacatctcaatctggtagataaagtacataaaagaatatggaattttagtacctatattaagtgtttttaatttttgtataatatttagtacctgattagcgtgtatgcaaaaaagtaatttgcttcgtttgttgaattagaagccagctgccttactaaactaccacatttgctttgctcattctcttggctttgcagatagaaaattatatcatctgcatatagtgacttataatgattattttacttctccattttactacttgtaattcttttttggtatcagttgtataatgaaatggtttgaacattcaaagtgttaagtaatcctgatcgtaactgctgtctttgcaaatggagtgttttctagtgttttaacaataaacgtaatactgactctagctttgagataaattcttttaaaaatattcttcagggagaatatttgtttcctatcttcctgtgtatagtattgtaataaaatctctgttaaaaactatcaaa

SEQ ID NO: 189272 - DNA, 997 bp, Homo sapiens
  Payload ID: 17369
  Gene Symbol: TAS2R16
  Gene Name: taste receptor, type 2, member 16
  Uniprot ID: Q9NYV7
  ENST ID: ENST00000249284
  CDS Start-End: 67-942
tctctacctggaaattggtacagagattcagagtctttgtccaggaagacactttggagtagaagaatgatacccatccaactcactgtcttcttcatgatcatctatgtgcttgagtccttgacaattattgtgcagagcagcctaattgttgcagtgctgggcagagaatggctgcaagtcagaaggctgatgcctgtggacatgattctcatcagcctgggcatctctcgcttctgtctacagtgggcatcaatgctgaacaatttttgctcctattttaatttgaattatgtactttgcaacttaacaatcacctgggaattttttaatatccttacattctggttaaacagcttgcttaccgtgttctactgcatcaaggtctcttctttcacccatcacatctttctctggctgaggtggagaattttgaggttgtttccctggatattactgggttctctgatgattacttgtgtaacaatcatcccttcagctattgggaattacattcaaattcagttactcaccatggagcatctaccaagaaacagcactgtaactgacaaacttgaaaattttcatcagtatcagttccaggctcatacagttgcattggttattcctttcatcctgttcctggcctccaccatctttctcatggcatcactgaccaagcagatacaacatcatagcactggtcactgcaatccaagcatgaaagcgcgcttcactgccctgaggtcccttgccgtcttatttattgtgtttacctcttactttctaaccatactcatcaccattataggtactctatttgataagagatgttggttatgggtctgggaagcttttgtctatgctttcatcttaatgcattccacttcactgatgctgagcagccctacgttgaaaaggattctaaagggaaagtgctaggcctagaggttgcctgaggcacaggataaaagactcccgagcaattgatataatt

SEQ ID NO: 189273 - DNA, 1002 bp, Homo sapiens
  Payload ID: 17370
  Gene Symbol: TAS2R19
  Gene Name: taste receptor, type 2, member 19
  Uniprot ID: P59542
  ENST ID: ENST00000390673
  CDS Start-End: 50-949
ggactcagaacaagtgttactaagcctgcatttttttatctgttcaaacatgatgtgttttctgctcatcatttcatcaattctggtagtgtttgcatttgttcttggaaatgttgccaatggcttcatagccctagtaaatgtcattgactgggttaacacacgaaagatctcctcagctgagcaaattctcactgctctggtggtctccagaattggtttactctgggtcatgttattcctttggtatgcaactgtgtttaattctgctttatatggtttagaagtaagaattgttgcttctaatgcctgggctgtaacgaaccatttcagcatgtggcttgctgctagcctcagcatattttgtttgctcaagattgccaatttctccaaccttatttctctccacctaaagaagagaattaagagtgttgttctggtgatactgttggggcccttggtatttctgatttgtaatcttgctgtgataaccatggatgagagagtgtggacaaaagaatatgaaggaaatgtgacttggaagatcaaattgaggaatgcaatacacctttcaagcttgactgtaactactctagcaaacctcataccctttactctgagcctaatatgttttctgctgttaatctgttctctttgtaaacatctcaagaagatgcggctccatagcaaaggatctcaagatcccagcaccaaggtccatataaaagctttgcaaactgtgacctccttcctcatgttatttgccatttactttctgtgtataatcacatcaacttggaatcttaggacacagcagagcaaacttgtactcctgctttgccaaactgttgcaatcatgtatccttcattccactcattcatcctgattatgggaagtaggaagctaaaacagacctttctttcagttttgtggcagatgacacgctgagtgaaagaagagaaaccctcaactccatagattcacaaggggagcatcgtggg

SEQ ID NO: 189274 - DNA, 1002 bp, Homo sapiens; identical to SEQ ID NO: 189273
  Payload ID: 17370
  Gene Symbol: TAS2R19
  Gene Name: taste receptor, type 2, member 19
  Uniprot ID: P59542
  ENST ID: ENST00000573562
  CDS Start-End: 50-949

SEQ ID NO: 189275 - DNA, 960 bp, Homo sapiens
  Payload ID: 17370
  Gene Symbol: TAS2R19
  Gene Name: taste receptor, type 2, member 19
  ENST ID: ENST00000610376
  CDS Start-End: 1-960
atgatgtgttttctgctcatcatttcatcaattctggtagtgtttgcatttgttcttggaaatgttgccaatggcttcatagctctagtaaatgtcattgactgggttaacacacgaaagatctcctcagctgagcaaattctcactgctctggtggtctccagaattggtttactctgggtcatgttattcctttggtatgcaactgtgtttaattctgctttatatggtttagaagtaagaattgttgcttctaatgcctgggctgtaacgaaccatttcagcatgtggcttgctgctagcctcagcatattttgtttgctcaagattgccaatttctccaaccttatttctctccacctaaagaagagaattaagagtgttgttctggtgatactgttggggcccttggtatttttgatttgtaatcttgctgtgataaccatggatgagagagtgtggacaaaagaatatgaaggaaatgtgacttggaagatcaaattgaggaatgcaatgcacctttccaacttgactgtagccatgctagcaaacttgataccattcactctgaccctgatatcttttctgctgttaatctactctctgtgtaaacatctgaagaagatgcagctccatggcaaaggatctcaagatcccagcaccaagatccacataaaagctctgcaaactgtgacctccttcctcatattacttgccatttactttctgtgtctaatcatatcgttttggaattttaagatgcgaccaaaagaaattgtcttaatgctttgccaagcttttggaatcatatatccatcattccactcattcattctgatttgggggaacaagacgctaaagcagacctttctttcagttttgtggcaggtgacttgctgggcaaaagacagaaccagtcaactccatagattcacaagaggtgcattgtgtgttttctag

SEQ ID NO: 189276 - DNA, 1002 bp, Homo sapiens
  Payload ID: 17370
  Gene Symbol: TAS2R19
  Gene Name: taste receptor, type 2, member 19
  ENST ID: ENST00000631934
  CDS Start-End: 50-949
ggactcagaacaagtgttactaagcctgcatttttttatctgttcaaacatgatgtgttttctgctcatcatttcatcaattctggtagtgtttgcatttgttcttggaaatgttgccaatggcttcatagctctagtaaatgtcattgactgggttaacacacgaaagatctcctcagctgagcaaattctcactgctctggtggtctccagaattggtttactctgggtcatgttattcctttggtatgcaactgtgtttaattctgctttatatggtttagaagtaagaattgttgcttctaatgcctgggctgtaacgaaccatttcagcatgtggcttgctgctagcctcagcatattttgtttgctcaagattgccaatttctccaaccttatttctctccacctaaagaagagaattaagagtgttgttctggtgatactgttggggcccttggtatttttgatttgtaatcttgctgtgataaccatggatgagagagtgtggacaaaagaatatgaaggaaatgtgacttggaagatcaaattgaggaatgcaatacacctttcaagcttgactgtaactactctagcaaacctcataccctttactctgagcctaatatgttttctgctgttaatctgttctctttgtaaacatctcaagaagatgcggctccatagcaaaggatctcaagatcccagcaccaaggtccatataaaagctttgcaaactgtgacctccttcctcatgttatttgccatttactttctgtgtataatcacatcaacttggaatcttaggacacagcagagcaaacttgtactcctgctttgccaaactgttgcaatcatgtatccttcattccactcattcatcctgattatgggaagtaggaagctaaaacagacctttctttcagttttgtggcagatgacatgctgagtgaaagaagagaaaccctcaactccatagattcacaaggggagcatcgtggg

SEQ ID NO: 189277 - DNA, 1381 bp, Homo sapiens
  Payload ID: 17371
  Gene Symbol: TAS2R20
  Gene Name: taste receptor, type 2, member 20
  Uniprot ID: P59543
  ENST ID: ENST00000538986
  CDS Start-End: 1-930
atgatgagttttctacacattgttttttccattctagtagtggttgcatttattcttggaaattttgccaatggctttatagcactgataaatttcattgcctgggtcaagagacaaaagatctcctcagctgatcaaattattgctgctctggcagtctccagagttggtttgctctgggtaatattattacattggtattcaactgtgttgaatccaacttcatctaatttaaaagtaataatttttatttctaatgcctgggcagtaaccaatcatttcagcatctggcttgctactagcctcagcatattttatttgctcaagatcgtcaatttctccagacttatttttcatcacttaaaaaggaaggctaagagtgtagttctggtgatagtgttggggtctttgttctttttggtttgtcaccttgtgatgaaacacacgtatataaatgtgtggacagaagaatgtgaaggaaacgtaacttggaagatcaaactgaggaatgcaatgcacctttccaacttgactgtagccatgctagcaaacttgataccattcactctgaccctgatatcttttctgctgttaatctactctctgtgtaaacatctgaagaagatgcagctccatggcaaaggatctcaagatcccagcaccaagatccacataaaagctctgcaaactgtgacctccttcctcatattacttgccatttactttctgtgtctaatcatatcgttttggaattttaagatgcgaccaaaagaaattgtcttaatgctttgccaagcttttggaatcatatatccatcattccactcattcattctgatttgggggaacaagacgctaaagcagacctttctttcagttttgtggcaggtgacttgctgggcaaaaggacagaaccagtcaactccatagattcacaagaggtgcattgtgtgttttctagcagaaaacaaattgatggtgtctggaacattttatatttcccacaagtttttccgtagtctatgtatttgagtaatttccaaaagttgacatagaaaagtcttttacctaagtttattatataaaagtatatatatataatatacatttgcgtgtgtgtgtatgtctgaatgtatatgaaaatttaatatttaccataacatacctttaatcaacttttcatataaactgttcagttataccaaagtaggataagaaatttctcagaattatgaacccatgtgtatttcacacatttttttatatgatatttcatttgaggaatttatgatctctatttataattaagaactgacagcttatatcagaaaatcattgctgtttttcgttgtaaaatcattgctgtttttcgttgtaattt

SEQ ID NO: 189278 - DNA, 1381 bp, Homo sapiens; identical to SEQ ID NO: 189277
  Payload ID: 17371
  Gene Symbol: TAS2R20
  Gene Name: taste receptor, type 2, member 20
  Uniprot ID: P59543
  ENST ID: ENST00000570941
  CDS Start-End: 1-930

SEQ ID NO: 189279 - DNA, 1381 bp, Homo sapiens
  Payload ID: 17371
  Gene Symbol: TAS2R20
  Gene Name: taste receptor, type 2, member 20
  ENST ID: ENST00000634193
  CDS Start-End: 1-930
atgatgagttttctacacattgttttttccattctagtagtggttgcatttattcttggaaattttgccaatggctttatagcactgataaatttcattgcctgggtcaagagacaaaagatctcctcagctgatcaaattattgctgctctggcagtctccagagttggtttgctctgggtaatattattacattggtattcaactgtgttgaatccaacttcatctaatttagaagtaataatttttatttctaatgcctgggcagtaaccaatcatttcagcatctggcttgctactagcctcagcatattttatttgctcaagatcgtcaatttctccagacttatttttcatcacttaaaaaggaaggctaagagtgtagttctggtgatagtgttggggtctttgttctttttggtttgtcaccttgtgatgaaacacacgtatataaatgtgtggacagaagaatgtgaaggaaacgtaacttggaagatcaaactgaggaatgcaatgcacctttccaacttgactgtagccatgctagcaaacttgataccattcactctgaccctgatatcttttctgctgttaatctactctctgtgtaaacatctgaagaagatgcagctccatggcaaaggatctcaagatcccagcaccaagatccacataaaagctctgcaaactgtgacctccttcctcatattacttgccatttactttctgtgtctaatcatatcgttttggaattttaagatgcgaccaaaagaaattgtcttaatgctttgccaagcttttggaatcatatatccatcattccactcattcattctgatttgggggaacaagacgctaaagcagacctttctttcagttttgtggcaggtgacttgctgggcaaaaggacagaaccagtcaactccatagattcacaagaggtgcattgtgtgttttctagcagaaaacaaattgatggtgtctggaacattttatatttcccacaagtttttccgtagtctatgtatttgagtaatttccaaaagttgacatagaaaagtcttttacctaagtttattatatacaagtatatatatataatatacatttgcgtgtgtgtgtatgtctgaatgtatatgaaaatttaatatttaccataacatacctttaatcaacttttcatataaactgttcagttataccaaagtaggataagaaatttctcagaattatgaacccatgtgtatttcacacatttttttatatgatatttcatttgaggaatttatgatctctatttataattaagaactgacagcttatatcagaaaatcattgctgtttttcgttgtaaaatcattgctgtttttcgttgtaattt

SEQ ID NO: 189280 - DNA, 1101 bp, Homo sapiens
  Payload ID: 17372
  Gene Symbol: TAS2R3
  Gene Name: taste receptor, type 2, member 3
  Uniprot ID: Q9NYW6
  ENST ID: ENST00000247879
  CDS Start-End: 63-1013
tcagtgaggagattctatgtatcaacagaaagaacaaagatcagggctgcctaattgctgacatgatgggactcaccgagggggtgttcctgattctgtctggcactcagttcacactgggaattctggtcaattgtttcattgagttggtcaatggtagcagctggttcaagaccaagagaatgtctttgtctgacttcatcatcaccaccctggcactcttgaggatcattctgctgtgtattatcttgactgatagttttttaatagaattctctcccaacacacatgattcagggataataatgcaaattattgatgtttcctggacatttacaaaccatctgagcatttggcttgccacctgtcttggtgtcctctactgcctgaaaatcgccagtttctctcaccccacattcctctggctcaagtggagagtttctagggtgatggtatggatgctgttgggtgcactgctcttatcctgtggtagtaccgcatctctgatcaatgagtttaagctctattctgtctttaggggaattgaggccaccaggaatgtgactgaacacttcagaaagaagaggagtgagtattatctgatccatgttcttgggactctgtggtacctgcctcccttaattgtgtccctggcctcctactctttgctcatcttctccctggggaggcacacacggcagatgctgcaaaatgggacaagctccagagatccaaccactgaggcccacaagagggccatcagaatcatcctttccttcttctttctcttcttactttactttcttgctttcttaattgcatcatttggtaatttcctaccaaaaaccaagatggctaagatgattggcgaagtaatgacaatgttttatcctgctggccactcatttattctcattctggggaacagtaagctgaagcagacatttgtagtgatgctccggtgtgagtctggtcatctgaagcctggatccaagggacccattttctcttagagtaacagagggcatggggtggagcccttgagccttttggcctggctcaagactacaggactcttcctgaccttcctatgttaccagt

SEQ ID NO: 189281 - DNA, 1687 bp, Homo sapiens
  Payload ID: 17373
  Gene Symbol: TAS2R30
  Gene Name: taste receptor, type 2, member 30
  Uniprot ID: P59541
  ENST ID: ENST00000539585
  CDS Start-End: 401-1360
gtcgctaaagacaaatgatggagaggttacacaaggaaaaattgcaaacactggaagtgaacatgtccttgtttgcatactagcaaatgagaattcaggtttcatgtcaatttcagtatgaataattccagcctataacaagaacagatggtgaatgagtcagttaatttgaattgttttgaaaataagaatgttttccataaagagagcattgaacttatccattagcatgccatggtgatttctgacttgacactggtcacagcaattaaaagtaaaaagaatgtcacagcacatacacaaatcaggtgcatatagaatttaaggtcaggatattcaagcaatcacaaccagtgatattacaccagcattttaaaaatttctttttgtctgttcagacatgataacttttctgcccatcattttttccattctaatagtggttatatttgttattggaaattttgctaatggcttcatagcattggtaaattccattgagtgggtcaagagacaaaagatctcctttgttgaccaaattctcactgctctggcggtctccagagttggtttgctctgggtgttattactacattggtatgcaactcagttgaatccagctttttatagtgtagaagtaagaattactgcttataatgtctgggcagtaaccaaccatttcagcagctggcttgctactagcctcagcatgttttatttgctcaggattgccaatttctccaaccttatttttcttcgcataaagaggagagttaagagtgttgttctggtgatactgttggggcctttgctatttttggtttgtcatctttttgtgataaacatggatgagactgtatggacaaaagaatatgaaggaaacgtgacttggaagatcaaattgaggagtgcaatgtaccattcaaatatgactctaaccatgctagcaaactttgtacccctcactctgaccctgatatcttttctgctgttaatctgttctctgtgtaaacatctcaagaagatgcagctccatggcaaaggatctcaagatcccagcaccaaggtccacataaaagctttgcaaactgtgacctcctttcttctgttatgtgccatttactttctgtccatgatcatatcagtttgtaattttgggaggctggaaaagcaacctgtcttcatgttctgccaagctattatattcagctatccttcaacccacccattcatcctgattttgggaaacaagaagctaaagcagatttttctttcagttttgcggcatgtgaggtactgggtgaaagacagaagccttcgtctccatagattcacaagaggggcattgtgtgtcttctagcagaaaacaaactggtggtgtatgaaacattttatatttcttactgggttttctgtaatatatgtatatgaataatttccacatgtatacctagaaaagtcttttacctaaagttagtctagaaaagtacatatatatagatgtgtgtgtgtgtgtgtgtgtgtatgaaaaactgaagaacattgacaataacatgctttttattgttttttcacaaaaactgccaaattatagaaaatatgacaaaaattcctcaattatgaagccatgtttatttcatacatgtattttatatttcatttgtagaatttatatctatttataatt

SEQ ID NO: 189282 - DNA, 1687 bp, Homo sapiens; identical to SEQ ID NO: 189281
  Payload ID: 17373
  Gene Symbol: TAS2R30
  Gene Name: taste receptor, type 2, member 30
  Uniprot ID: P59541
  ENST ID: ENST00000576640
  CDS Start-End: 401-1360

SEQ ID NO: 189283 - DNA, 927 bp, Homo sapiens
  Payload ID: 17373
  Gene Symbol: TAS2R30
  Gene Name: taste receptor, type 2, member 30
  ENST ID: ENST00000617188
  CDS Start-End: 1-927
atgataacttttctgcccatcattttttccattctaatagtggttatatttgttattggaaattttgctaatggcttcatagcattggtaaattccattgagtgggtcaagagacaaaagatctcctttgttgaccaaattctcactgctctggcggtctccagagttggtttgctctgggtgttattactacattggtatgcaactcagttgaatccagctttttatagtgtagaagtaagaattactgcttataatgtctgggcagtaaccaaccatttcagcagctggcttgctactagcctcagcatgttttatttgctcaggattgccaatttctccaaccttatttttcttcgcataaagaggagagttaagagtgttgttctggtgatactgttggggcctttgctatttttggtttgtcatctttttgtgataaacatggatgagactgtatggacaaaagaatatgaaggaaacgtgacttggaagatcaaattgaggagtgcaatgtaccattcaaatatgactctaaccatgctagcaaactttgtacccctcactctgaccctgatatcttttctgctgttaatctgttctctgtgtaaacatctcaagaagatgcagctccatggcaaaggatctcaagatcccagcaccaaggtccacataaaagctttgcaaactgtgacctcctttcttatgttatttgccatttactttctgtgtataatcacatcaacttggaatcctaggacacagcagagcaatcttgtattcctgctttaccaaactcttgcaatcatgtatccttcattccactcattcatcctgattatgagaagtaggaagctaaaacagacctctctttcagttttgtgtcaggtgacgtgctgggtgaaacagaaaccctcaactccatag

SEQ ID NO: 189284 - DNA, 927 bp, Homo sapiens
  Payload ID: 17373
  Gene Symbol: TAS2R30
  Gene Name: taste receptor, type 2, member 30
  ENST ID: ENST00000622325
  CDS Start-End: 1-927
atgataacttttctgcccatcattttttccattctaatagtggttatatttgtgattggaaattttgctaatggcttcatagcattggtaaattccattgagtgggtcaagagacaaaagatctcctttgttgaccaaattctcactgctctggcggtctccagagttggtttgctctgggtgttattactacattggtatgcaactcagttgaatccagctttttatagtgtagaagtaagaattactgcttataatgtctgggcagtaaccaaccatttcagcagctggcttgctactagcctcagcatgttttatttgctcaggattgccaatttctccaaccttatttttcttcgcataaagaggagagttaagagtgttgttctggtgatactgttggggcctttgctatttttggtttgtcatctttttgtgataaacatggatgagactgtatggacaaaagaatatgaaggaaacgtgacttggaagatcaaattgaggagtgcaatgtaccattcaaatatgactctaaccatgctagcaaactttgtacccctcactctgaccctgatatcttttctgctgttaatctgttctctgtgtaaacatctcaagaagatgcagctccatggcaaaggatctcaagatcccagcaccaaggtccacataaaagctttgcaaactgtgacctcctttcttctgttatttgccatttactttctgtgtataatcacatcaacttggaatcctaggacacagcagagcaatcttgtattcctgctttaccaaactcttgcaatcatgtatccttcattccactcattcatcctgattatgagaagtaggaagctaaaacagacctctctttcagttttgtgtcaggtgacgtgctgggtgaaacagaaaccctcaactccatag

SEQ ID NO: 189285 - DNA, 960 bp, Homo sapiens
  Payload ID: 17373
  Gene Symbol: TAS2R30
  Gene Name: taste receptor, type 2, member 30
  ENST ID: ENST00000632763
  CDS Start-End: 1-960
atgataacttttctgcccatcattttttccattctaatagtggttatatttgtgattggaaattttgctaatggcttcatagcattggtaaattccattgagtgggtcaagagacaaaagatctcctttgttgaccaaattctcactgctctggcggtctccagagttggtttgctctgggtgttattactacattggtatgcaactcagttgaatccagctttttatagtgtagaagtaagaattactgcttataatgtctgggcagtaaccaaccatttcagcagctggcttgctactagcctcagcatgttttatttgctcaggattgccaatttctccaaccttatttttcttcgcataaagaggagagttaagagtgttgttctggtgatactgttggggcctttgctatttttggtttgtcatctttttgtgataaacatggatgagactgtatggacaaaagaatatgaaggaaacgtgacttggaagatcaaattgaggagtgcaatgtaccattcaaatatgactctaaccatgctagcaaactttgtacccctcactctgaccctgatatcttttctgctgttaatctgttctctgtgtaaacatctcaagaagatgcagctccatggcaaaggatctcaagatcccagcaccaaggtccacataaaagctttgcaaactgtgacctcctttcttctgttatgtgccatttactttctgtccatgatcatatcagtttgtaatttggggaggctggaaaagcaacctgtcttcatgttctgccaagctattatattcagctatccttcaacccacccattcatcctgattttgggaaacaagaagctaaagcagatttttctttcagttttgcggcatgtgaggtactgggtgaaagacagaagccttcgtctccatagattcacaagaggggcattgtgtgtcttctag

SEQ ID NO: 189286 - DNA, 1021 bp, Homo sapiens
  Payload ID: 17374
  Gene Symbol: TAS2R31
  Gene Name: taste receptor, type 2, member 31
  Uniprot ID: P59538
  ENST ID: ENST00000390675
  CDS Start-End: 73-1002
cgaacccacctgcaggaaccaactccggacacaacaccagcattaaaacaatttttttttgtctgttcagacatgacaacttttatacccatcattttttccagtgtggtagtggttctatttgttattggaaattttgctaatggcttcatagcattggtaaattccattgagcgggtcaagagacaaaagatctcttttgctgaccagattctcactgctctggcggtctccagagttggtttgctctgggtattattattaaattggtattcaactgtgtttaatccagctttttatagtgtagaagtaagaactactgcttataatgtctgggcagtaaccggccatttcagcaactggcttgctactagcctcagcatattttatttgctcaagattgccaatttctccaaccttatttttcttcacttaaagaggagagttaagagtgtcattctggtgatgctgttggggcctttactatttttggcttgtcaactttttgtgataaacatgaaagagattgtacggacaaaagaatatgaaggaaacttgacttggaagatcaaattgaggagtgcagtgtacctttcagatgcgactgtaaccacgctaggaaacttagtgcccttcactctgaccctgctatgttttttgctgttaatctgttctctgtgtaaacatctcaagaagatgcagctccatggtaaaggatctcaagatcccagcaccaaggtccacataaaagctttgcaaactgtgatctttttcctcttgttatgtgccgtttactttctgtccataatgatatcagtttggagttttgggagtctggaaaacaaacctgtcttcatgttctgcaaagctattagattcagctatccttcaatccacccattcatcctgatttggggaaacaagaagctaaagcagacttttctttcagttttgcggcaagtgaggtactgggtgaaaggagagaagccttcatctccatagattcatgagaggggcattg

SEQ ID NO: 189287 - DNA, 1021 bp, Homo sapiens; identical to SEQ ID NO: 189286
  Payload ID: 17374
  Gene Symbol: TAS2R31
  Gene Name: taste receptor, type 2, member 31
  Uniprot ID: P59538
  ENST ID: ENST00000572376
  CDS Start-End: 73-1002

SEQ ID NO: 189288 - DNA, 1004 bp, Homo sapiens
  Payload ID: 17374
  Gene Symbol: TAS2R31
  Gene Name: taste receptor, type 2, member 31
  ENST ID: ENST00000616314
  CDS Start-End: 57-956
tcacaaccagtgatattacaccagcattttaaaaatttctttttgtctgttcagacatgataacttttctgcccatcattttttccattctaatagtggttctatttgttattggaaattttgctaatggcttcatagcattggtaaattccattgagcgggtcaagagacaaaagatctcttttgctgaccagattctcactgctctggcggtctccagagttggtttgctctgggtattattattaaattggtattcaactgtgtttaatccagctttttatagtgtagaagtaagaactactgcttataatgtctgggcagtaaccggccatttcagcaactggcttgctactagcctcagcatattttatttgctcaagattgccaatttctccaaccttatttttcttcacttaaagaggagagttaagagtgtcattctggtgatgctgttggggcctttactatttttggcttgtcaactttttgtgataaacatgaaagagattgtacggacaaaagaatatgaaggaaacttgacttggaagatcaaattgaggagtgcagtgtacctttcagatgcgactgtaaccacgctaggaaacttagtgcccttcactctgaccctgctatgttttttgctgttaatctgttctctgtgtaaacatctcaagaagatgcagctccatggtaaaggatctcaagatcccagcaccaaggtccacataaaagctttgcaaactgtgatctttttcctcttgttatgtgccgtttactttctgtccataatgatatcagtttggagttttgggagtctggaaaacaaacctgtcttcatgttctgcaaagctattagattcagctatccttcaatccacccattcatcctgatttggggaaacaagaagctaaagcagacttttctttcagttttgcggcaagtgaggtactgggtgaaaggagagaagccttcatctccatagattcatgagaggggcatt

SEQ ID NO: 189289 - DNA, 1021 bp, Homo sapiens
  Payload ID: 17374
  Gene Symbol: TAS2R31
  Gene Name: taste receptor, type 2, member 31
  ENST ID: ENST00000631720
  CDS Start-End: 73-1002
cgaacccacctgcaggaaccaactccggacacaacaccagcattaaaacaatttttttttgtctgttcagacatgacaacttttatacccatcattttttccagtgtggtagtggttctatttgttattggaaattttgctaatggcttcatagcattggtaaattccattgagtgggtcaagagacaaaagatctcttttgctgaccagattctcactgctctggcggtctccagagttggtttgctctgggtattattattaaattggtattcaactgtgtttaatccagctttttatagtgtagaagtaagaactactgcttataatgtctgggcagtaaccggccatttcagcaactggcttgctactagcctcagcatattttatttgctcaagattgccaatttctccaaccttatttttcttcacttaaagaggagagttaagagtgtcattctggtgatgctgttggggcctttactatttttggcctgtcaactttttgtgataaacatgaaagagattgtacggacaaaagaatatgaaggaaacatgacttggaagatcaaattgaggagtgcagtgtacctttcagatgcgactgtaaccacgctaggaaacttagtgcccttcactctgaccctgctatgttttttgctgttaatctgttctctgtgtaaacatctcaagaagatgcagctccatggtaaaggatctcaagatcccagcaccaaggtccacataaaagttttgcaaactgtgatctttttcctcttgttatgtgccatttactttctgtccataatgatatcagtttggagttttgggagtctggaaaacaaacctgtcttcatgttctgcaaagctattagattcagctatccttcaatccacccattcatcctgatttggggaaacaagaagctaaagcagacttttctttcagttttgcggcaagtgaggtactgggtgaaaggagagaagccttcatctccatagattcatgagaggggcattg

SEQ ID NO: 189290 - DNA, 1143 bp, Homo sapiens
  Payload ID: 17375
  Gene Symbol: TAS2R38
  Gene Name: taste receptor, type 2, member 38
  Uniprot ID: P59533
  ENST ID: ENST00000547270
  CDS Start-End: 85-1086
cctttctgcactgggtggcaaccaggtctttagattagccaactagagaagagaagtagaatagccaattagagaagtgacatcatgttgactctaactcgcatccgcactgtgtcctatgaagtcaggagtacatttctgttcatttcagtcctggagtttgcagtggggtttctgaccaatgccttcgttttcttggtgaatttttgggatgtagtgaagaggcaggcactgagcaacagtgattgtgtgctgctgtgtctcagcatcagccggcttttcctgcatggactgctgttcctgagtgctatccagcttacccacttccagaagttgagtgaaccactgaaccacagctaccaagccatcatcatgctatggatgattgcaaaccaagccaacctctggcttgctgcctgcctcagcctgctttactgctccaagctcatccgtttctctcacaccttcctgatctgcttggcaagctgggtctccaggaagatctcccagatgctcctgggtattattctttgctcctgcatctgcactgtcctctgtgtttggtgcttttttagcagacctcacttcacagtcacaactgtgctattcatgaataacaatacaaggctcaactggcagattaaagatctcaatttattttattcctttctcttctgctatctgtggtctgtgcctcctttcctattgtttctggtttcttctgggatgctgactgtctccctgggaaggcacatgaggacaatgaaggtctataccagaaactctcgtgaccccagcctggaggcccacattaaagccctcaagtctcttgtctcctttttctgcttctttgtgatatcatcctgtgctgccttcatctctgtgcccctactgattctgtggcgcgacaaaataggggtgatggtttgtgttgggataatggcagcttgtccctctgggcatgcagccatcctgatctcaggcaatgccaagttgaggagagctgtgatgaccattctgctctgggctcagagcagcctgaaggtaagagccgaccacaaggcagattcccggacactgtgctgagaatggacatgaaatgagctcttcattaatacgcctgtgagtcttcataaatatgcc

SEQ ID NO: 189291 - DNA, 1017 bp, Homo sapiens
  Payload ID: 17376
  Gene Symbol: TAS2R39
  Gene Name: taste receptor, type 2, member 39
  Uniprot ID: P59534
  ENST ID: ENST00000446620
  CDS Start-End: 1-1017
atgctagggagatgttttcctccagacaccaaagagaagcaacagctcagaatgactaaactctgcgatcctgcagaaagtgaattgtcgccatttctcatcaccttaattttagcagttttacttgctgaatacctcattggtatcattgcaaatggtttcatcatggctatacatgcagctgaatgggttcaaaataaggcagtttccacaagtggcaggatcctggttttcctgagtgtatccagaatagctctccaaagcctcatgatgttagaaattaccatcagctcaacctccctaagtttttattctgaagacgctgtatattatgcattcaaaataagttttatattcttaaatttttgtagcctgtggtttgctgcctggctcagtttcttctactttgtgaagattgccaatttctcctacccccttttcctcaaactgaggtggagaattactggattgataccctggcttctgtggctgtccgtgtttatttccttcagtcacagcatgttctgcatcaacatctgcactgtgtattgtaacaattctttccctatccactcctccaactccactaagaaaacatacttgtctgagatcaatgtggtcggtctggcttttttctttaacctggggattgtgactcctctgatcatgttcatcctgacagccaccctgctgatcctctctctcaagagacacaccctacacatgggaagcaatgccacagggtccaacgaccccagcatggaggctcacatgggggccatcaaagctatcagctactttctcattctctacattttcaatgcagttgctctgtttatctacctgtccaacatgtttgacatcaacagtctgtggaataatttgtgccagatcatcatggctgcctaccctgccagccactcaattctactgattcaagataaccctgggctgagaagagcctggaagcggcttcagcttcgacttcatctttacccaaaagagtggactctgtga

SEQ ID NO: 189292 - DNA, 2378 bp, Homo sapiens
  Payload ID: 17377
  Gene Symbol: TAS2R4
  Gene Name: taste receptor, type 2, member 4
  Uniprot ID: Q9NYW5
  ENST ID: ENST00000247881
  CDS Start-End: 48-947
tgcctccactatcagcaccacaactgctgaatcctcaatgagtaaagatgcttcggttattctatttctctgctattattgcctcagttattttaaattttgtaggaatcattatgaatctgtttattacagtggtcaattgcaaaacttgggtcaaaagccatagaatctcctcttctgataggattctgttcagcctgggcatcaccaggtttcttatgctgggactatttctggtgaacaccatctacttcgtctcttcaaatacggaaaggtcagtctacctgtctgctttttttgtgttgtgtttcatgtttttggactcgagcagtgtctggtttgtgaccttgctcaatatcttgtactgtgtgaagattactaacttccaacactcagtgtttctcctgctgaagcggaatatctccccaaagatccccaggctgctgctggcctgtgtgctgatttctgctttcaccacttgcctgtacatcacgcttagccaggcatcaccttttcctgaacttgtgactacgagaaataacacatcatttaatatcagtgagggcatcttgtctttagtggtttctttggtcttgagctcatctctccagttcatcattaatgtgacttctgcttccttgctaatacactccttgaggagacatatacagaagatgcagaaaaatgccactggtttctggaatccccagacggaagctcatgtaggtgctatgaagctgatggtctatttcctcatcctctacattccatattcagttgctaccctggtccagtatctccccttttatgcagggatggatatggggaccaaatccatttgtctgatttttgccaccctttactctccaggacattctgttctcattattatcacacatcctaaactgaaaacaacagcaaagaagattctttgtttcaaaaaatagtggaatttcagtaaacaatacctagatttacctgatggtttgggggcaagattttctgtttgcagttttcccagtgatctggggaattcagttttgtgattgctgatctgacatcataggcttttgagtgcctgaatttcagttcattctgtaattttttttttttggtatgtaagtattttaaaataaggcacattctgtaagaaacttttttgaggcattatttgtcatgtattttgcatggccattgaatccatgtataatggaaatcatcacattgtttcattgtctattgaagtataatgggaaattcttccaaattagagaacacattggggtgcacgtgatgagttagatatttgtggtttagctgaggagccctgagtaagggctcagcagtggataggtggtcactgggagccactggactgaccgaaagcagaggaagggggttcagtgcaaagagaaaaggaaaaaaggaaggtttcagagagaaaagaaggaaagagaaaggtgaagagaaataggcgtacactgggccaggcgcggtggctcatgcttgtaatcccagctctttgggaggccgaggcaggtgaatcgtgaggtcaggagatcgagaccatcctggctaacacggtgaaaccctgtctctactaaaaatacaaaaaaattagctgggcgtggtggcgggcacctgtagtcccagctactcgggaggctgaggcaggagaatggcttcaacccaggaggcggagcttgcagtgagatgagatcgcgccactgcactccagtctgggcgacagagcaagactctgtctcaaaaaaagaaatagacgtacactctgggacaagacagaaaaagtatcctcacacttgctgggtaatagtaactgtgctattcctagcaagaaaccctaaggtttctaggcttgttctggaaaagaggatattgccagagttggtaagtagaggaaagtgattagtatttaagaaactgaatcaagaatggttccaaaaatcttaaaatccagggaaaccagcttaaggtcaaaggcaagtgctagataatgaaattaacaccatatgagtacaaatttacaaaatactgtacttcaccataggctatggaactcagtggaaagccaaaaaagcactggacaggtggtgggagtgcttgacttgtggtgaatttatttcatctgcttatacatttgtacacagcacagttcttctccagaatgttgtttctgtggctgggaccattggactgtggctccaaaagaacaacagtctgaagatgggatgttgacaagttttggaatgtcaattggggaatcataatttgtatttatttaggttttttttggtgttcataaaatgcttatgtaatatttacatatgtcaaataaatcttaaaattttataaattac

SEQ ID NO: 189293 - DNA, 1043 bp, Homo sapiens
  Payload ID: 17378
  Gene Symbol: TAS2R40
  Gene Name: taste receptor, type 2, member 40
  Uniprot ID: P59535
  ENST ID: ENST00000408947
  CDS Start-End: 43-1014
cccattcttggcgcagaaacctgaaagtcaggatcaaagagaatggcaacggtgaacacagatgccacagataaagacatatccaagttcaaggtcaccttcactttggtggtctccggaatagagtgcatcactggcatccttgggagtggcttcatcacggccatctatggggctgagtgggccaggggcaaaacactccccactggtgaccgcattatgttgatgctgagcttttccaggctcttgctacagatttggatgatgctggagaacattttcagtctgctattccgaattgtttataaccaaaactcagtgtatatcctcttcaaagtcatcactgtctttctgaaccattccaatctctggtttgctgcctggctcaaagtcttctattgtcttagaattgcaaacttcaatcatcctttgttcttcctgatgaagaggaaaatcatagtgctgatgccttggcttctcaggctgtcagtgttggtttccttaagcttcagctttcctctctcgagagatgtcttcaatgtgtatgtgaatagctccattcctatcccctcctccaactccacggagaagaagtacttctctgagaccaatatggtcaacctggtatttttctataacatggggatcttcgttcctctgatcatgttcatcctggcagccaccctgctgatcctctctctcaagagacacaccctacacatgggaagcaatgccacagggtccagggaccccagcatgaaggctcacataggggccatcaaagccaccagctactttctcatcctctacattttcaatgcaattgctctatttctttccacgtccaacatctttgacacttacagttcctggaatattttgtgcaagatcatcatggctgcctaccctgccggccactcagtacaactgatcttgggcaaccctgggctgagaagagcctggaagcggtttcagcaccaagttcctctttacctaaaagggcagactctgtgactggaactcacggagttctgcgggacctg

SEQ ID NO: 189294 - DNA, 924 bp, Homo sapiens
  Payload ID: 17379
  Gene Symbol: TAS2R41
  Gene Name: taste receptor, type 2, member 41
  Uniprot ID: P59536
  ENST ID: ENST00000408916
  CDS Start-End: 1-924
atgcaagcagcactgacggccttcttcgtgttgctctttagcctgctgagtcttctggggattgcagcgaatggcttcattgtgctggtgctgggcagggagtggctgcgatatggcaggttgctgcccttggatatgatcctcattagcttgggtgcctcccgcttctgcctgcagttggttgggacggtgcacaacttctactactctgcccagaaggtcgagtactctgggggtctcggccgacagttcttccatctacactggcacttcctgaactcagccaccttctggttttgcagctggctcagtgtcctgttctgtgtgaagattgctaacatcacacactccaccttcctgtggctgaagtggaggttcccagggtgggtgccctggctcctgttgggctctgtcctgatctccttcatcataaccctgctgtttttttgggtgaactaccctgtatatcaagaatttttaattagaaaattttctgggaacatgacctacaagtggaatacaaggatagaaacatactatttcccatccctgaaactggtcatctggtcaattcctttttctgtttttctggtctcaattatgctgttaattaattctctgaggaggcatactcagagaatgcagcacaacgggcacagcctgcaggaccccagcacccaggctcacaccagagctctgaagtccctcatctccttcctcattctttatgctctgtcctttctgtccctgatcattgatgccgcaaaatttatctccatgcagaacgacttttactggccatggcaaattgcagtctacctgtgcatatctgtccatcccttcatcctcatcttcagcaacctcaagcttcgaagcgtgttctcgcagctcctgttgttggcaaggggcttctgggtggcctag

SEQ ID NO: 189295 - DNA, 945 bp, Homo sapiens
  Payload ID: 17380
  Gene Symbol: TAS2R42
  Gene Name: taste receptor, type 2, member 42
  Uniprot ID: Q7RTR8
  ENST ID: ENST00000334266
  CDS Start-End: 1-945
atggccaccgaattggacaaaatctttctgattctggcaatagcagaattcatcatcagcatgctggggaatgtgttcattggactggtaaactgctctgaagggatcaagaaccaaaaggtcttctcagctgacttcatcctcacctgcttggctatctccacaattggacaactgttggtgatactgtttgattcatttctagtgggacttgcttcacatttatataccacatatagactaggaaaaactgttattatgctttggcacatgactaatcacttgacaacctggcttgccacctgcctaagcattttctatttctttaagatagcccacttcccccactcccttttcctctggctgaggtggaggatgaacggaatgattgttatgcttcttatattgtctttgttcttactgatttttgacagtttagtgctagaaatatttattgatatctcactcaatataatagataaaagtaatctgactttatatttagatgaaagtaaaactctctatgataaactctctattttaaaaactcttctcagcttgaccagttttatccccttttctctgttcctgacctccttgctttttttatttctgtccttggtgagacatactagaaatttgaagctcagttccttgggctctagagactccagcacagaggcccataggagggccatgaaaatggtgatgtctttccttttcctcttcatagttcattttttttccttacaagtggccaattggatattttttatgttgtggaacaacaagtgcataaagtttgtcatgttagccttaaatgcctttccctcgtgccactcatttattctcattctgggaaacagcaagctgcaacagacagctgtgaggctactgtggcatcttaggaactatacaaaaacaccaaaccctttacctttgtag

SEQ ID NO: 189296 - DNA, 945 bp, Homo sapiens; identical to SEQ ID NO: 189295
  Payload ID: 17380
  Gene Symbol: TAS2R42
  Gene Name: taste receptor, type 2, member 42
  ENST ID: ENST00000619463
  CDS Start-End: 1-945

SEQ ID NO: 189297 - DNA, 1027 bp, Homo sapiens
  Payload ID: 17381
  Gene Symbol: TAS2R43
  Gene Name: taste receptor, type 2, member 43
  Uniprot ID: P59537
  ENST ID: ENST00000531678
  CDS Start-End: 85-1014
tcagcgagaccacgaacccacctgcaggaaccaattccggacacaacaccagcatttaaaaaaattttttttgtctgttcagacatgataacttttctacccatcattttttccagtctggtagtggttacatttgttattggaaattttgctaatggcttcatagcactggtaaattccattgagtggttcaagagacaaaagatctcctttgctgaccaaattctcactgctctggcggtctccagagttggtttgctctgggtattattattaaactggtattcaactgtgttgaatccagcttttaatagtgtagaagtaagaactactgcttataatatctgggcagtgatcaaccatttcagcaactggcttgctactaccctcagcatattttatttgctcaagattgccaatttctccaactttatttttcttcacttaaagaggagagttaagagtgtcattctggtgatgttgttggggcctttgctatttttggcttgtcatctttttgtgataaacatgaatgagattgtgcggacaaaagaatttgaaggaaacatgacttggaagatcaaattgaagagtgcaatgtacttttcaaatatgactgtaaccatggtagcaaacttagtacccttcactctgaccctactatcttttatgctgttaatctgttctttgtgtaaacatctcaagaagatgcagctccatggtaaaggatctcaagatcccagcaccaaggtccacataaaagctttgcaaactgtgatctccttcctcttgttatgtgccatttactttctgtccataatgatatcagtttggagttttggaagtctggaaaacaaacctgtcttcatgttctgcaaagctattagattcagctatccttcaatccacccattcatcctgatttggggaaacaagaagctaaagcagacttttctttcagttttttggcaaatgaggtactgggtgaaaggagagaagacttcatctccatagattcacgagaggg

SEQ ID NO: 189298 - DNA, 1027 bp, Homo sapiens
  Payload ID: 17381
  Gene Symbol: TAS2R43
  Gene Name: taste receptor, type 2, member 43
  Uniprot ID: P59537
  ENST ID: ENST00000571879
  CDS Start-End: 85-1014
tcagcgagaccacgaacccacctgcaggaaccaattccggacacaacaccagcatttaaaaaaattttttttgtctgttcagacatgataacttttctacccatcattttttccagtctggtagtggttacatttgttattggaaattttgctaatggcttcatagcactggtaaattccattgagtcgttcaagagacaaaagatctcctttgctgaccaaattctcactgctctggcggtctccagagttggtttgctctgggtattattattaaactggtattcaactgtgttgaatccagcttttaatagtgtagaagtaagaactactgcttataatatctgggcagtgatcaaccatttcagcaactggcttgctactaccctcagcatattttatttgctcaagattgccaatttctccaactttatttttcttcacttaaagaggagagttaagagtgtcattctggtgatgttgttggggcctttgctatttttggcttgtcatctttttgtgataaacatgaatgagattgtgcggacaaaagaatttgaaggaaacatgacttggaagatcaaattgaagagtgcaatgtacttttcaaatatgactgtaaccatggtagcaaacttagtacccttcactctgaccctactatcttttatgctgttaatctgttctttgtgtaaacatctcaagaagatgcagctccgtggtaaaggatctcaagatcccagcacgaaggtccacataaaagctttgcaaactgtgatctccttcctcttgttatgtgccatttactttctgtccataatgatatcagtttggagttttggaagtctggaaaacaaacctgtcttcatgttctgcaaagctattagattcagctatccttcaatccacccattcatcctgatttggggaaacaagaagctaaagcagacttttctttcagttttttggcaaatgaggtactgggtgaaaggagagaagacttcatctccatagattcacgagaggg

SEQ ID NO: 189299 - DNA, 930 bp, Homo sapiens
  Payload ID: 17381
  Gene Symbol: TAS2R43
  Gene Name: taste receptor, type 2, member 43
  ENST ID: ENST00000617520
  CDS Start-End: 1-930
atgataacttttctgcccatcattttttccattctaatagtggttatatttgttattggaaattttgctaatggcttcatagcattggtaaattccattgagtgggtcaagagacaaaagatctcctttgttgaccaaattctcactgctctggcggtctccagagttggtttgctctgggtgttattactacattggtatgcaactcagttgaatccagctttttatagtgtagaagtaagaattactgcttataatgtctgggcagtaaccaaccatttcagcagctggcttgctactagcctcagcatgttttatttgctcaggattgccaatttctccaaccttatttttcttcgcataaagaggagagttaagagtgttgttctggtgatactgttggggcctttgctatttttggtttgtcatctttttgtgataaacatgaatcagattgtatggacaaaagaatttgaaggaaacatgacttggaagatcaaattgaagagtgcaatgtacttttcaaatatgactgtaaccatggtagcaaacttagtacccttcactctgaccctactatcttttatgctgttaatctgttctttgtgtaaacatctcaagaagatgcagctccgtggtaaaggatctcaagatcccagcacgaaggtccacataaaagctttgcaaactgtgatctccttcctcttgttatgtgccatttactttctgtccataatgatatcagtttggagttttggaagtctggaaaacaaacctgtcttcatgttctgcaaagctattagattcagctatccttcaatccacccattcatcctgatttggggaaacaagaagctaaagcagacttttctttcagttttttggcaaatgaggtactgggtgaaaggagagaagacttcatctccatag

SEQ ID NO: 189300 - DNA, 930 bp, Homo sapiens
  Payload ID: 17381
  Gene Symbol: TAS2R43
  Gene Name: taste receptor, type 2, member 43
  ENST ID: ENST00000610639
  CDS Start-End: 1-930
atgataacttttctgcccatcattttttccattctaatagtggttatatttgttattggaaattttgctaatggcttcatagcattggtaaattccattgagtggttcaagagacaaaagatctcctttgctgaccaaattctcactgctctggcggtctccagagttggtttgctctgggtattattattaaactggtattcaactgtgttgaatccagcttttaatagtgtagaagtaagaactactgcttataatatctgggcagtgatcaaccatttcagcaactggcttgctactaccctcagcatattttatttgctcaagattgccaatttctccaactttatttttcttcacttaaagaggagagttaagagtgtcattctggtgatgttgttggggcctttgctatttttggcttgtcatctttttgtgataaacatgaatgagattgtgcggacaaaagaatttgaaggaaacatgacttggaagatcaaattgaagagtgcaatgtacttttcaaatatgactgtaaccatggtagcaaacttagtacccttcactctgaccctactatcttttatgctgttaatctgttctttgtgtaaacatctcaagaagatgcagctccatggtaaaggatctcaagatcccagcaccaaggtccacataaaagctttgcaaactgtgatctccttcctcttgttatgtgccatttactttctgtccataatgatatcagtttggagttttggaagtctggaaaacaaacctgtcttcatgttctgcaaagctattagattcagctatccttcaatccacccattcatcctgatttggggaaacaagaagctaaagcagacttttctttcagttttttggcaaatgaggtactgggtgaaaggagagaagacttcatctccatag

SEQ ID NO: 189301 - DNA, 930 bp, Homo sapiens
  Payload ID: 17381
  Gene Symbol: TAS2R43
  Gene Name: taste receptor, type 2, member 43
  ENST ID: ENST00000632197
  CDS Start-End: 1-900
atgataacttttctgcccatcatattttccattctagtagtggttacatttgttattggaaattttgctaatggcttcatagcgttggtaaattccaccgagtgggtgaagagacaaaagatctcctttgctgaccaaattgtcactgctctggcggtctccagagttggtttgctctgggtgttattattaaattggtattcaactgtgttgaatccagctttttatagtgtagaattaagaactactgcttataatatctgggcagtaaccggccatttcagcaactggcctgctactagcctcagcatattttatttgctcaagattgccaatttctccaaccttatttttcttcgcttaaagaggagagttaagagtgtcattctggtggtgctgttggggcctttgctatttttggcttgtcatctttttgtggtaaacatgaatcagattgtatggacaaaagaatatgaaggaaacatgacttggaagatcaaattgaggcgtgcaatgtacctttcagatacgactgtaaccatgctagcaaacttagtaccctttactgtaaccctgatatcttttctgctgttagtctgttctctgtgtaaacatctcaagaagatgcagctccatggcaaaggatctcaagatcccagtaccaaggtccacataaaagttttgcaaactgtgatctccttcttcttgttacgtgccatttactttgtgtctgtaataatatcagtttggagttttaagaatctggaaaacaaacctgtcttcatgttctgccaagctattggattcagctgttcttcagcccacccgttcatcctgatttggggaaacaagaagctaaagcagacttatctttcagttttgtggcaaatgaggtactgagtgaaaggagagaagccttcatctccatag

SEQ ID NO: 189302 - DNA, 930 bp, Homo sapiens
  Payload ID: 17382
  Gene Symbol: TAS2R46
  Gene Name: taste receptor, type 2, member 46
  Uniprot ID: P59540
  ENST ID: ENST00000533467
  CDS Start-End: 1-930
atgataacttttctgcccatcattttttccattctaatagtggttacatttgtgattggaaattttgctaatggcttcatagcattggtaaattccattgagtggttcaagagacaaaagatctcttttgctgaccaaattctcactgctctggcagtctccagagttggtttactctgggtattagtattaaattggtatgcaactgagttgaatccagcttttaacagtatagaagtaagaattactgcttacaatgtctgggcagtaatcaaccatttcagcaactggcttgctactagcctcagcatattttatttgctcaagattgccaatttctccaaccttatttttcttcacttaaagaggagagttaagagtgttgttctggtgatactattggggcctttgctatttttggtttgtcatctttttgtgataaacatgaatcagattatatggacaaaagaatatgaaggaaacatgacttggaagatcaaactgaggagtgcaatgtacctttcaaatacaacggtaaccatcctagcaaacttagttcccttcactctgaccctgatatcttttctgctgttaatctgttctctgtgtaaacatctcaaaaagatgcagctccatggcaaaggatctcaagatcccagcatgaaggtccacataaaagctttgcaaactgtgacctccttcctcttgttatgtgccatttactttctgtccataatcatgtcagtttggagttttgagagtctggaaaacaaacctgtcttcatgttctgcgaagctattgcattcagctatccttcaacccacccattcatcctgatttggggaaacaagaagctaaagcagacttttctttcagttttgtggcatgtgaggtactgggtgaaaggagagaagccttcatcttcatag

SEQ ID NO: 189303 - DNA, 930 bp, Homo sapiens; identical to SEQ ID NO: 189302
  Payload ID: 17382
  Gene Symbol: TAS2R46
  Gene Name: taste receptor, type 2, member 46
  Uniprot ID: P59540
  ENST ID: ENST00000574263
  CDS Start-End: 1-930

SEQ ID NO: 189304 - DNA, 933 bp, Homo sapiens
  Payload ID: 17382
  Gene Symbol: TAS2R46
  Gene Name: taste receptor, type 2, member 46
  ENST ID: ENST00000622844
  CDS Start-End: 1-933
atgataacttttctacccatcattttttccagtctggtagtggttacatttgttattggaaattttgctaatggcttcatagcactggtaaattccattgagtcgttcaagagacaaaagatctcctttgctgaccaaattctcactgctctggcggtctccagagttggtttgctctgggtattattattaaactggtattcaactgtgttgaatccagcttcttttaacagtatagaagtaagaattactgcttacaatgtctgggcagtaatcaaccatttcagcaactggcttgctactagcctcagcatattttatttgctcaagattgccaatttctccaaccttatttttcttcacttaaagaggagagttaagagtgttgttctggtgatactattggggcctttgctatttttggtttgtcatctttttgtgataaacatgaatcagattatatggacaaaagaatatgaaggaaacatgacttggaagatcaaactgaggagtgcaatgtacctttcaaatacaacggtaaccatcctagcaaacttagttcccttcactctgaccctgatatcttttctgctgttaatctgttctctgtgtaaacatctcaaaaagatgcagctccatggcaaaggatctcaagatcccagcatgaaggtccacataaaagctttgcaaactgtgacctccttcctcttgttatgtgccatttactttctgtccataatcatgtcagtttggagttttgagagtctggaaaacaaacctgtcttcatgttctgcgaagctattgcattcagctatccttcaacccacccattcatcctgatttggggaaacaagaagctaaagcagacttttctttcagttttgtggcatgtgaggtactgggtgaaaggagagaagccttcatcttcatag

SEQ ID NO: 189305 - DNA, 960 bp, Homo sapiens
  Payload ID: 17382
  Gene Symbol: TAS2R46
  Gene Name: taste receptor, type 2, member 46
  ENST ID: ENST00000621490
  CDS Start-End: 1-960
atgataacttttctgcccatcattttttccattctaatagtggttacatttgtgattggaaattttgctaatggcttcatagcattggtaaattccattgagtggttcaagagacaaaagatctcttttgctgaccaaattctcactgctctggcagtctccagagttggtttactctgggtattagtattaaattggtatgcaactgagttgaatccagcttttaacagtatagaagtaagaattactgcttacaatgtctgggcagtaatcaaccatttcagcaactggcttgctactagcctcagcatattttatttgctcaagattgccaatttctccaaccttatttttcttcacttaaagaggagagttaagagtgttgttctggtgatactattggggcctttgctatttttggtttgtcatctttttgtgataaacatgaatcagattatatggacaaaagaatatgaaggaaacatgacttggaagatcaaactgaggagtgcaatgtacctttcaaatacaacggtaaccatcctagcaaacttagttcccttcactctgaccctgatatcttttctgctgttaatctgttctctgtgtaaacatctcaaaaagatgcagctccatggcaaaggatctcaagatcccagcatgaaggtccacataaaagctatgcaaactgtgacctccttcctcttgttatgtgccatttactttctgtccataatcatatcagtttggagttttgggagtctggaaaacaaacctgtcttcatgttctgcaaagctattagattcagctatccttcaatccacccattcatcctgatttggggaaacaagaagctaaagcagacttttctttcagttttgcggcaagtgaggtactgggtgaaagagagaagccttcatctccatagattcatgagaggggcattgtgtgtcttctag

SEQ ID NO: 189306 - DNA, 1018 bp, Homo sapiens
  Payload ID: 17382
  Gene Symbol: TAS2R46
  Gene Name: taste receptor, type 2, member 46
  ENST ID: ENST00000614128
  CDS Start-End: 73-999
cgaacccacctgcaggaaccaactccggatacaacaccagcattttaaaaatttctttttgtctgttcagacatgataacttttctgcccatcatattttccattctagtagtggttacatttgttattggaaattttgctaatggcttcatagcgttggtaaattccaccgagtgggtgaagagacaaaagatctcctttgctgaccaaattgtcactgctctggcggtctccagagttggtttgctctgggtgttattattaaattggtattcaactgtgttgaatccagctttttatagtgtagaattaagaactactgcttataatatctgggcagtaaccggccatttcagcaactggcctgctactagcctcagcatattttatttgctcaagattgccaatttctccaaccttatttttcttcgcttaaagaggagagttaagagtgtcattctggtggtgctgttggggcctttgctatttttggcttgtcatctttttgtgataaacatgaatcagattatatggacaaaagaatatgaaggaaacatgacttggaagatcaaactgaggagtgcaatgtacctttcaaatacaacggtaaccatcctagcaaacttagttcccttcactctgaccctgatatcttttctgctgttaatctgttctctgtgtaaacatctcaaaaagatgcagctccatggcaaaggatctcaagatcccagcatgaaggtccacataaaagctatgcaaactgtgacctccttcctcttgttatgtgccatttactttctgtccataatcatgtcagttagttttgagagtctggaaaacaaacctgtcttcatgttctgcgaagctattgcattcagctatccttcaacccacccattcatcctgatttggggaaacaagaagctaaagcagacttttctttcagttttgtggcatgtgaggtactgggtgaaaggagagaagccttcatcttcatagattcacaagagcagcattg

SEQ ID NO: 189307 - DNA, 930 bp, Homo sapiens
  Payload ID: 17382
  Gene Symbol: TAS2R46
  Gene Name: taste receptor, type 2, member 46
  ENST ID: ENST00000633803
  CDS Start-End: 1-750
atgataacttttctgcccatcattttttccattctaatagtggttacatttgtgattggaaattttgctaatggcttcatagcattggtaaattccattgagtggttcaagagacaaaagatctcttttgctgaccaaattctcactgctctggcagtctccagagttggtttactctgggtattagtattaaattggtatgcaactgagttgaatccagcttttaacagtatagaagtaagaattactgcttacaatgtctgggcagtaatcaaccatttcagcaactggcttgctactagcctcagcatattttatttgctcaagattgccaatttctccaaccttatttttcttcacttaaagaggagagttaagagtgttgttctggtgatactattggggcctttgctatttttggtttgtcatctttttgtgataaacatgaatcagattatatggacaaaagaatatgaaggaaacatgacttggaagatcaaactgaggagtgcaatgtacctttcaaatacaacggtaaccatcctagcaaacttagttcccttcactctgaccctgatatcttttctgctgttaatctgttctctgtgtaaacatctcaaaaagatgcagctccatggcaaaggatctcaagatcccagcatgaaggtccacataaaagctatgcaaactgtgacctccttcctcttgttatgtgccatttactttctgtccataatcatgtcagtttagagttttgagagtctggaaaacaaacctgtcttcatgttctgcgaagctattgcattcagctatccttcaacccacccattcatcctgatttggggaaacaagaagctaaagcagacttttctttcagttttgtggcatgtgaggtactgggtgaaaggagagaagccttcatcttcatag

SEQ ID NO: 189308 - DNA, 1151 bp, Homo sapiens
  Payload ID: 17383
  Gene Symbol: TAS2R5
  Gene Name: taste receptor, type 2, member 5
  Uniprot ID: Q9NYW4
  ENST ID: ENST00000247883
  CDS Start-End: 146-1045
cagctgttcagtctcgcttgaagacagattacggaaggacgaggccaaatccagattttgtggtgtgaaaatttaccctggtgtgttatcactaccaggggatctgacctcagccaggagcagtgagagcctcctctccccagccatgctgagcgctggcctaggactgctgatgctggtggcagtggttgaatttctcatcggtttaattggaaatggaagcctggtggtctggagttttagagaatggatcagaaaattcaactggtcctcatataacctcattatcctgggcctggctggctgccgatttctcctgcagtggctgatcattttggacttaagcttgtttccacttttccagagcagccgttggcttcgctatcttagtatcttctgggtcctggtaagccaggccagcttatggtttgccaccttcctcagtgtcttctattgcaagaagatcacgaccttcgatcgcccggcctacttgtggctgaagcagagggcctataacctgagtctctggtgccttctgggctactttataatcaatttgttacttacagtccaaattggcttaacattctatcatcctccccaaggaaacagcagcattcggtatccctttgaaagctggcagtacctgtatgcatttcagctcaattcaggaagttatttgcctttagtggtgtttcttgtttcctctgggatgctgattgtctctttgtatacacaccacaagaagatgaaggtccattcagctggtaggagggatgtccgggccaaggctcacatcactgcgctgaagtccttgggctgcttcctcttacttcacctggtttatatcatggccagccccttctccatcacctccaagacttatcctcctgatctcaccagtgtcttcatctgggagacactcatggcagcctatccttctcttcattctctcatattgatcatggggattcctagggtgaagcagacttgtcagaagatcctgtggaagacagtgtgtgctcggagatgctggggcccatgatctgggaagaaaagtgtggtcaggacactcttgggacgctcttttgatagctctctataagggagctgctttccatgtcttttaagattttccttcttttacacca

SEQ ID NO: 189309 - DNA, 1000 bp, Homo sapiens
  Payload ID: 17384
  Gene Symbol: TAS2R50
  Gene Name: taste receptor, type 2, member 50
  Uniprot ID: P59544
  ENST ID: ENST00000506868
  CDS Start-End: 53-952
tcacaaccagtgatattaggcttgcattttctttctttttttctgctcagatatgataacttttctatacatttttttttcaattctaataatggttttatttgttctcggaaactttgccaatggcttcatagcactggtaaatttcattgactgggtgaagagaaaaaagatctcctcagctgaccaaattctcactgctctggcggtctccagaattggtttgctctgggcattattattaaattggtatttaactgtgttgaatccagctttttatagtgtagaattaagaattacttcttataatgcctgggttgtaaccaaccatttcagcatgtggcttgctgctaacctcagcatattttatttgctcaagattgccaatttctccaaccttctttttcttcatttaaagaggagagttaggagtgtcattctggtgatactgttggggactttgatatttttggtttgtcatcttcttgtggcaaacatggatgagagtatgtgggcagaagaatatgaaggaaacatgactgggaagatgaaattgaggaatacagtacatctttcatatttgactgtaactaccctatggagcttcataccctttactctgtccctgatatcttttctgatgctaatctgttctctgtgtaaacatctcaagaagatgcagctccatggagaaggatcgcaagatctcagcaccaaggtccacataaaagctttgcaaactctgatctccttcctcttgttatgtgccattttctttctattcctaatcgtttcggtttggagtcctaggaggctgcggaatgacccggttgtcatggttagcaaggctgttggaaacatatatcttgcattcgactcattcatcctaatttggagaaccaagaagctaaaacacacctttcttttgattttgtgtcagattaggtgctgagtaaaagacctgaaactctcaactctctagattcacaagtgggacatt

SEQ ID NO: 189310 - DNA, 1000 bp, Homo sapiens; identical to SEQ ID NO: 189309
  Payload ID: 17384
  Gene Symbol: TAS2R50
  Gene Name: taste receptor, type 2, member 50
  Uniprot ID: P59544
  ENST ID: ENST00000575654
  CDS Start-End: 53-952

SEQ ID NO: 189311 - DNA, 1000 bp, Homo sapiens; identical to SEQ ID NO: 189309
  Payload ID: 17384
  Gene Symbol: TAS2R50
  Gene Name: taste receptor, type 2, member 50
  Uniprot ID: P59544
  ENST ID: ENST00000613831
  CDS Start-End: 53-952

SEQ ID NO: 189312 - DNA, 957 bp, Homo sapiens
  Payload ID: 17385
  Gene Symbol: TAS2R60
  Gene Name: taste receptor, type 2, member 60
  Uniprot ID: P59551
  ENST ID: ENST00000332690
  CDS Start-End: 1-957
atgaatggagaccacatggttctaggatcttcggtgactgacaagaaggccatcatcttggttaccattttactccttttacgcctggtagcaatagcaggcaatggcttcatcactgctgctctgggcgtggagtgggtgctacggagaatgttgttgccttgtgataagttattggttagcctaggggcctctcgcttctgtctgcagtcagtggtaatgggtaagaccatttatgttttcttgcatccgatggccttcccatacaaccctgtactgcagtttctagctttccagtgggacttcctgaatgctgccaccttatggtcctctacctggctcagtgtcttctattgtgtgaaaattgctaccttcacccaccctgtcttcttctggctaaagcacaagttgtctgggtggctaccatggatgctcttcagctctgtagggctctccagcttcaccaccattctatttttcataggcaaccacagaatgtatcagaactatttaaggaaccatctacaaccttggaatgtcactggcgatagcatacggagctactgtgagaaattctatctcttccctctaaaaatgattacttggacaatgcccactgctgtctttttcatttgcatgattttgctcatcacatctctgggaagacacaggaagaaggctctccttacaacctcaggattccgagagcccagtgtgcaggcacacataaaggctctgctggctctcctctcttttgccatgctcttcatctcatatttcctgtcactggtgttcagtgctgcaggtatttttccacctctggactttaaattctgggtgtgggagtcagtgatttatctgtgtgcagcagttcaccccatcattctgctcttcagcaactgcaggctgagagctgtgctgaagagtcgtcgttcctcaaggtgtgggacaccttga

SEQ ID NO: 189313 - DNA, 1096 bp, Homo sapiens
  Payload ID: 17386
  Gene Symbol: TAS2R7
  Gene Name: taste receptor, type 2, member 7
  Uniprot ID: Q9NYW3
  ENST ID: ENST00000240687
  CDS Start-End: 58-1014
gcaggtgtggatgtcaaactccatcaggtcaactagaaactaattgcatatttaaacatggcagataaagtgcagactactttattgttcttagcagttggagagttttcagtggggatcttagggaatgcattcattggattggtaaactgcatggactgggtcaagaagaggaaaattgcctccattgatttaatcctcacaagtctggccatatccagaatttgtctattgtgcgtaatactattagattgttttatattggtgctatatccagatgtctatgccactggtaaagaaatgagaatcattgacttcttctggacactaaccaatcatttaagtatctggtttgcaacctgcctcagcatttactatttcttcaagataggtaatttctttcacccacttttcctctggatgaagtggagaattgacagggtgatttcctggattctactggggtgcgtggttctctctgtgtttattagccttccagccactgagaatttgaacgctgatttcaggttttgtgtgaaggcaaagaggaaaacaaacttaacttggagttgcagagtaaataaaactcaacatgcttctaccaagttatttctcaacctggcaacgctgctccccttttgtgtgtgcctaatgtcctttttcctcttgatcctctccctgcggagacatatcaggcgaatgcagctcagtgccacagggtgcagagaccccagcacagaagcccatgtgagagccctgaaagctgtcatttccttccttctcctctttattgcctactatttgtcctttctcattgccacctccagctactttatgccagagacggaattagctgtgatttttggtgagtccatagctctaatctacccctcaagtcattcatttatcctaatactggggaacaataaattaagacatgcatctctaaaggtgatttggaaagtaatgtctattctaaaaggaagaaaattccaacaacataaacaaatctgaagagaaactatgcttttctaggacaaacaaagataagatgtttctaaattaacttcagttcttgcattaatgttttatgtga

SEQ ID NO: 189314 - DNA, 1096 bp, Homo sapiens; identical to SEQ ID NO: 189313
  Payload ID: 17386
  Gene Symbol: TAS2R7
  Gene Name: taste receptor, type 2, member 7
  Uniprot ID: Q9NYW3
  ENST ID: ENST00000574656
  CDS Start-End: 58-1014

SEQ ID NO: 189315 - DNA, 1096 bp, Homo sapiens; identical to SEQ ID NO: 189313
  Payload ID: 17386
  Gene Symbol: TAS2R7
  Gene Name: taste receptor, type 2, member 7
  Uniprot ID: Q9NYW3
  ENST ID: ENST00000613239
  CDS Start-End: 58-1014

SEQ ID NO: 189316 - DNA, 1243 bp, Homo sapiens
  Payload ID: 17387
  Gene Symbol: TAS2R8
  Gene Name: taste receptor, type 2, member 8
  Uniprot ID: Q9NYW2
  ENST ID: ENST00000240615
  CDS Start-End: 314-1243
ctttgaatttgcatgggagcaatttcagccaaacatttcaggtatcactcactaaaggataataattataatttttccaggctataaataactagtcaagctgctcattagttggtttcatcttcaggagtgtagagacaatcctatttcagaggagagctgaacacttccggaagaataacaacgtcgaaataacagcagatgaaaacattattgcatgattcgaagaattgatctatcatgctttaacaggtcacctgtaaattagctcatctacagtgatatttgaaatcagattgttctctctacaaacatgttcagtcctgcagataacatctttataatcctaataactggagaattcatactaggaatattggggaatggatacattgcactagtcaactggattgactggattaagaagaaaaagatttccacagttgactacatccttaccaatttagttatcgccagaatttgtttgatcagtgtaatggttgtaaatggcattgtaatagtactgaacccagatgtttatacaaaaaataaacaacagatagtcatttttaccttctggacatttgccaactacttaaatatgtggattaccacctgccttaatgtcttctattttctgaagatagccagttcctctcatccactttttctctggctgaagtggaaaattgatatggtggtgcactggatcctgctgggatgctttgccatttccttgttggtcagccttatagcagcaatagtactgagttgtgattataggtttcatgcaattgccaaacataaaagaaacattactgaaatgttccatgtgagtaaaataccatactttgaacccttgactctctttaacctgtttgcaattgtcccatttattgtgtcactgatatcatttttccttttagtaagatctttatggagacataccaagcaaataaaactctatgctaccggcagtagagaccccagcacagaagttcatgtgagagccattaaaactatgacttcatttatcttcttttttttcctatactatatttcttctattttgatgacctttagctatcttatgacaaaatacaagttagctgtggagtttggagagattgcagcaattctctaccccttgggtcactcacttattttaattgttttaaataataaactgaggcagacatttgtcagaatgctgacatgtagaaaaattgcctgcatgatatga

SEQ ID NO: 189317 - DNA, 1243 bp, Homo sapiens; identical to SEQ ID NO: 189316
  Payload ID: 17387
  Gene Symbol: TAS2R8
  Gene Name: taste receptor, type 2, member 8
  Uniprot ID: Q9NYW2
  ENST ID: ENST00000572823
  CDS Start-End: 314-1243

SEQ ID NO: 189318 - DNA, 1243 bp, Homo sapiens; identical to SEQ ID NO: 189316
  Payload ID: 17387
  Gene Symbol: TAS2R8
  Gene Name: taste receptor, type 2, member 8
  Uniprot ID: Q9NYW2
  ENST ID: ENST00000610444
  CDS Start-End: 314-1243

SEQ ID NO: 189319 - DNA, 1032 bp, Homo sapiens
  Payload ID: 17388
  Gene Symbol: TAS2R9
  Gene Name: taste receptor, type 2, member 9
  Uniprot ID: Q9NYW1
  ENST ID: ENST00000240691
  CDS Start-End: 94-1032
gtctaagaggcagacagatacattgttcttcactggtcagctgaaagtcaattcatcatcagtgatattcaaaaatcacaagtctttgctggcatgccaagtgcaatagaggcaatatatattattttaattgctggtgaattgaccatagggatttggggaaatggattcattgtactagttaactgcattgactggctcaaaagaagagatatttccttgattgacatcatcctgatcagcttggccatctccagaatctgtctgctgtgtgtaatatcattagatggcttctttatgctgctctttccaggtacatatggcaatagcgtgctagtaagcattgtgaatgttgtctggacatttgccaataattcaagtctctggtttacttcttgcctcagtatcttctatttactcaagatagccaatatatcgcacccatttttcttctggctgaagctaaagatcaacaaggtcatgcttgcgattcttctggggtcctttcttatctctttaattattagtgttccaaagaatgatgatatgtggtatcaccttttcaaagtcagtcatgaagaaaacattacttggaaattcaaagtgagtaaaattccaggtactttcaaacagttaaccctgaacctgggggtgatggttccctttatcctttgcctgatctcatttttcttgttacttttctccctagttagacacaccaagcagattcgactgcatgctacagggttcagagaccccagtacagaggcccacatgagggccataaaggcagtgatcatctttctgctcctcctcatcgtgtactacccagtctttcttgttatgacctctagcgctctgattcctcagggaaaattagtgttgatgattggtgacatagtaactgtcattttcccatcaagccattcattcattctaattatgggaaatagcaagttgagggaagcttttctgaagatgttaagatttgtgaagtgtttccttagaagaagaaagccttttgttccatag

SEQ ID NO: 189320 - DNA, 1032 bp, Homo sapiens; identical to SEQ ID NO: 189319
  Payload ID: 17388
  Gene Symbol: TAS2R9
  Gene Name: taste receptor, type 2, member 9
  Uniprot ID: Q9NYW1
  ENST ID: ENST00000573524
  CDS Start-End: 94-1032

SEQ ID NO: 189321 - DNA, 1032 bp, Homo sapiens; identical to SEQ ID NO: 189319
  Payload ID: 17388
  Gene Symbol: TAS2R9
  Gene Name: taste receptor, type 2, member 9
  Uniprot ID: Q9NYW1
  ENST ID: ENST00000616297
  CDS Start-End: 94-1032

SEQ ID NO: 189322 - DNA, 1861 bp, Homo sapiens
  Payload ID: 17389
  Gene Symbol: TBP
  Gene Name: TATA box binding protein
  Uniprot ID: P20226
  ENST ID: ENST00000230354
  CDS Start-End: 237-1256
ggcaggttcgctgtggcgggcgcctgggccgccggctgtttaacttcgcttccgctggcccatagtgatctttgcagtgacccagcagcatcactgtttcttggcgtgtgaagataacccaaggaattgaggaagttgctgagaagagtgtgctggagatgctctaggaaaaaattgaatagtgagacgagttccagcgcaagggtttctggtttgccaagaagaaagtgaacatcatggatcagaacaacagcctgccaccttacgctcagggcttggcctcccctcagggtgccatgactcccggaatccctatctttagtccaatgatgccttatggcactggactgaccccacagcctattcagaacaccaatagtctgtctattttggaagagcaacaaaggcagcagcagcaacaacaacagcagcagcagcagcagcagcagcaacagcaacagcagcagcagcagcagcagcagcagcagcagcagcagcagcagcagcagcagcagcaacaggcagtggcagctgcagccgttcagcagtcaacgtcccagcaggcaacacagggaacctcaggccaggcaccacagctcttccactcacagactctcacaactgcacccttgccgggcaccactccactgtatccctcccccatgactcccatgacccccatcactcctgccacgccagcttcggagagttctgggattgtaccgcagctgcaaaatattgtatccacagtgaatcttggttgtaaacttgacctaaagaccattgcacttcgtgcccgaaacgccgaatataatcccaagcggtttgctgcggtaatcatgaggataagagagccacgaaccacggcactgattttcagttctgggaaaatggtgtgcacaggagccaagagtgaagaacagtccagactggcagcaagaaaatatgctagagttgtacagaagttgggttttccagctaagttcttggacttcaagattcagaatatggtggggagctgtgatgtgaagtttcctataaggttagaaggccttgtgctcacccaccaacaatttagtagttatgagccagagttatttcctggtttaatctacagaatgatcaaacccagaattgttctccttatttttgtttctggaaaagttgtattaacaggtgctaaagtcagagcagaaatttatgaagcatttgaaaacatctaccctattctaaagggattcaggaagacgacgtaatggctctcatgtacccttgcctcccccacccccttctttttttttttttaaacaaatcagtttgttttggtacctttaaatggtggtgttgtgagaagatggatgttgagttgcagggtgtggcaccaggtgatgcccttctgtaagtgcccaccgcgggatgccgggaaggggcattatttgtgcactgagaacaccgcgcagcgtgactgtgagttgctcataccgtgctgctatctgggcagcgctgcccatttatttatatgtagattttaaacactgctgttgacaagttggtttgagggagaaaactttaagtgttaaagccacctctataattgattggactttttaattttaatgtttttccccatgaaccacagtttttatatttctaccagaaaagtaaaaatcttttttaaaagtgttgtttttctaatttataactcctaggggttatttctgtgccagacacattccacctctccagtattgcaggacagaatatatgtgttaatgaaaatgaatggctgtacatatttttttctttcttcagagtactctgtacaataaatgcagtttataaaagtgttagattgttgtta

SEQ ID NO: 189323 - DNA, 1903 bp, Homo sapiens
  Payload ID: 17389
  Gene Symbol: TBP
  Gene Name: TATA box binding protein
  Uniprot ID: P20226
  ENST ID: ENST00000392092
  CDS Start-End: 280-1299
ggcggaagtgacattatcaacgcgcgccaggggttcagtgaggtcgggcaggttcgctgtggcgggcgcctgggccgccggctgtttaacttcgcttccgctggcccatagtgatctttgcagtgacccagcatcactgtttcttggcgtgtgaagataacccaaggaattgaggaagttgctgagaagagtgtgctggagatgctctaggaaaaaattgaatagtgagacgagttccagcgcaagggtttctggtttgccaagaagaaagtgaacatcatggatcagaacaacagcctgccaccttacgctcagggcttggcctcccctcagggtgccatgactcccggaatccctatctttagtccaatgatgccttatggcactggactgaccccacagcctattcagaacaccaatagtctgtctattttggaagagcaacaaaggcagcagcagcaacaacaacagcagcagcagcagcagcagcagcaacagcaacagcagcagcagcagcagcagcagcagcagcagcagcagcagcagcagcagcagcagcaacaggcagtggcagctgcagccgttcagcagtcaacgtcccagcaggcaacacagggaacctcaggccaggcaccacagctcttccactcacagactctcacaactgcacccttgccgggcaccactccactgtatccctcccccatgactcccatgacccccatcactcctgccacgccagcttcggagagttctgggattgtaccgcagctgcaaaatattgtatccacagtgaatcttggttgtaaacttgacctaaagaccattgcacttcgtgcccgaaacgccgaatataatcccaagcggtttgctgcggtaatcatgaggataagagagccacgaaccacggcactgattttcagttctgggaaaatggtgtgcacaggagccaagagtgaagaacagtccagactggcagcaagaaaatatgctagagttgtacagaagttgggttttccagctaagttcttggacttcaagattcagaatatggtggggagctgtgatgtgaagtttcctataaggttagaaggccttgtgctcacccaccaacaatttagtagttatgagccagagttatttcctggtttaatctacagaatgatcaaacccagaattgttctccttatttttgtttctggaaaagttgtattaacaggtgctaaagtcagagcagaaatttatgaagcatttgaaaacatctaccctattctaaagggattcaggaagacgacgtaatggctctcatgtacccttgcctcccccacccccttctttttttttttttaaacaaatcagtttgttttggtacctttaaatggtggtgttgtgagaagatggatgttgagttgcagggtgtggcaccaggtgatgcccttctgtaagtgcccaccgcgggatgccgggaaggggcattatttgtgcactgagaacaccgcgcagcgtgactgtgagttgctcataccgtgctgctatctgggcagcgctgcccatttatttatatgtagattttaaacactgctgttgacaagttggtttgagggagaaaactttaagtgttaaagccacctctataattgattggactttttaattttaatgtttttccccatgaaccacagtttttatatttctaccagaaaagtaaaaatcttttttaaaagtgttgtttttctaatttataactcctaggggttatttctgtgccagacacattccacctctccagtattgcaggacagaatatatgtgttaatgaaaatgaatggctgtacatatttttttctttcttcagagtactctgtacaataaatgcagtttataaaagtgttagattgttgtt

SEQ ID NO: 189324 - DNA, 935 bp, Homo sapiens
  Payload ID: 17389
  Gene Symbol: TBP
  Gene Name: TATA box binding protein
  ENST ID: ENST00000421512
  CDS Start-End: 311-935
ggagcaactcgctgaagccgagggcagaactggcggaagtgacattatcaacgcgcgccaggggttcagtgaggtcgggcaggttcgctgtggcgggcgcctgggccgccggctgtttaacttcgcttccgctggcccatagtgatctttgcagtgacccagcatcactgtttcttggcgtgtgaagataacccaaggaattgaggaagttgctgagaagagtgtgctggagatgctctaggaaaaaattgaatagtgagacgagttccagcgcaagggtttctggtttgccaagaagaaagtgaacatcatggatcagaacaacagcctgccaccttacgctcagggcttggcctcccctcagggtgccatgactcccggaatccctatctttagtccaatgatgccttatggcactggactgaccccacagcctattcagaacaccaatagtctgtctattttggaagagcaacaaaggcagcagcagcaacaacaacagcagcagcagcagcagcagcagcaacagcaacagcagcagcagcagcagcagcagcagcagcagcagcagcagcagcagcagcagcagcaacaggcagtggcagctgcagccgttcagcagtcaacgtcccagcaggcaacacagggaacctcaggccaggcaccacagctcttccactcacagactctcacaactgcacccttgccgggcaccactccactgtatccctcccccatgactcccatgacccccatcactcctgccacgccagcttcggagagttctgggattgtaccgcagctgcaaaatattgtatccacagtgaatcttggttgtaaacttgacctaaagaccattgcacttcgtgcccgaaacgccgaatataatcccaagcggtttgctgcggtaatcatgaggataagagagccacgaa

SEQ ID NO: 189325 - DNA, 892 bp, Homo sapiens
  Payload ID: 17389
  Gene Symbol: TBP
  Gene Name: TATA box binding protein
  ENST ID: ENST00000446829
  CDS Start-End: 1-304
tgaagaacagtccagactggcagcaagaaaatatgctagagttgtacagaagttgggttttccagctaagttcttggacttcaagattcagaatatggtggggagctgtgatgtgaagtttcctataagttatgagccagagttatttcctggtttaatctacagaatgatcaaacccagaattgttctccttatttttgtttctggaaaagttgtattaacaggtgctaaagtcagagcagaaatttatgaagcatttgaaaacatctaccctattctaaagggattcaggaagacgacgtaatggctctcatgtacccttgcctcccccacccccttctttttttttttttaaacaaatcagtttgttttggtacctttaaatggtggtgttgtgagaagatggatgttgagttgcagggtgtggcaccaggtgatgcccttctgtaagtgcccaccgcgggatgccgggaaggggcattatttgtgcactgagaacaccgcgcagcgtgactgtgagttgctcataccgtgctgctatctgggcagcgctgcccatttatttatatgtagattttaaacactgctgttgacaagttggtttgagggagaaaactttaagtgttaaagccacctctataattgattggactttttaattttaatgtttttccccatgaaccacagtttttatatttctaccagaaaagtaaaaatcttttttaaaagtgttgtttttctaatttataactcctaggggttatttctgtgccagacacattccacctctccagtattgcaggacagaatatatgtgttaatgaaaatgaatggctgtacatatttttttctttcttcagagtactctgtacaataaatgcagtttataaaa

SEQ ID NO: 189326 - DNA, 703 bp, Homo sapiens
  Payload ID: 17389
  Gene Symbol: TBP
  Gene Name: TATA box binding protein
  ENST ID: ENST00000423353
  CDS Start-End: 252-703
gttccggcctgtaacggccactcggccgccactcccgcctggtgccctactctgctgtgtttcgcaggcagcttcccatcgtacgattgtggggctcaggcagcatcactgtttcttggcgtgtgaagataacccaaggaattgaggaagttgctgagaagagtgtgctggagatgctctaggaaaaaattgaatagtgagacgagttccagcgcaagggtttctggtttgccaagaagaaagtgaacatcatggatcagaacaacagcctgccaccttacgctcagggcttggcctcccctcagggtgccatgactcccggaatccctatctttagtccaatgatgccttatggcactggactgaccccacagcctattcagaacaccaatagtctgtctattttggaagagcaacaaaggcagcagcagcaacaacaacagcagcagcagcagcagcagcagcaacagcaacagcagcagcagcagcagcagcagcagcagcagcagcagcagcagcagcagcagcagcaacaggcagtggcagctgcagccgttcagcagtcaacgtcccagcaggcaacacagggaacctcaggccaggcaccacagctcttccactcacagactctcacaactgcacccttgccgggcaccactccactgtatccctcccccatgactcccatgacccccatcactcc

SEQ ID NO: 189327 - DNA, 1701 bp, Homo sapiens
  Payload ID: 17389
  Gene Symbol: TBP
  Gene Name: TATA box binding protein
  Uniprot ID: P20226
  ENST ID: ENST00000540980
  CDS Start-End: 138-1097
ggcggaagtgacattatcaacgcgcgccaggggttcagtgaggtcgggcaggttcgctgtggcgggcgcctgggccgccggctgtttaacttcgcttccgctggcccatagtgatctttgcagtgacccagggtgccatgactcccggaatccctatctttagtccaatgatgccttatggcactggactgaccccacagcctattcagaacaccaatagtctgtctattttggaagagcaacaaaggcagcagcagcaacaacaacagcagcagcagcagcagcagcagcaacagcaacagcagcagcagcagcagcagcagcagcagcagcagcagcagcagcagcagcagcagcaacaggcagtggcagctgcagccgttcagcagtcaacgtcccagcaggcaacacagggaacctcaggccaggcaccacagctcttccactcacagactctcacaactgcacccttgccgggcaccactccactgtatccctcccccatgactcccatgacccccatcactcctgccacgccagcttcggagagttctgggattgtaccgcagctgcaaaatattgtatccacagtgaatcttggttgtaaacttgacctaaagaccattgcacttcgtgcccgaaacgccgaatataatcccaagcggtttgctgcggtaatcatgaggataagagagccacgaaccacggcactgattttcagttctgggaaaatggtgtgcacaggagccaagagtgaagaacagtccagactggcagcaagaaaatatgctagagttgtacagaagttgggttttccagctaagttcttggacttcaagattcagaatatggtggggagctgtgatgtgaagtttcctataaggttagaaggccttgtgctcacccaccaacaatttagtagttatgagccagagttatttcctggtttaatctacagaatgatcaaacccagaattgttctccttatttttgtttctggaaaagttgtattaacaggtgctaaagtcagagcagaaatttatgaagcatttgaaaacatctaccctattctaaagggattcaggaagacgacgtaatggctctcatgtacccttgcctcccccacccccttctttttttttttttaaacaaatcagtttgttttggtacctttaaatggtggtgttgtgagaagatggatgttgagttgcagggtgtggcaccaggtgatgcccttctgtaagtgcccaccgcgggatgccgggaaggggcattatttgtgcactgagaacaccgcgcagcgtgactgtgagttgctcataccgtgctgctatctgggcagcgctgcccatttatttatatgtagattttaaacactgctgttgacaagttggtttgagggagaaaactttaagtgttaaagccacctctataattgattggactttttaattttaatgtttttccccatgaaccacagtttttatatttctaccagaaaagtaaaaatcttttttaaaagtgttgtttttctaatttataactcctaggggttatttctgtgccagacacattccacctctccagtattgcaggacagaatatatgtgttaatgaaaatgaatggctgtacatatttttttctttcttcagagtactctgtacaataaatgcagtttataaaagtgttagattgttgtt

SEQ ID NO: 189328 - DNA, 1750 bp, Homo sapiens
  Payload ID: 17389
  Gene Symbol: TBP
  Gene Name: TATA box binding protein
  ENST ID: ENST00000616883
  CDS Start-End: 280-1146
ggcggaagtgacattatcaacgcgcgccaggggttcagtgaggtcgggcaggttcgctgtggcgggcgcctgggccgccggctgtttaacttcgcttccgctggcccatagtgatctttgcagtgacccagcatcactgtttcttggcgtgtgaagataacccaaggaattgaggaagttgctgagaagagtgtgctggagatgctctaggaaaaaattgaatagtgagacgagttccagcgcaagggtttctggtttgccaagaagaaagtgaacatcatggatcagaacaacagcctgccaccttacgctcagggcttggcctcccctcagggtgccatgactcccggaatccctatctttagtccaatgatgccttatggcactggactgaccccacagcctattcagaacaccaatagtctgtctattttggaagagcaacaaaggcaggcaacacagggaacctcaggccaggcaccacagctcttccactcacagactctcacaactgcacccttgccgggcaccactccactgtatccctcccccatgactcccatgacccccatcactcctgccacgccagcttcggagagttctgggattgtaccgcagctgcaaaatattgtatccacagtgaatcttggttgtaaacttgacctaaagaccattgcacttcgtgcccgaaacgccgaatataatcccaagcggtttgctgcggtaatcatgaggataagagagccacgaaccacggcactgattttcagttctgggaaaatggtgtgcacaggagccaagagtgaagaacagtccagactggcagcaagaaaatatgctagagttgtacagaagttgggttttccagctaagttcttggacttcaagattcagaatatggtggggagctgtgatgtgaagtttcctataaggttagaaggccttgtgctcacccaccaacaatttagtagttatgagccagagttatttcctggtttaatctacagaatgatcaaacccagaattgttctccttatttttgtttctggaaaagttgtattaacaggtgctaaagtcagagcagaaatttatgaagcatttgaaaacatctaccctattctaaagggattcaggaagacgacgtaatggctctcatgtacccttgcctcccccacccccttctttttttttttttaaacaaatcagtttgttttggtacctttaaatggtggtgttgtgagaagatggatgttgagttgcagggtgtggcaccaggtgatgcccttctgtaagtgcccaccgcgggatgccgggaaggggcattatttgtgcactgagaacaccgcgcagcgtgactgtgagttgctcataccgtgctgctatctgggcagcgctgcccatttatttatatgtagattttaaacactgctgttgacaagttggtttgagggagaaaactttaagtgttaaagccacctctataattgattggactttttaattttaatgtttttccccatgaaccacagtttttatatttctaccagaaaagtaaaaatcttttttaaaagtgttgtttttctaatttataactcctaggggttatttctgtgccagacacattccacctctccagtattgcaggacagaatatatgtgttaatgaaaatgaatggctgtacatatttttttctttcttcagagtactctgtacaataaatgcagtttataaaagtgttagattgttgtt

SEQ ID NO: 189329 - DNA, 1894 bp, Homo sapiens
  Payload ID: 17390
  Gene Symbol: TAF1A
  Gene Name: TATA box binding protein (TBP)-associated factor, RNA polymerase I, A, 48kDa
  Uniprot ID: Q15573
  ENST ID: ENST00000352967
  CDS Start-End: 190-1542
gccaacgatacgcctgctgcagcaggaggagttacgagccgggccgcgcgctgcctaaatacctaaaccaggtttagcgcctgctcatataaagctctcctaactcgtcttccggtgggaatttcttcacgtgggccggagtcggagactgagtttagctttactgaggagctctaaatttaggcgggtatgagtgatttcagtgaagaattaaaagggcctgtgacagatgatgaagaagtggaaacatctgtgctcagtggtgcaggaatgcattttccttggcttcaaacatacgtagaaactgtggccattggagggaaaaggaggaaggattttgctcagacaacaagtgcttgtttaagttttatccaagaagctctgctgaagcaccaatggcagcaagctgcagaatacatgtacagttattttcagaccttggaagattcagatagctacaaaaggcaggctgcacctgagattatttggaagctcggaagtgaaattctattttatcatcccaaaagcaacatggagagtttcaatacttttgctaaccggatgaaaaatattggcgtcatgaattatttaaagatctccttacaacatgcattataccttctgcatcatggaatgcttaaagatgctaagagaaatctgagtgaggcagagacatggagacatggtgaaaatacgtcttcccgggaaatattaatcaaccttattcaggcctataaagggcttttacagtattatacctggtctgaaaagaagatggaattgtcaaagcttgataaggatgattatgcttacaatgcagtagcccaggatgtgttcaaccacagctggaagacatctgcaaatatttctgcattgattaaaattcctggagtttgggacccttttgtgaagagttatgtagaaatgctggaattctatggggatcgagatggagcccaagaggtactcaccaattatgcatatgatgaaaagtttccatcaaatccaaatgcccatatctacttatacaactttctaaagagacagaaggcaccaagatcaaaattgataagtgtgcttaagattttgtatcagattgtaccatctcataaattgatgttggaattccatacattacttagaaaatcagaaaaagaagaacaccgtaaactggggttggaggtattatttggagtcttagattttgccggatgcactaagaatataactgcttggaaatacttggcaaaatatctgaaaaatatcttaatgggaaaccaccttgcgtgggttcaagaagagtggaactccaggaaaaactggtggccaggctttcatttcagctacttttgggcaaaaagtgattggaaggaagatacagctttggcctgtgagaaagcttttgtggctggtttactgttaggaaaaggttgtagatatttccggtatattttaaagcaagatcaccaaatcttagggaagaaaattaagcggatgaagagatctgtgaaaaaatacagtattgtaaatccaagactctgatactgaattttagttatttcacagttgtagctacacagtaagtagcttggtagatagttattgaatgtatttatgtagtgtattaagaagcttatattactacaaaaaacttatttttatatatttttatatttttgtattatttatagctagagaaacaatattactgcctttgctctttgtaactatgtctgttttcttttttgtaatgttaaatgttacatttgttaaggaataattcttcaaatgacaaactaattacagaatatagctctacagcagttattgtttgcaaatactttgcctcttgctattgtgtaataaactgtaacttgtagtgctgtgaaatgta

SEQ ID NO: 189330 - DNA, 1966 bp, Homo sapiens
  Payload ID: 17390
  Gene Symbol: TAF1A
  Gene Name: TATA box binding protein (TBP)-associated factor, RNA polymerase I, A, 48kDa
  Uniprot ID: Q15573
  ENST ID: ENST00000350027
  CDS Start-End: 210-1562
acttccggggtcgaggcgaggccaacgatacgcctgctgcagcaggaggagttacgagccgggccgcgcgctgcctaaatacctaaaccaggtttagcgcctgctcatataaagctctcctaactcgtcttccggtgggaatttcttcacgtgggccggagtcggagactgagtttagctttactgaggagctctaaatttaggcgggtatgagtgatttcagtgaagaattaaaagggcctgtgacagatgatgaagaagtggaaacatctgtgctcagtggtgcaggaatgcattttccttggcttcaaacatacgtagaaactgtggccattggagggaaaaggaggaaggattttgctcagacaacaagtgcttgtttaagttttatccaagaagctctgctgaagcaccaatggcagcaagctgcagaatacatgtacagttattttcagaccttggaagattcagatagctacaaaaggcaggctgcacctgagattatttggaagctcggaagtgaaattctattttatcatcccaaaagcaacatggagagtttcaatacttttgctaaccggatgaaaaatattggcgtcatgaattatttaaagatctccttacaacatgcattataccttctgcatcatggaatgcttaaagatgctaagagaaatctgagtgaggcagagacatggagacatggtgaaaatacgtcttcccgggaaatattaatcaaccttattcaggcctataaagggcttttacagtattatacctggtctgaaaagaagatggaattgtcaaagcttgataaggatgattatgcttacaatgcagtagcccaggatgtgttcaaccacagctggaagacatctgcaaatatttctgcattgattaaaattcctggagtttgggacccttttgtgaagagttatgtagaaatgctggaattctatggggatcgagatggagcccaagaggtactcaccaattatgcatatgatgaaaagtttccatcaaatccaaatgcccatatctacttatacaactttctaaagagacagaaggcaccaagatcaaaattgataagtgtgcttaagattttgtatcagattgtaccatctcataaattgatgttggaattccatacattacttagaaaatcagaaaaagaagaacaccgtaaactggggttggaggtattatttggagtcttagattttgccggatgcactaagaatataactgcttggaaatacttggcaaaatatctgaaaaatatcttaatgggaaaccaccttgcgtgggttcaagaagagtggaactccaggaaaaactggtggccaggctttcatttcagctacttttgggcaaaaagtgattggaaggaagatacagctttggcctgtgagaaagcttttgtggctggtttactgttaggaaaaggttgtagatatttccggtatattttaaagcaagatcaccaaatcttagggaagaaaattaagcggatgaagagatctgtgaaaaaatacagtattgtaaatccaagactctgatactgaattttagttatttcacagttgtagctacacagtataccaccatgaagaaatatattggtgatgagttctattgaggaattttgaaaagagagaaggatttagaaaaaagactctttctcggccgggcgcagtggctcacacttctaatcccagcacttgggaggccgaggtgggtggatcatgaggtcaggagttcaagaccagcctggccaacacagtgaaaccctgtctctactaaaaatacaaaaagtagctgggcgcagtggcgggcatttgtaatcccagatactcgggaggctgaagcaggagaattgcttgaacccgggaggtggaggttgcagtgagccgagattgcaccaccgtactcctgcctgggcgacagaactagactctgtctc

SEQ ID NO: 189331 - DNA, 1648 bp, Homo sapiens
  Payload ID: 17390
  Gene Symbol: TAF1A
  Gene Name: TATA box binding protein (TBP)-associated factor, RNA polymerase I, A, 48kDa
  Uniprot ID: Q15573
  ENST ID: ENST00000366890
  CDS Start-End: 234-1244
acgtgggccggagtcggagactgagtttagctttactgaggagctctaaatttaggcgggtatgagtgatttcagtgaagaattaaaagggcctgtgacagatgatgaagaagtggaaacatctgtgctcagtggtgcaggaatgcattttccttggcttcaaacatacgtagaaactgtggattatttggaagctcggaagtgaaattctattttatcatcccaaaagcaacatggagagtttcaatacttttgctaaccggatgaaaaatattggcgtcatgaattatttaaagatctccttacaacatgcattataccttctgcatcatggaatgcttaaagatgctaagagaaatctgagtgaggcagagacatggagacatggtgaaaatacgtcttcccgggaaatattaatcaaccttattcaggcctataaagggcttttacagtattatacctggtctgaaaagaagatggaattgtcaaagcttgataaggatgattatgcttacaatgcagtagcccaggatgtgttcaaccacagctggaagacatctgcaaatatttctgcattgattaaaattcctggagtttgggacccttttgtgaagagttatgtagaaatgctggaattctatggggatcgagatggagcccaagaggtactcaccaattatgcatatgatgaaaagtttccatcaaatccaaatgcccatatctacttatacaactttctaaagagacagaaggcaccaagatcaaaattgataagtgtgcttaagattttgtatcagattgtaccatctcataaattgatgttggaattccatacattacttagaaaatcagaaaaagaagaacaccgtaaactggggttggaggtattatttggagtcttagattttgccggatgcactaagaatataactgcttggaaatacttggcaaaatatctgaaaaatatcttaatgggaaaccaccttgcgtgggttcaagaagagtggaactccaggaaaaactggtggccaggctttcatttcagctacttttgggcaaaaagtgattggaaggaagatacagctttggcctgtgagaaagcttttgtggctggtttactgttaggaaaaggttgtagatatttccggtatattttaaagcaagatcaccaaatcttagggaagaaaattaagcggatgaagagatctgtgaaaaaatacagtattgtaaatccaagactctgatactgaattttagttatttcacagttgtagctacacagtataccaccatgaagaaatatattggtgatgagttctattgaggaattttgaaaagagagaaggatttagaaaaaagactctttctcggccgggcgcagtggctcacacttctaatcccagcacttgggaggccgaggtgggtggatcatgaggtcaggagttcaagaccagcctggccaacacagtgaaaccctgtctctactaaaaatacaaaaagtagctgggcgcagtggcgggcatttgtaatcccagatactcgggaggctgaagcaggagaattgcttgaacccgggaggtggaggttgcagtgagccgagattgcaccaccgtactcctgcctgggcgacagaactagactctgtctc

SEQ ID NO: 189332 - DNA, 894 bp, Homo sapiens
  Payload ID: 17390
  Gene Symbol: TAF1A
  Gene Name: TATA box binding protein (TBP)-associated factor, RNA polymerase I, A, 48kDa
  ENST ID: ENST00000391883
  CDS Start-End: 36-894
ttagctttactgaggagctctaaatttaggcgggtatgagtgatttcagtgaagaattaaaagggcctgtgacagatgatgaagaagtggaaacatctgtgctcagtggtgcaggaatgcattttccttggcttcaaacatacgtagaaactgtggccattggagggaaaaggaggaaggattttgctcagacaacaagtgcttgtttaagttttatccaagaagctctgctgaagcaccaatggcagcaagctgcagaatacatgtacagttattttcagaccttggaagattcagatagctacaaaaggcaggctgcacctgagatctccttacaacatgcattataccttctgcatcatggaatgcttaaagatgctaagagaaatctgagtgaggcagagacatggagacatggtgaaaatacgtcttcccgggaaatattaatcaaccttattcaggcctataaagggcttttacagtattatacctggtctgaaaagaagatggaattgtcaaagcttgataaggatgattatgcttacaatgcagtagcccaggatgtgttcaaccacagctggaagacatctgcaaatatttctgcattgattaaaattcctggagtttgggacccttttgtgaagagttatgtagaaatgctggaattctatggggatcgagatggagcccaagaggtactcaccaattatgcatatgatgaaaagtttccatcaaatccaaatgcccatatctacttatacaactttctaaagagacagaaggcaccaagatcaaaattgataagtgtgcttaagattttgtatcagattgtaccatctcataaattgatgttggaattccatacattacttagaaaatcagaaaaagaagaac

SEQ ID NO: 189333 - DNA, 2387 bp, Homo sapiens
  Payload ID: 17391
  Gene Symbol: TAF1B
  Gene Name: TATA box binding protein (TBP)-associated factor, RNA polymerase I, B, 63kDa
  Uniprot ID: Q53T94
  ENST ID: ENST00000263663
  CDS Start-End: 189-1955
gtccgcgaggggtctgcgagctttgcggagcctcgcccccgagcgcgcggtttccctgccgcgcaggcgcacggaatcctaggcgcggatctcgcgtttccggccggaagcttctccagcctttcccggaagctgcgctcgctacccgggtaacgggtcccggctgtggaagctcccgcggcgccgcgatggacctcgaggaggcggaagagtttaaagaacgctgtactcagtgtgctgctgtctcatggggtcttactgatgaaggcaaatattattgcacttcttgccacaatgttacagagagatatcaggaagttacaaacactgatcttattcctaatacccaaataaaagccctcaaccgggggcttaaaaaaaaaaacaatactgaaaaaggctgggattggtatgtgtgtgaaggtttccagtatattctttatcaacaagcagaagccttaaagaaccttggagtaggcccagagttaaagaacgatgttttacataatttttggaagcgctaccttcagaagagcaagcaggcatattgtaagaacccagtttataccactggaaggaaacctacggtattagaagataatctaagtcattcagactgggctagtgagcctgagctgctaagtgatgtcagctgtcctccttttcttgaaagtggagcggagtctcagtctgacatccacactcgaaaacctttccccgtcagcaaagcatcacaatcagaaacgtctgtctgctctggatctctggatggagttgaatactcacaacgaaaggagaagggaatcgtgaagatgaccatgccacagacacttgccttctgttatctgtccttactttggcagagagaagcaataacactttcagatcttttgaggtttgttgaagaggaccatattccttacataaatgcttttcagcattttccagaacagatgaaattatatggacgtgacagaggaatctttggtatagagtcttggcctgactacgaggacatctacaaaaaaacagtagaagttggaacatttttagatttgcctcgttttccagacataactgaagactgctatcttcatcccaacatactgtgtatgaaatacttgatggaagtcaacctccctgatgaaatgcatagcttaacttgccacgtggtaaaaatgactggaatgggagaagtggattttctgacatttgatcctatagctaaaatggcaaaaactgttaagtacgatgtacaagctgtagctatcattgtggtggtattgaaactgctctttctattggatgacagtttcgagtggtctttgtctaatcttgctgaaaagcataatgaaaagaacaaaaaagataagccatggtttgatttcagaaagtggtaccaaattatgaagaaagcttttgatgagaaaaaacaaaaatgggaagaagcaagggccaagtacctgtggaaaagtgaaaagccactctactactcatttgtcgacaaaccagtagcatataaaaaaagagaaatggtggtgaatctacagaaacaatttagcacactggtcgagtcaacagcaactgctggaaaaaaaagcccttcaagttttcagttcaactggactgaagaggacactgatagaacgtgtttccatggacacagccttcagggagtcctgaaagagaaaggccaatcactgctgactaagaattcattatattggcttagtacacagaaattctgcagatgctattgtacacatgtgacaacctatgaagaatcaaattattctctgagttatcagtttatactaaatctcttctccttcctgctcagaataaagacttcccttctccatgaagaagtgagcttagttgagaagaaactttttgagaaaaaatacagtgtaaaaagaaagaaatcaagatccaagaaagtgagacgacattgagaaaatgaaatagaaactttctggaaaaatattttaatagtgataataacatcagattttaatataacattccagagaattgtggaaaatactgcatatatatgtatagactctgacacatatttacatatatatcaagtgtgcttagaaaaatgtatattgtaaagcaggtgagcttcatttgattttatttttcagagtatgaacattctaagagaaagttaaaacaatagcaaattgtataattgtatccagaaatgtatactcatcgtattttaaagctaaatttattttttaaactagatcccttcattattctttatgccccagagtaaatcccagatggatcaaagatctaaacataatctttcatatgtaaaaatataaaagtattagtagaaaacaaatatgaatgctttgatgatcttggaa

SEQ ID NO: 189334 - DNA, 297 bp, Homo sapiens
  Payload ID: 17391
  Gene Symbol: TAF1B
  Gene Name: TATA box binding protein (TBP)-associated factor, RNA polymerase I, B, 63kDa
  ENST ID: ENST00000416181
  CDS Start-End: 16-189
tcccgcggcgccgcgatggacctcgaggaggcggaagagtttaaagaacgctgtactcagtgtgctgctgtctcatggggtcttactgatgaaggcaaatattattgcacttcttgccacaatgttacagagtaccttacagattacaaagtttttggatccattatctcatttcctcctcatcactaactgtgagagcctattgatagggctcagaagttgagtgagtttgccaaagttacccaagtaccaggacttgaatagatatcaggaagttacaaacactgatcttattcc

SEQ ID NO: 189335 - DNA, 1592 bp, Homo sapiens
  Payload ID: 17391
  Gene Symbol: TAF1B
  Gene Name: TATA box binding protein (TBP)-associated factor, RNA polymerase I, B, 63kDa
  ENST ID: ENST00000434858
  CDS Start-End: 18-602
gctcccgcggcgccgcgatggacctcgaggaggcggaagagtttaaagaacgctgtactcagtgtgctgctgtctcatggggtcttactgatgaaggcaaatattattgcacttcttgccacaatgttacagagagatatcaggaagttacaaacactgatcttattcctaatacccaaataaaagccctcaaccgggggcttaaaaaaaaaaacaatactgaaaaaggctgggattggtatgtgtgtgaaggtttccagtatattctttatcaacaagcagaagccttaaagaaccttggagtaggcccagagttaaagaacgatgttttacataatttttggaagcgctaccttcagaagagcaagcaggcatattgtaagaacccagtttataccactggaaggaaacctacggtattagaagataatctaagtcattcagactgggctagtgagcctgagctgctaagtgatgtcagctgtcctccttttcttgaaagtggagcggagtctcagtctgacatccacactcgaaaacctttccccgtcagcaaagcatcacaatcaggtttgttgaagaggaccatattccttacataaatgcttttcagcattttccagaacagatgaaattatatggacgtgacagaggaatctttggtatagagtcttggcctgactacgaggacatctacaaaaaaacagtagaagttggaacatttttagatttgcctcgttttccagacataactgaagactgctatcttcatcccaacatactgtgtatgaaatacttgatggaagtcaacctccctgatgaaatgcatagcttaacttgccacgtggtaaaaatgactggaatgggagaagtggattttctgacatttgatcctatagctaaaatggcaaaaactgttaagtacgatgtacaagctgtagctatcattgtggtggtattgaaactgctctttctattggatgacagtttcgagtggtctttgtctaatcttgctgaaaagcataatgaaaagaacaaaaaagataagccatggtttgatttcagaaagtggtaccaaattatgaagaaagcttttgatgagaaaaaacaaaaatgggaagaagcaagggccaagtacctgtggaaaagtgaaaagccactctactactcatttgtcgacaaaccagtagcatataaaaaaagagaaatggtggtgaatctacagaaacaatttagcacactggtcgagtcaacagcaactgctggaaaaaaaagcccttcaagttttcagttcaactggactgaagaggacactgatagaacgtgtttccatggacacagccttcagggagtcctgaaagagaaaggccaatcactgctgactaagaattcattatattggcttagtacacagaaattctgcagatgctattgtacacatgtgacaacctatgaagaatcaaattattctctgagttatcagtttatactaaatctcttctccttcctgctcagaataaagacttcccttctccatgaagaagtgagcttagttgagaagaaactttttgagaaaaaatacagtgtaaaaa

SEQ ID NO: 189336 - DNA, 1045 bp, Homo sapiens
  Payload ID: 17391
  Gene Symbol: TAF1B
  Gene Name: TATA box binding protein (TBP)-associated factor, RNA polymerase I, B, 63kDa
  ENST ID: ENST00000492648
  CDS Start-End: 1-649
aacactttcagatcttttgaggtttgttgaagaggaccatattccttacataaatgcttttcagcattttccagaacagatgaaattatatggacgtgacagaggaatctttggtatagagtcttggcctgactacgaggacatctacaaaaaaacagtagaagttggaacatttttagatttgcctcgttttccagacataactgaagactgctatcttcatcccaacatactgtgtatgaaatacttgatggaagtcaacctccctgatgaaatgcatagcttaacttgccacgtggtaaaaatgactggaatgggagaagtggattttctgacatttgatcctatagctaaaatggcaaaaactgttaagtacgatgtacaagctgtagctatcattgtggtggtattgaaactgctctttctattggatgacagtttcgagtggtctttgtctaatcttgctgaaaagcataatgaaaagaacaaaaaagataagccatggtttgatttcagaaagtggtaccaaattatgaagaaagcttttgatgagaaaaaacaaaaatgggaagaagcaagggccaagtatgttctccttcctggtttagatgcacctgccttacttctgtgtctgttactttacatttgaaagctgaagcttcatcagtatacacttatctacattgtgacttttttttctggaaatattagccctacactctaattaacttttctcttttttacattactattaatcaaagtttagatttgatgtggatttcaccagtgtttttattaatgtcctctttctgttccatgatccaatgcaggataccacagtatactttttataatttaactttttataatttgcatgagacttgcctatatttctaatactcctccctcttcccctttctcaaatttagtcatttctcatctatgcttcccaatattaaaaagattacaaatgttaccttgcaacatatgtaattggaatgttcccccaaaataaagatccctgtgaaaattaaaacaaaggaaa

SEQ ID NO: 189337 - DNA, 273 bp, Homo sapiens
  Payload ID: 17391
  Gene Symbol: TAF1B
  Gene Name: TATA box binding protein (TBP)-associated factor, RNA polymerase I, B, 63kDa
  ENST ID: ENST00000625239
  CDS Start-End: 100-273
tctcgcgtttccggccggaagcttctccagcctttcccggaagctgcgctcgctacccgggtaacgggtcccggctgtggaagctcccgcggcgccgcgatggacctcgaggaggcggaagagtttaaagaacgctgtactcagtgtgctgctgtctcatggggtcttactgatgaaggcaaatattattgcacttcttgccacaatgttacagagtaccttacagattacaaagtttttggatccattatctcatttcctcctcatcactaa

SEQ ID NO: 189338 - DNA, 3678 bp, Homo sapiens
  Payload ID: 17392
  Gene Symbol: TAF1C
  Gene Name: TATA box binding protein (TBP)-associated factor, RNA polymerase I, C, 110kDa
  Uniprot ID: Q15572
  ENST ID: ENST00000341690
  CDS Start-End: 262-2589
ccggaagaccgtgggtagctgcggcggggctgacccgtcccgagtgccaaagctggggttctacttgagatttccctcgtggtgccagggtccggcgagcatcacgccgaggcccattttccagacgaccacgacgaggccggggtcacctggcgagacgcactgactctgccagaggcccagccccagaactcagagaatggggcactgcatgtgaccaaggacctgctgtgggagccggcaacccctgggcctctccccatgctgcctcccctcatcgatccctgggaccctggcctgactgcccgggacctgcttttccgcggagggtgccggtatcggaagcggccccgagtcgtgctggatgtgactgagcagatcagccggttcctcttggatcatggagacgtagcctttgcgcccctggggaagctgatgctggagaatttcaagctggagggagcggggagccgcactaagaagaagacagtggtcagtgtgaagaagctgctccaggacctcggtggacaccagccctgggggtgtccctgggcttacctcagcaaccgacagcgccgcttctctatcctcgggggccccatcctgggcacgtcggtggcgagccacttggcagagctgctgcacgaggagctggtgctgcggtgggagcagctgcttctggatgaggcctgcactgggggcgcgctggcctgggttcctggaaggacaccccagttcgggcagctggtctaccctgctggaggcgcccaggacaggctgcatttccaagaggtcgttctgaccccaggtgacaatccccaattccttgggaaacctggacgcatccagctccagggacctgtccggcaagtggtgacatgcaccgtccagggagaaactctgctggccgtccgctctgactaccactgtgccgtgtggaagtttggtaaacagtggcagccaacccttctgcaggcaatgcaggtggagaaaggggccacggggatcagcctcagccctcacctgcccggggagctggccatctgcagccgctcgggagccgtctgcctgtggagccctgaggatgggctgcggcaaatctacagggaccctgagaccctcgtgttccgggactcctcttcgtggcgttgggcagacttcactgcgcaccctcgggtgctgaccgtgggtgaccgcaccggagtgaagatgctggacactcagggcccgccgggctgtggtctgttgctttttcgtttgggggcagaggcttcgtgccagaaaggggaacgtgtcctgcttacccagtacctggggcactccagccccaaatgcctcccccctactcttcatctcgtctgtacccagttctctctctacctagtggacgagcgccttcccctggtgccgatgctgaagtggaaccatggcctcccctccccgctcctgctggcccgactgctgcctccgccccggcccagctgcgtgcagcccctgctcctcggaggccagggtgggcagctgcagctgctgcacctggcagaaggggcgtcggtgccccgcctggcaggccccccccagtctcttccttccaggatcgactccctccctgcatttcctctgctggagcctaagatccagtggcggctgcaggagcgcctgaaagcaccgaccataggtctggctgccgtcgtcccgcccttgccctcagcgcccacaccaggcctggtgctcttccagctctcggcggcgggagatgtcttctaccagcagctccgcccccaggtggactccagcctccgcagagatgctgggcctcctggcgacacccaacctgactgccatgcccccacagcttcctggacctcccaggacactgccggctgcagccagtggctgaaggccctgctaaaagtgcccctggctcctcctgtgtggacagcacccaccttcacccaccgccagatgctgggcagcacagagctgcggagggaggaagaggaagggcagcggctgggtgtgctccgcaaggccatggcccgagggcagctcctgctgcagagagacctgggctccctccctgcggcagagccaccccctgcacccgagtcaggcctagaggacaagctcagtgagcgcctgggggaagcctgggcaggccgaggggctgcctggtgggagaggcagcagggcaggacctcggagcccgggagacagaccaggcggcccaagcgccggacccagctgtccagcagcttttcgctcagtggccatgtggatccctcagaggacaccagctcccctcatagccctgagtggccacctgctgatgctctgcccctgccccccacgaccccgccctcccaggagttgactccggatgcatgcgcccagggcgtcccatcagagcagcggcagatgctccgtgactacatggccaagctaccaccccagagggacaccccaggctgtgccaccacacctccccactcccaggcctccagcgtccgggccactcgctcccagcagcacacacccgtcctctctagctctcagcccctccggaagaagcctcgaatgggcttctgaggacacaaggtgggctgccctcaagccccagagagcccctcatccttcctctgggaccagatgtgccttccacagttgaaacttgagaagcagagctcgccaccttctggaggccactgtgatgatgagccaagcaatttggagccaagttgaagggacagggcaacaaaatacagtagtagtttcttttgtattttgtatattcgcctgaagatcatcccgcaaggcaggctggaggtgccggtgggcctgtgttgctgggattttagtctgtgctgggaggcagggctccgctgcgcctcagctgtgggggcctcaggcaggtccctcagttctcacgccttcctgtccagtggaatgggggccaggagtgctggctcctcgtgtttggtgagggtggagtgaggcccctgcagagctgctgatgaggtgggcacagcggccgttggcagctgctgttgtgggttgctttgtcaatctctgccccggtctgatgtttcctacagggagatgccttggatccaggttcagggactaaatacacttggcagctgaagatgaattggaatggtcacgttttttaggctggacagcgtcccgccacagctactacctgacactgagctcatgcagagagatgatggctgatgttccttctcccttgggacatgggtctggcacctgtgggctgtcgatagtgccctctgagcagagggtcacggtcatgtcagtttgggggaattctctgttgtgcctcacagactcccccctttctttcctccctccccttctcattttgatgtctaaagcatcaagtccctcttcctcggagtttctctagctgcagtggaagattctgttttcctgtggggaaaatgctcacttgagattttgcagggacccgggtctgtctggtttctgatgacatagtaagagaaaggtcttttttcaggttggctggtgaaaggaattgcatgtgactcacacaaacaggagctagcccaatcatacactgactcgcgtgggtgttaaaatgtttatcatgcctaagggagacatttatgattaaaccatttatgctacatataa

SEQ ID NO: 189339 - DNA, 3502 bp, Homo sapiens
  Payload ID: 17392
  Gene Symbol: TAF1C
  Gene Name: TATA box binding protein (TBP)-associated factor, RNA polymerase I, C, 110kDa
  Uniprot ID: Q15572
  ENST ID: ENST00000541676
  CDS Start-End: 795-2408
aggaggcacttccggtccaaaccggaagaccgtgggtagctgcggcggggctgacccgtcccgagtgccaaagctggggttctacttgagatttccctcgtggtgccagggtccggcgagcatcacgccgaggcccattttccagacgaccacgacgaggccggggtcacatccctgggaccctggcctgactgcccgggacctgcttttccgcggagggtgccggtatcggaagcggccccgagtcgtgctggatgtgactgagcagatcagccggttcctcttggatcatggagacgtagcctttgcgcccctggggaagctgatgctggagaatttcaagctggagggagcgggggtgtccctgggcttacctcagcaaccgacagcgccgcttctctatcctcgggggccccatcctgggcacgtcggtggcgagccacttggcagagctgctgcacgaggagctggtgctgcggtgggagcagctgcttctggatgaggcctgcactgggggcgcgctggcctgggttcctggaaggacaccccagttcgggcagctggtctaccctgctggaggcgcccaggacaggctgcatttccaagaggtcgttctgaccccaggtgacaatccccaattccttgggaaacctggacgcatccagctccagggacctgtccggcaagtggtgacatgcaccgtccagggagaaactctgctggccgtccgctctgactaccactgtgccgtgtggaagtttggtaaacagtggcagccaacccttctgcaggcaatgcaggtggagaaaggggccacggggatcagcctcagccctcacctgcccggggagctggccatctgcagccgctcgggagccgtctgcctgtggagccctgaggatgggctgcggcaaatctacagggaccctgagaccctcgtgttccgggactcctcttcgtggcgttgggcagacttcactgcgcaccctcgggtgctgaccgtgggtgaccgcaccggagtgaagatgctggacactcagggcccgccgggctgtggtctgttgctttttcgtttgggggcagaggcttcgtgccagaaaggggaacgtgtcctgcttacccagtacctggggcactccagccccaaatgcctcccccctactcttcatctcgtctgtacccagttctctctctacctagtggacgagcgccttcccctggtgccgatgctgaagtggaaccatggcctcccctccccgctcctgctggcccgactgctgcctccgccccggcccagctgcgtgcagcccctgctcctcggaggccagggtgggcagctgcagctgctgcacctggcaggagaaggggcgtcggtgccccgcctggcaggccccccccagtctcttccttccaggatcgactccctccctgcatttcctctgctggagcctaagatccagtggcggctgcaggagcgcctgaaagcaccgaccataggtctggctgccgtcgtcccgcccttgccctcagcgcccacaccaggcctggtgctcttccagctctcggcggcgggagatgtcttctaccagcagctccgcccccaggtggactccagcctccgcagagatgctgggcctcctggcgacacccaacctgactgccatgcccccacagcttcctggacctcccaggacactgccggctgcagccagtggctgaaggccctgctaaaagtgcccctggctcctcctgtgtggacagcacccaccttcacccaccgccagatgctgggcagcacagagctgcggagggaggaagaggaagggcagcggctgggtgtgctccgcaaggccatggcccgagggcagctcctgctgcagagagacctgggctccctccctgcggcagagccaccccctgcacccgagtcaggcctagaggacaagctcagtgagcgcctgggggaagcctgggcaggccgaggggctgcctggtgggagaggcagcagggcaggacctcggagcccgggagacagaccaggcggcccaagcgccggacccagctgtccagcagcttttcgctcagtggccatgtggatccctcagaggacaccagctcccctcatagccctgagtggccacctgctgatgctctgcccctgccccccacgaccccgccctcccaggagttgactccggatgcatgcgcccagggcgtcccatcagagcagcggcagatgctccgtgactacatggccaagctaccaccccagagggacaccccaggctgtgccaccacacctccccactcccaggcctccagcgtccgggccactcgctcccagcagcacacacccgtcctctctagctctcagcccctccggaagaagcctcgaatgggcttctgaggacacaaggtgggctgccctcaagccccagagagcccctcatccttcctctgggaccagatgtgccttccacagttgaaacttgagaagcagagctcgccaccttctggaggccactgtgatgatgagccaagcaatttggagccaagttgaagggacagggcaacaaaatacagtagtagtttcttttgtattttgtatattcgcctgaagatcatcccgcaaggcaggctggaggtgccggtgggcctgtgttgctgggattttagtctgtgctgggaggcagggctccgctgcgcctcagctgtgggggcctcaggcaggtccctcagttctcacgccttcctgtccagtggaatgggggccaggagtgctggctcctcgtgtttggtgagggtggagtgaggcccctgcagagctgctgatgaggtgggcacagcggccgttggcagctgctgttgtgggttgctttgtcaatctctgccccggtctgatgtttcctacagggagatgccttggatccaggttcagggactaaatacacttggcagctgaagatgaattggaatggtcacgttttttaggctggacagcgtcccgccacagctactacctgacactgagctcatgcagagagatgatggctgatgttccttctcccttgggacatgggtctggcacctgtgggctgtcgatagtgccctctgagcagagggtcacggtcatgtcagtttgggggaattctctgttgtgcctcacagactcccccctttctttcctccctccccttctcattttgatgtctaaagcatcaagtccctcttcctcggagtttctctagctgcagtggaagattctgttttcctgtggggaaaatgctcacttgagattttgcagggacccgggtctgtctggtttctgatgacatagtaagagaaaggtcttttttcaggttggctggtgaaaggaattgcatgtgactcacacaaacaggagctagcccaatcatacactgactcgcgtgggtgttaaaatgtttatcatgcctaagggagacatttatgattaaaccatttatgctacatataactggg

SEQ ID NO: 189340 - DNA, 555 bp, Homo sapiens
  Payload ID: 17392
  Gene Symbol: TAF1C
  Gene Name: TATA box binding protein (TBP)-associated factor, RNA polymerase I, C, 110kDa
  ENST ID: ENST00000569609
  CDS Start-End: 218-376
aagaccgtgggtagctgcggcggggctgacccgtcccgagtgccaaagctggggttctacttgagatttccctcgtggtgccagggtccggcgagcatcacgccgaggcccattttccagacgaccacgacgaggccggggtcacgaactctggcgccccttaccagcttccagtctctcgaggtggccagtgtggtgcttggtccttgtttccaggatggacttccccagctccctccgccctgcattgtttctgaccggcccccttggtctgagcgacgtccctgacctctctttcatgtgcagctggcgagacgcactgactctgccagaggcccagccccagaactcagagatccctgggaccctggcctgactgcccgggacctgcttttccgcggagggtgccggtatcggaagcggccccgagtcgtgctggatgtgactgagcagatcagccggttcctcttggatcatggagacgtagcctttgcgcccctggggaagctgatgctggagaatttcaagctggagggagcggggagccgcactaag

SEQ ID NO: 189341 - DNA, 602 bp, Homo sapiens
  Payload ID: 17392
  Gene Symbol: TAF1C
  Gene Name: TATA box binding protein (TBP)-associated factor, RNA polymerase I, C, 110kDa
  ENST ID: ENST00000564345
  CDS Start-End: 165-602
acttccggtccaaaccggaagaccgtgggtagctgcggcggggctgacccgtcccgagtgccaaagctggggttctacttgagatttccctcgtggtgccagggtccggcgagcatcacgccgaggcccattttccagacgaccacgacgaggccggggtcacgatggacttccccagctccctccgccctgcattgtttctgaccggcccccttggtctgagcgacgtccctgacctctctttcatgtgcagctggcgagacgcactgactctgccagaggcccagccccagaactcagagaatggggcactgcatgtgaccaaggacctgctgtgggagccggcaacccctgggcctctccccatgctgcctcccctcatcgatccctgggaccctggcctgactgcccgggacctgcttttccgcggagggtgccggtatcggaagcggccccgagtcgtgctggatgtgactgagcagatcagccggttcctcttggatcatggagacgtagcctttgcgcccctggggaagctgatgctggagaatttcaagctggagggagcggggagccgcactaagaagaagacagtggtcagt

SEQ ID NO: 189342 - DNA, 2349 bp, Homo sapiens
  Payload ID: 17392
  Gene Symbol: TAF1C
  Gene Name: TATA box binding protein (TBP)-associated factor, RNA polymerase I, C, 110kDa
  Uniprot ID: Q15572
  ENST ID: ENST00000570117
  CDS Start-End: 643-2256
ggtccaaaccggaagaccgtgggtagctgcggcggggctgacccgtcccgagtgccaaagctggggttctacttgagatttccctcgtggtgccagggtccggcgagcatcacgccgaggcccattttccagacgaccacgacgaggccggggtcacctggcgagacgcactgactctgccagaggcccagccccagaactcagaggtgtccctgggcttacctcagcaaccgacagcgccgcttctctatcctcgggggccccatcctgggcacgtcggtggcgagccacttggcagagctgctgcacgaggagctggtgctgcggtgggagcagctgcttctggatgaggcctgcactgggggcgcgctggcctgggttcctggaaggacaccccagttcgggcagctggtctaccctgctggaggcgcccaggacaggctgcatttccaagaggtcgttctgaccccaggtgacaatccccaattccttgggaaacctggacgcatccagctccagggacctgtccggcaagtggtgacatgcaccgtccagggagaaactctgctggccgtccgctctgactaccactgtgccgtgtggaagtttggtaaacagtggcagccaacccttctgcaggcaatgcaggtggagaaaggggccacggggatcagcctcagccctcacctgcccggggagctggccatctgcagccgctcgggagccgtctgcctgtggagccctgaggatgggctgcggcaaatctacagggaccctgagaccctcgtgttccgggactcctcttcgtggcgttgggcagacttcactgcgcaccctcgggtgctgaccgtgggtgaccgcaccggagtgaagatgctggacactcagggcccgccgggctgtggtctgttgctttttcgtttgggggcagaggcttcgtgccagaaaggggaacgtgtcctgcttacccagtacctggggcactccagccccaaatgcctcccccctactcttcatctcgtctgtacccagttctctctctacctagtggacgagcgccttcccctggtgccgatgctgaagtggaaccatggcctcccctccccgctcctgctggcccgactgctgcctccgccccggcccagctgcgtgcagcccctgctcctcggaggccagggtgggcagctgcagctgctgcacctggcaggagaaggggcgtcggtgccccgcctggcaggccccccccagtctcttccttccaggatcgactccctccctgcatttcctctgctggagcctaagatccagtggcggctgcaggagcgcctgaaagcaccgaccataggtctggctgccgtcgtcccgcccttgccctcagcgcccacaccaggcctggtgctcttccagctctcggcggcgggagatgtcttctaccagcagctccgcccccaggtggactccagcctccgcagagatgctgggcctcctggcgacacccaacctgactgccatgcccccacagcttcctggacctcccaggacactgccggctgcagccagtggctgaaggccctgctaaaagtgcccctggctcctcctgtgtggacagcacccaccttcacccaccgccagatgctgggcagcacagagctgcggagggaggaagaggaagggcagcggctgggtgtgctccgcaaggccatggcccgagggcagctcctgctgcagagagacctgggctccctccctgcggcagagccaccccctgcacccgagtcaggcctagaggacaagctcagtgagcgcctgggggaagcctgggcaggccgaggggctgcctggtgggagaggcagcagggcaggacctcggagcccgggagacagaccaggcggcccaagcgccggacccagctgtccagcagcttttcgctcagtggccatgtggatccctcagaggacaccagctcccctcatagccctgagtggccacctgctgatgctctgcccctgccccccacgaccccgccctcccaggagttgactccggatgcatgcgcccagggcgtcccatcagagcagcggcagatgctccgtgactacatggccaagctaccaccccagagggacaccccaggctgtgccaccacacctccccactcccaggcctccagcgtccgggccactcgctcccagcagcacacacccgtcctctctagctctcagcccctccggaagaagcctcgaatgggcttctgaggacacaaggtgggctgccctcaagccccagagagcccctcatccttcctctgggaccagatgtgccttccacagttgaaacttgagaagcag

SEQ ID NO: 189343 - DNA, 3879 bp, Homo sapiens
  Payload ID: 17392
  Gene Symbol: TAF1C
  Gene Name: TATA box binding protein (TBP)-associated factor, RNA polymerase I, C, 110kDa
  Uniprot ID: Q15572
  ENST ID: ENST00000567759
  CDS Start-End: 184-2793
cccgagtgccaaagctggggttctacttgagatttccctcgtggtgccagggtccggcgagcatcacgccgaggcccattttccagacgaccacgacgaggccggggtcacgaactctggcgccccttaccagcttccagtctctcgaggtggccagtgtggtgcttggtccttgtttccaggatggacttccccagctccctccgccctgcattgtttctgaccggcccccttggtctgagcgacgtccctgacctctctttcatgtgcagctggcgagacgcactgactctgccagaggcccagccccagaactcagagaatggggcactgcatgtgaccaaggacctgctgtgggagccggcaacccctgggcctctccccatgctgcctcccctcatcgatccctgggaccctggcctgactgcccgggacctgcttttccgcggagggtgccggtatcggaagcggccccgagtcgtgctggatgtgactgagcagatcagccggttcctcttggatcatggagacgtagcctttgcgcccctggggaagctgatgctggagaatttcaagctggagggagcggggagccgcactaagaagaagacagtggtcagtgtgaagaagctgctccaggacctcggtggacaccagccctgggggtgtccctgggcttacctcagcaaccgacagcgccgcttctctatcctcgggggccccatcctgggcacgtcggtggcgagccacttggcagagctgctgcacgaggagctggtgctgcggtgggagcagctgcttctggatgaggcctgcactgggggcgcgctggcctgggttcctggaaggacaccccagttcgggcagctggtctaccctgctggaggcgcccaggacaggctgcatttccaagaggtcgttctgaccccaggtgacaatccccaattccttgggaaacctggacgcatccagctccagggacctgtccggcaagtggtgacatgcaccgtccagggagaaagtaaggcccttatatacactttcctccctcactggctgacctgctacctgacccctggccctttccatccctcctcagctctgctggccgtccgctctgactaccactgtgccgtgtggaagtttggtaaacagtggcagccaacccttctgcaggcaatgcaggtggagaaaggggccacggggatcagcctcagccctcacctgcccggggagctggccatctgcagccgctcgggagccgtctgcctgtggagccctgaggatgggctgcggcaaatctacagggaccctgagaccctcgtgttccgggactcctcttcgtggcgttgggcagacttcactgcgcaccctcgggtgctgaccgtgggtgaccgcaccggagtgaagatgctggacactcagggcccgccgggctgtggtctgttgctttttcgtttgggggcagaggcttcgtgccagaaaggggaacgtgtcctgcttacccagtacctggggcactccagccccaaatgcctcccccctactcttcatctcgtctgtacccagttctctctctacctagtggacgagcgccttcccctggtgccgatgctgaagtggaaccatggcctcccctccccgctcctgctggcccgactgctgcctccgccccggcccagctgcgtgcagcccctgctcctcggaggccagggtgggcagctgcagctgctgcacctggcaggagaaggggcgtcggtgccccgcctggcaggccccccccagtctcttccttccaggatcgactccctccctgcatttcctctgctggagcctaagatccagtggcggctgcaggagcgcctgaaagcaccgaccataggtctggctgccgtcgtcccgcccttgccctcagcgcccacaccaggcctggtgctcttccagctctcggcggcgggagatgtcttctaccagcagctccgcccccaggtggactccagcctccgcagagatgctgggcctcctggcgacacccaacctgactgccatgcccccacagcttcctggacctcccaggacactgccggctgcagccagtggctgaaggccctgctaaaagtgcccctggctcctcctgtgtggacagcacccaccttcacccaccgccagatgctgggcagcacagagctgcggagggaggaagaggaagggcagcggctgggtgtgctccgcaaggccatggcccgagggcagctcctgctgcagagagacctgggctccctccctgcggcagagccaccccctgcacccgagtcaggcctagaggacaagctcagtgagcgcctgggggaagcctgggcaggccgaggggctgcctggtgggagaggcagcagggcaggacctcggagcccgggagacagaccaggcggcccaagcgccggacccagctgtccagcagcttttcgctcagtggccatgtggatccctcagaggacaccagctcccctcatagccctgagtggccacctgctgatgctctgcccctgccccccacgaccccgccctcccaggagttgactccggatgcatgcgcccagggcgtcccatcagagcagcggcagatgctccgtgactacatggccaagctaccaccccagagggacaccccaggctgtgccaccacacctccccactcccaggcctccagcgtccgggccactcgctcccagcagcacacacccgtcctctctagctctcagcccctccggaagaagcctcgaatgggcttctgaggacacaaggtgggctgccctcaagccccagagagcccctcatccttcctctgggaccagatgtgccttccacagttgaaacttgagaagcagagctcgccaccttctggaggccactgtgatgatgagccaagcaatttggagccaagttgaagggacagggcaacaaaatacagtagtagtttcttttgtattttgtatattcgcctgaagatcatcccgcaaggcaggctggaggtgccggtgggcctgtgttgctgggattttagtctgtgctgggaggcagggctccgctgcgcctcagctgtgggggcctcaggcaggtccctcagttctcacgccttcctgtccagtggaatgggggccaggagtgctggctcctcgtgtttggtgagggtggagtgaggcccctgcagagctgctgatgaggtgggcacagcggccgttggcagctgctgttgtgggttgctttgtcaatctctgccccggtctgatgtttcctacagggagatgccttggatccaggttcagggactaaatacacttggcagctgaagatgaattggaatggtcacgttttttaggctggacagcgtcccgccacagctactacctgacactgagctcatgcagagagatgatggctgatgttccttctcccttgggacatgggtctggcacctgtgggctgtcgatagtgccctctgagcagagggtcacggtcatgtcagtttgggggaattctctgttgtgcctcacagactcccccctttctttcctccctccccttctcattttgatgtctaaagcatcaagtccctcttcctcggagtttctctagctgcagtggaagattctgttttcctgtggggaaaatgctcacttgagattttgcagggacccgggtctgtctggtttctgatgacatagtaagagaaaggtcttttttcaggttggctggtgaaaggaattgcatgtgactcacacaaacaggagctagcccaatcatacactgactcgcgtgggtgttaaaatgtttatcatgcctaagggagacatttatgattaaaccatttatgctacata

SEQ ID NO: 189344 - DNA, 2531 bp, Homo sapiens
  Payload ID: 17392
  Gene Symbol: TAF1C
  Gene Name: TATA box binding protein (TBP)-associated factor, RNA polymerase I, C, 110kDa
  ENST ID: ENST00000563428
  CDS Start-End: 289-465
agctgcggcggggctgacccgtcccgagtgccaaagctggggttctacttgagatttccctcgtggtgccagggtccggcgagcatcacgccgaggcccattttccagacgaccacgacgaggccggggtcacatccctgggaccctggcctgactgcccgggacctgcttttccgcggagggtgccggtatcggaagcggccccgagtcgtgctggatgtgactgagcagatcagccggttcctcttggatcatggagacgtagcctttgcgcccctggggaagctgatgctggagaatttcaagctggagggagcgggggtgtccctgggcttacctcagcaaccgacagcgccgcttctctatcctcgggggccccatcctgggcacgtcggtggcgagccacttggcagagctgctgcacgaggagctggtgctgcggtgggagcagctgcttctggatgaggcctgcactgggggcgcgctggcctgggttcctggaaggacaccccagttcgggcagctggtctaccctgctggaggcgcccaggacaggctgcatttccaagaggtcgttctgaccccaggtgacaatccccaattccttgggaaacctggacgcatccagctccagggacctgtccggcaagtggtgacatgcaccgtccagggagaaactctgctggccgtccgctctgactaccactgtgccgtgtggaagtttggtaaacagtggcagccaacccttctgcaggcaatgcaggtggagaaaggggccacggggatcagcctcagccctcacctgcccggggagctggccatctgcagccgctcgggagccgtctgcctgtggagccctgaggatgggctgcggcaaatctacagggaccctgagaccctcgtgttccgggactcctcttcgtggcgttgggcagacttcactgcgcaccctcgggtgctgaccgtgggtgaccgcaccggagtgaagatgctggacactcagggcccgccgggctgtggtctgttgctttttcgtttgggggcagaggcttcgtgccagaaaggggaacgtgtcctgcttacccagtacctggggcactccagccccaaatgcctcccccctactcttcatctcgtctgtacccagttctctctctacctagtggacgagcgccttcccctggtgccgatgctgaagtggaaccatggcctcccctccccgctcctgctggcccgactgctgcctccgccccggcccagctgcgtgcagcccctgctcctcggaggccagggtgggcagctgcagctgctgcacctggcaggagaaggggcgtcggtgccccgcctggcaggccccccccagtctcttccttccaggatcgactccctccctgcatttcctctgctggagcctaagatccagtggcggctgcaggagcgcctgaaagcaccgaccataggtctggctgccgtcgtcccgcccttgccctcagcgcccacaccaggcctggtgctcttccagctctcggcggcgggagatgtcttctaccagcagctccgcccccaggtggactccagcctccgcagagatgctgggcctcctggcgacacccaacctgactgccatgcccccacagcttcctggacctcccaggacactgccggctgcagccagtggctgaaggccctgctaaaagtgcccctggctcctcctgtgtggacagcacccaccttcacccaccgccagatgctgggcagcacagagctgcggagggaggaagaggaagggcagcggctgggtgtgctccgcaaggccatggcccgagggcagctcctgctgcagagagacctgggctccctccctgcggcagagccaccccctgcacccgagtcaggcctagaggacaagctcagtgagcgcctgggggaagcctgggcaggccgaggggctgcctggtgggagaggcagcagggcaggacctcggagcccgggagacagaccaggcggcccaagcgccggacccagctgtccagcagcttttcgctcagtggccatgtggatccctcagaggacaccagctcccctcatagccctgagtggccacctgctgatgctctgcccctgccccccacgaccccgccctcccaggagttgactccggatgcatgcgcccagggcgtcccatcagagcagcggcagatgctccgtgactacatggccaagctaccaccccagagggacaccccaggctgtgccaccacacctccccactcccaggcctccagcgtccgggccactcgctcccagcagcacacacccgtcctctctagctctcagcccctccggaagaagcctcgaatgggcttctgaggacacaaggtgggctgccctcaagccccagagagcccctcatccttcctctgggaccagatgtgccttccacagttgaaacttgagaagcagagctcgccaccttctggaggccactgtgatgatgagccaagcaatttggagccaagttgaagggaca

SEQ ID NO: 189345 - DNA, 2972 bp, Homo sapiens
  Payload ID: 17392
  Gene Symbol: TAF1C
  Gene Name: TATA box binding protein (TBP)-associated factor, RNA polymerase I, C, 110kDa
  Uniprot ID: Q15572
  ENST ID: ENST00000566732
  CDS Start-End: 212-2743
gtgggtagctgcggcggggctgacccgtcccgagtgccaaagctggggttctacttgagatttccctcgtggtgccagggtccggcgagcatcacgccgaggcccattttccagacgaccacgacgaggccggggtcacgaactctggcgccccttaccagcttccagtctctcgaggtggccagtgtggtgcttggtccttgtttccaggatggacttccccagctccctccgccctgcattgtttctgaccggcccccttggtctgagcgacgtccctgacctctctttcatgtgcagctggcgagacgcactgactctgccagaggcccagccccagaactcagagaatggggcactgcatgtgaccaaggacctgctgtgggagccggcaacccctgggcctctccccatgctgcctcccctcatcgatccctgggaccctggcctgactgcccgggacctgcttttccgcggagggtgccggtatcggaagcggccccgagtcgtgctggatgtgactgagcagatcagccggttcctcttggatcatggagacgtagcctttgcgcccctggggaagctgatgctggagaatttcaagctggagggagcggggagccgcactaagaagaagacagtggtcagtgtgaagaagctgctccaggacctcggtggacaccagccctgggggtgtccctgggcttacctcagcaaccgacagcgccgcttctctatcctcgggggccccatcctgggcacgtcggtggcgagccacttggcagagctgctgcacgaggagctggtgctgcggtgggagcagctgcttctggatgaggcctgcactgggggcgcgctggcctgggttcctggaaggacaccccagttcgggcagctggtctaccctgctggaggcgcccaggacaggctgcatttccaagaggtcgttctgaccccaggtgacaatccccaattccttgggaaacctggacgcatccagctccagggacctgtccggcaagtggtgacatgcaccgtccagggagaaactctgctggccgtccgctctgactaccactgtgccgtgtggaagtttggtaaacagtggcagccaacccttctgcaggcaatgcaggtggagaaaggggccacggggatcagcctcagccctcacctgcccggggagctggccatctgcagccgctcgggagccgtctgcctgtggagccctgaggatgggctgcggcaaatctacagggaccctgagaccctcgtgttccgggactcctcttcgtggcgttgggcagacttcactgcgcaccctcgggtgctgaccgtgggtgaccgcaccggagtgaagatgctggacactcagggcccgccgggctgtggtctgttgctttttcgtttgggggcagaggcttcgtgccagaaaggggaacgtgtcctgcttacccagtacctggggcactccagccccaaatgcctcccccctactcttcatctcgtctgtacccagttctctctctacctagtggacgagcgccttcccctggtgccgatgctgaagtggaaccatggcctcccctccccgctcctgctggcccgactgctgcctccgccccggcccagctgcgtgcagcccctgctcctcggaggccagggtgggcagctgcagctgctgcacctggcaggagaaggggcgtcggtgccccgcctggcaggccccccccagtctcttccttccaggatcgactccctccctgcatttcctctgctggagcctaagatccagtggcggctgcaggagcgcctgaaagcaccgaccataggtctggctgccgtcgtcccgcccttgccctcagcgcccacaccaggcctggtgctcttccagctctcggcggcgggagatgtcttctaccagcagctccgcccccaggtggactccagcctccgcagagatgctgggcctcctggcgacacccaacctgactgccatgcccccacagcttcctggacctcccaggacactgccggctgcagccagtggctgaaggccctgctaaaagtgcccctggctcctcctgtgtggacagcacccaccttcacccaccgccagatgctgggcagcacagagctgcggagggaggaagaggaagggcagcggctgggtgtgctccgcaaggccatggcccgagggcagctcctgctgcagagagacctgggctccctccctgcggcagagccaccccctgcacccgagtcaggcctagaggacaagctcagtgagcgcctgggggaagcctgggcaggccgaggggctgcctggtgggagaggcagcagggcaggacctcggagcccgggagacagaccaggcggcccaagcgccggacccagctgtccagcagcttttcgctcagtggccatgtggatccctcagaggacaccagctcccctcatagccctgagtggccacctgctgatgctctgcccctgccccccacgaccccgccctcccaggagttgactccggatgcatgcgcccagggcgtcccatcagagcagcggcagatgctccgtgactacatggccaagctaccaccccagagggacaccccaggctgtgccaccacacctccccactcccaggcctccagcgtccgggccactcgctcccagcagcacacacccgtcctctctagctctcagcccctccggaagaagcctcgaatgggcttctgaggacacaaggtgggctgccctcaagccccagagagcccctcatccttcctctgggaccagatgtgccttccacagttgaaacttgagaagcagagctcgccaccttctggaggccactgtgatgatgagccaagcaatttggagccaagttgaagggacagggcaacaaaatacagtagtagtttcttttgtattttgtatattcgcctgaagatcatcccgcaaggca

SEQ ID NO: 189346 - DNA, 570 bp, Homo sapiens
  Payload ID: 17392
  Gene Symbol: TAF1C
  Gene Name: TATA box binding protein (TBP)-associated factor, RNA polymerase I, C, 110kDa
  ENST ID: ENST00000561955
  CDS Start-End: 290-570
gtgggtagctgcggcggggctgacccgtcccgagtgccaaagctggggttctacttgagatttccctcgtggtgccagggtccggcgagcatcacgccgaggcccattttccagacgaccacgacgaggccggggtcacatccctgggaccctggcctgactgcccgggacctgcttttccgcggagggtgccggtatcggaagcggccccgagtcgtgctggatgtgactgagcagccggttcctcttggatcatggagacgtagcctttgcgcccctggggaagctgatgctggagaatttcaagctggagggagcggggagccgcactaagaagaagacagtggtcagtgtgaagaagctgctccaggacctcggtggacaccagccctgggggtgtccctgggcttacctcagcaaccgacagcgccgcttctctatcctcgggggccccatcctgggcacgtcggtggcgagccacttggcagagctgctgcacgaggagctggtgctgcggtgggagcagctgcttctggatgaggcctgcactgggggcgcgctggcctgggt

SEQ ID NO: 189347 - DNA, 1140 bp, Homo sapiens
  Payload ID: 17392
  Gene Symbol: TAF1C
  Gene Name: TATA box binding protein (TBP)-associated factor, RNA polymerase I, C, 110kDa
  ENST ID: ENST00000568265
  CDS Start-End: 1-1140
ctcctcttcgtggcgttgggcagacttcactgcgcaccctcgggtgctgaccgtgggtgaccgcaccggagtgaagatgctggacactcagggcccgccgggctgtggtctgttgctttttcgtttgggggcagaggcttcgtgccagaaaggggaacgtgtcctgcttacccagtacctggggcactccagccccaaatgcctcccccctactcttcatctcgtctgtacccagttctctctctacctagtggacgagcgccttcccctggtgccgatgctgaagtggaaccatggcctcccctccccgctcctgctggcccgactgctgcctccgccccggcccagctgcgtgcagcccctgctcctcggaggccagggtgggcagctgcagctgctgcacctggcaggtctggctgccgtcgtcccgcccttgccctcagcgcccacaccaggcctggtgctcttccagctctcggcggcgggagatgtcttctaccagcagctccgcccccaggtggactccagcctccgcagagatgctgggcctcctggcgacacccaacctgactgccatgcccccacagcttcctggacctcccaggacactgccggctgcagccagtggctgaaggccctgctaaaagtgcccctggctcctcctgtgtggacagcacccaccttcacccaccgccagatgctgggcagcacagagctgcggagggaggaagaggaagggcagcggctgggtgtgctccgcaaggccatggcccgagggcagctcctgctgcagagagacctgggctccctccctgcggcagagccaccccctgcacccgagtcaggcctagaggacaagctcagtgagcgcctgggggaagcctgggcaggccgaggggctgcctggtgggagaggcagcagggcaggacctcggagcccgggagacagaccaggcggcccaagcgccggacccagctgtccagcagcttttcgctcagtggccatgtggatccctcagaggacaccagctcccctcatagccctgagtggccacctgctgatgctctgcccctgccccccacgaccccgccctcccaggagttgactccggatgcatgcgcccagggcgtcccatcaga

SEQ ID NO: 189348 - DNA, 2628 bp, Homo sapiens
  Payload ID: 17392
  Gene Symbol: TAF1C
  Gene Name: TATA box binding protein (TBP)-associated factor, RNA polymerase I, C, 110kDa
  ENST ID: ENST00000566903
  CDS Start-End: 154-783
gatttccctcgtggtgccagggtccggcgagcatcacgccgaggcccattttccagacgaccacgacgaggccggggtcacgaactctggcgccccttaccagcttccagtctctcgaggtggccagtgtggtgcttggtccttgtttccaggatggacttccccagctccctccgccctgcattgtttctgaccggcccccttggtctgagcgacgtccctgacctctctttcatgtgcagctggcgagacgcactgactctgccagaggcccagccccagaactcagagaatggggcactgcatgtgaccaaggacctgctgtgggagccggcaacccctgggcctctccccatgctgcctcccctcatcgatccctgggaccctggcctgactgcccgggacctgcttttccgcggagggtgccggtatcggaagcggccccgagtcgtgctggatgtgactgagcagatcagccggttcctcttggatcatggagacgtagcctttgcgcccctggggaagctgatgctggagaatttcaagctggagggagcggggagccgcactaagaagaagacagtggtcagtgtgaagaagctgctccaggacctcggtggacaccagccctgggggcaagtgtccctgggcttacctcagcaaccgacagcgccgcttctctatcctcgggggccccatcctgggcacgtcggtggcgagccacttggcagagctgctgcacgaggagctggtgctgcggtgggagcagctgcttctggatgaggcctgcactgggggcgcgctggcctgggttcctggaaggacaccccagttcgggcagctggtctaccctgctggaggcgcccaggacaggctgcatttccaagaggtcgttctgaccccaggtgacaatccccaattccttgggaaacctggacgcatccagctccagggacctgtccggcaagtggtgacatgcaccgtccagggagaaactctgctggccgtccgctctgactaccactgtgccgtgtggaagtttggtaaacagtggcagccaacccttctgcaggcaatgcaggtggagaaaggggccacggggatcagcctcagccctcacctgcccggggagctggccatctgcagccgctcgggagccgtctgcctgtggagccctgaggatgggctgcggcaaatctacagggaccctgagaccctcctgtccagcagcttttcgctcagtggccatgtggatccctcagaggacaccagctcccctcatagccctgagtggccacctgctgatgctctgcccctgccccccacgaccccgccctcccaggagttgactccggatgcatgcgcccagggcgtcccatcagagcagcggcagatgctccgtgactacatggccaagctaccaccccagagggacaccccaggctgtgccaccacacctccccactcccaggcctccagcgtccgggccactcgctcccagcagcacacacccgtcctctctagctctcagcccctccggaagaagcctcgaatgggcttctgaggacacaaggtgggctgccctcaagccccagagagcccctcatccttcctctgggaccagatgtgccttccacagttgaaacttgagaagcagagctcgccaccttctggaggccactgtgatgatgagccaagcaatttggagccaagttgaagggacagggcaacaaaatacagtagtagtttcttttgtattttgtatattcgcctgaagatcatcccgcaaggcaggctggaggtgccggtgggcctgtgttgctgggattttagtctgtgctgggaggcagggctccgctgcgcctcagctgtgggggcctcaggcaggtccctcagttctcacgccttcctgtccagtggaatgggggccaggagtgctggctcctcgtgtttggtgagggtggagtgaggcccctgcagagctgctgatgaggtgggcacagcggccgttggcagctgctgttgtgggttgctttgtcaatctctgccccggtctgatgtttcctacagggagatgccttggatccaggttcagggactaaatacacttggcagctgaagatgaattggaatggtcacgttttttaggctggacagcgtcccgccacagctactacctgacactgagctcatgcagagagatgatggctgatgttccttctcccttgggacatgggtctggcacctgtgggctgtcgatagtgccctctgagcagagggtcacggtcatgtcagtttgggggaattctctgttgtgcctcacagactcccccctttctttcctccctccccttctcattttgatgtctaaagcatcaagtccctcttcctcggagtttctctagctgcagtggaagattctgttttcctgtggggaaaatgctcacttgagattttgcagggacccgggtctgtctggtttctgatgacatagtaagagaaaggtcttttttcaggttggctggtgaaaggaattgcatgtgactcacacaaacaggagctagcccaatcatacactgactcgcgtgggtgttaaaatgtttatcatgcctaagggagacatttatg

SEQ ID NO: 189349 - DNA, 564 bp, Homo sapiens
  Payload ID: 17392
  Gene Symbol: TAF1C
  Gene Name: TATA box binding protein (TBP)-associated factor, RNA polymerase I, C, 110kDa
  ENST ID: ENST00000569505
  CDS Start-End: 184-396
ctgacccgtcccgagtgccaaagctggggttctacttgagatttccctcgtggtgccagggtccggcgagcatcacgccgaggcccattttccagacgaccacgacgaggccggggtcacaatggggcactgcatgtgaccaaggacctgctgtgggagccggcaacccctgggcctctccccatgctgcctcccctcatcgatccctgggaccctggcctgactgcccgggacctgcttttccgcggagggtgccggtatcggaagcggccccgagtcgtgctggatgtgactgagcagccggttcctcttggatcatggagacgtagcctttgcgcccctggggaagctgatgctggagaatttcaagctggagggagcggggagccgcactaagaagaagacagtggtcagtgtgaagaagctgctccaggacctcggtggacaccagccctgggggtgtccctgggcttacctcagcaaccgacagcgccgcttctctatcctcgggggccccatcctgggcacgtcggtggcgagccacttggcagagctgctgcacga

SEQ ID NO: 189350 - DNA, 555 bp, Homo sapiens
  Payload ID: 17392
  Gene Symbol: TAF1C
  Gene Name: TATA box binding protein (TBP)-associated factor, RNA polymerase I, C, 110kDa
  ENST ID: ENST00000564454
  CDS Start-End: 147-555
aagaccgtgggtagctgcggcggggctgacccgtcccgagtgccaaagctggggttctacttgagatttccctcgtggtgccagggtccggcgagcatcacgccgaggcccattttccagacgaccacgacgaggccggggtcacgatggacttccccagctccctccgccctgcattgtttctgaccggcccccttggtctgagcgacgtccctgacctctctttcatgtgcagctggcgagacgcactgactctgccagaggcccagccccagaactcagagaatggggcactgcatgtgaccaaggacctgctgtgggagccggcaacccctgggcctctccccatgctgcctcccctcatcgccctttccgtaacctccttctcagatccctgggaccctggcctgactgcccgggacctgcttttccgcggagggtgccggtatcggaagcggccccgagtcgtgctggatgtgactgagcagatcagccggttcctcttggatcatggagacgtagcctttgcgcccctggggaagctgatgctggaga

SEQ ID NO: 189351 - DNA, 2540 bp, Homo sapiens
  Payload ID: 17393
  Gene Symbol: TAF1D
  Gene Name: TATA box binding protein (TBP)-associated factor, RNA polymerase I, D, 41kDa
  Uniprot ID: Q9H5J8
  ENST ID: ENST00000323981
  CDS Start-End: 201-1037
cttttcttccgcacggttggaggaggtcggctggttatcgggagttggagggctgaggtcgggagggtggtgtgtacagagctctaggacaccaggccagtcgcgggttttgggccgaggcctgggttacaagcagcaagtgcgcggttggggccactgcgaggccgttttagaaaactgtttaaaacaaagagcaattgatggataaatcaggaatagattctcttgaccatgtgacatctgatgctgtggaacttgcaaatcgaagtgataactcttctgatagcagcttatttaaaactcagtgtatcccttactcacctaaaggggagaaaagaaaccccattcgaaaatttgttcgtacacctgaaagtgttcacgcaagtgattcatcaagtgactcatcttttgaaccaataccattgactataaaagctatttttgaaagattcaagaacaggaaaaagagatataaaaaaaagaaaaagaggaggtaccagccaacaggaagaccacggggaagaccagaaggaaggagaaatcctatatactcactaatagataagaagaaacaatttagaagcagaggatctggcttcccatttttagaatcagagaatgaaaaaaacgcaccttggagaaaaattttaacgtttgagcaagctgttgcaagaggattttttaactatattgaaaaactgaagtatgaacaccacctgaaagaatcattgaagcaaatgaatgttggtgaagatttagaaaatgaagattttgacagtcgtagatacaaatttttggatgatgatggatccatttctcctattgaggagtcaacagcagaggatgaggatgcaacacatcttgaagataacgaatgtgatatcaaattggcaggggatagtttcatagtaagttctgaattccctgtaagactgagtgtatacttagaagaagaggatattactgaagaagctgctttgtctaaaaagagagctacaaaagccaaaaatactggacagagaggcctgaaaatgtgacaggatcatgaatgtcaaaggcttttatcttgagaacatggtgtctggagttaaaggtattggcatactccacacatctgtaccattcttgagtgatcgcttaggaatgaatgtgatttgaactcattcatgttgagagggtgtcaaattgagaaccaggtagatccccaccacctacagtaaaaaggaccctaaagtaaattggttgaagaaattagatcccaaagattcttggtgaattttgaagtcttcatcagtatatccatattaaaacgagatgacagaagccaaagtaattatggcaagtaatggtttttatcttaactataagttatttgctcaagggtgtaatggtcattaccaaggcttttagaatgcagtttctcatttgctgtggacatgaccataaaaaaatttcccagtaggttttctatctgctactttgctagcaatcagcttattgggaacagttgattaactgtaatagaaatgcaatacaaataaaatgtgaaccacatgtgatttttctttaaaatcagtgagatttgaaaattctcctagatctcttgaatcatgcaaatttgctttgcctttatattgtaacccttgtgggttgctaataaccaagcagtttgtagtagagttaactcaggctcgttctagggactcattcatgttcactcactgtacactcatctctggaaatgtaaaatttacttttatactattgttatgtagggctgacaggacaactggatcagtttcattaaaaaggtatgtatgcattagaaaagacatttgtatgggtcatttcaaagagggcttatgaggctgtgaaacccagagctcttaacgctgtgaccaaagatggaagttctctataggaagccatagcactcctaatgtttggtgctatgttttcctgaggagatataaaacgtaataatccaggattgttgccatgtgagagttttaaaggttaatcaaaatttctcttcttcagggcaaacttgaagataaatcttttgactccagctctttagaggatctaaagtgaccttgatggacagtggaagaaatcacaacatggaattcctcgaataacaatttattgactttaaataattttgtctaatgctacatatacacaattaaaaaacctttacactatttctagaaagtcagcatgtatttttggctcgaagtttctctagtgttttctgtggaaggaataaaaatttgagtttcagttgtgtacttcatgcttgaaaaattaagtccttctccctcagttatactcaccttatggaattcttttgcccttgctctgttttgggcataagcttcttgttttgttttttcttccttttgttgtttcacttcagctagttgattgtataacctgtaaagaatttatatagaattagagacaaacactgcaaaaagtgaatcactaaaaaaaaaaaaaaaattaaccctaccttagacccctttggtgcctta

SEQ ID NO: 189352 - DNA, 547 bp, Homo sapiens
  Payload ID: 17393
  Gene Symbol: TAF1D
  Gene Name: TATA box binding protein (TBP)-associated factor, RNA polymerase I, D, 41kDa
  ENST ID: ENST00000393259
  CDS Start-End: 1-135
gaggatgcaacacatcttgaagataacgaatgtgatatcaaattggcaggggatagtttcatagcttttatcttgagaacatggtgtctggagttaaaggtattggcatactccacacatctgtaccattcttgagtgatcgcttaggaatgaatgtgatttgaactcattcatgttgagagggtgtcaaattgagaaccaggtagatccccaccacctacagtaaaaaggaccctaaagtaaattggttgaagaaattagatcccaaagattcttggtgaattttgaagtcttcatcagtatatccatattaaaacgagatgacagaagccaaagtaattatgggctgacaggacaactggatcagtttcattaaaaagggcaaacttgaagataaatcttttgactccagctctttagaggatctaaagtgaccttgatggacagtggaagaaatcacaacatggaattcctcgaataacaatttattgactttaaataattttgtctaatgctacatatacacaattaaaaaacctttacacta

SEQ ID NO: 189353 - DNA, 2082 bp, Homo sapiens
  Payload ID: 17393
  Gene Symbol: TAF1D
  Gene Name: TATA box binding protein (TBP)-associated factor, RNA polymerase I, D, 41kDa
  Uniprot ID: Q9H5J8
  ENST ID: ENST00000448108
  CDS Start-End: 652-1488
caaaggattacaaaacactcaggcacacatcccacccgtcaccctcgccacacacccgggaccagatttagaaagccaggcgacagctcagcaaacgcgagaccaccggaaacgaaccgggctgagaggctgtttcctcacagttctcatccactcacaagtgaccgcacgttttgtttttgttatttgccgaaatgttcttggctattccactcacctaaacggtcacggtagcaaaacacccagagtccggatcttcgcctaggccaaccccgcctcctcagaatacgcgagctagagctccgcccacgttagtcagtcctccctgcgcggcgagaaaaatggcgcccccacgtcgcgtctcctcccaccgctcgccttcttcccggaagctaagttgtatcgcgagatttcggcctgactattacttgggccacggaaatagccaacccttttcttccgcacggttggaggaggtcggctggttatcgggagttggagggctgaggtcgggagggtggtgtgtacagagctctaggacaccaggccagtcgcgggttttgggccgaggcctgggttacaagcagcaagtgcgcggttggggccactgcgaggccgttttagaaaactgtttaaaacaaagagcaattgatggataaatcaggaatagattctcttgaccatgtgacatctgatgctgtggaacttgcaaatcgaagtgataactcttctgatagcagcttatttaaaactcagtgtatcccttactcacctaaaggggagaaaagaaaccccattcgaaaatttgttcgtacacctgaaagtgttcacgcaagtgattcatcaagtgactcatcttttgaaccaataccattgactataaaagctatttttgaaagattcaagaacaggaaaaagagatataaaaaaaagaaaaagaggaggtaccagccaacaggaagaccacggggaagaccagaaggaaggagaaatcctatatactcactaatagataagaagaaacaatttagaagcagaggatctggcttcccatttttagaatcagagaatgaaaaaaacgcaccttggagaaaaattttaacgtttgagcaagctgttgcaagaggattttttaactatattgaaaaactgaagtatgaacaccacctgaaagaatcattgaagcaaatgaatgttggtgaagatttagaaaatgaagattttgacagtcgtagatacaaatttttggatgatgatggatccatttctcctattgaggagtcaacagcagaggatgaggatgcaacacatcttgaagataacgaatgtgatatcaaattggcaggggatagtttcatagtaagttctgaattccctgtaagactgagtgtatacttagaagaagaggatattactgaagaagctgctttgtctaaaaagagagctacaaaagccaaaaatactggacagagaggcctgaaaatgtgacaggatcatgaatgtcaaaggtgaagcatatagaaaaaacgacttcatagaaatgaataaagataaatgtggatatatgtaccagtctggtggtgaagaaattctgaaacccagaactttataacaagaaaaaaaatttttaaccctgtgaagaagtttgtgaaagaaacttgtgaagtagtaataattagaaaaaaaaccattaaaacaccagagaaaatacatagaaaaatttgagaaattgtcatttgatttctgaataagagcttacaggtgtcctgtgagtattgaaacaatgaaatgtagtgattttaattttgaaaagaaaatcttaaagtaacttgacacccaaccatcttgaagaggggatttgaaatgctgtaattttatcccagctttgttcagccatgacaagtgacctgtcagatgcttagtattgtaataacctcatttccctttccaaatttagagtatctttaatactattttttttagacagagtctcgatctgtcacccaggctgtagtgcaatggccgcagtcttggcttactgcaacctccatctcccgggttcaagcgattctgcctcagcct

SEQ ID NO: 189354 - DNA, 565 bp, Homo sapiens
  Payload ID: 17393
  Gene Symbol: TAF1D
  Gene Name: TATA box binding protein (TBP)-associated factor, RNA polymerase I, D, 41kDa
  ENST ID: ENST00000532455
  CDS Start-End: 1-332
ccttttcttccgcacggttggaggaggtcggctggttatcgggagttggagggctgaggtcgggagggtggtgtgtacagagctctaggacaccaggccagtcgcgggttttgggccgaggcctgggttacaagcagcaagtgcgcggttggggccactgcgaggccgttttagtgataactcttctgatagcagcttatttaaaactcagtgtatcccttactcacctaaaggggagaaaagaaaccccattcgaaaatttgttcgtacacctgaaagtgttcacgcaagtgattcatcaagtgactcatcttttgaaccaataccattgactataaaagctatttttgaaagattcaagaacaggaaaaagagatataaaaaaaagaaaaagaggaggtaccagccaacaggaagaccacggggaagaccagaaggaaggagaaatcctatatactcactaatagataagaagaaacaatttagaagcagaggatctggcttcccatttttagaatcagagaatgaaaaaaacgcaccttggagaaaaattttaacgtttgag

SEQ ID NO: 189355 - DNA, 335 bp, Homo sapiens
  Payload ID: 17393
  Gene Symbol: TAF1D
  Gene Name: TATA box binding protein (TBP)-associated factor, RNA polymerase I, D, 41kDa
  ENST ID: ENST00000527690
  CDS Start-End: 312-335
cctcgggaaaccgaacgcaacgctcagactggaaacaaaggagctggcccagcaactttcccagaacgcaccgcaagctccctcctcgggacgctgcattttcattttgcattgagcctcacaaattacacagctaggcttgctgctgaatacggcagtgagggacatgccataccagtcctggagcttcgtcattgcccagaccctgtggatcaaatgcagtgggctgcctaaaggatcggactttttatccccggaattgtccaaactatggagcaaagcagaaaactgtttaaaacaaagagcaattgatggataaatcaggaatagattct

SEQ ID NO: 189356 - DNA, 1127 bp, Homo sapiens
  Payload ID: 17393
  Gene Symbol: TAF1D
  Gene Name: TATA box binding protein (TBP)-associated factor, RNA polymerase I, D, 41kDa
  ENST ID: ENST00000527169
  CDS Start-End: 186-833
gttggaggaggtcggctggttatcgggagttggagggctgaggtcgggagggtggtgtgtacagagctctaggacaccaggccagtcgcgggttttgggccgaggcctgggttacaagcagcaagtgcgcggttggggccactgcgaggccgttttagaaaactgtttaaaacaaagagcaattgatggataaatcaggaatagattctcttgaccatgtgacatctgatgctgtggaacttgcaaatcgaagtgataactcttctgatagcagcttatttaaaactcagtgtatcccttactcacctaaaggggagaaaagaaaccccattcgaaaatttgttcgtacacctgaaagtgttcacgcaagtgattcatcaagtgactcatcttttgaaccaataccattgactataaaagctatttttgaaagattcaagaacaggaaaaagagatataaaaaaaagaaaaagaggaggtaccagccaacaggaagaccacggggaagaccagaaggaaggagaaatcctatatactcactaatagataagaagaaacaatttagaagcagaggatctggcttcccatttttagaatcagagaatgaaaaaaacgcaccttggagaaaaattttaacgtttgagcaagctgttgcaagaggattttttaactatattgaaaaactgaagtatgaacaccacctgaaagaatcattgaagcaaatgaatgttggtgaagatttagaaaatgaagattttgacagtcgtagatacaaatttttggatgatgatggatccatttctcctattgaggagtcaacgcttttatcttgagaacatggtgtctggagttaaaggtattggcatactccacacatctgtaccattcttgagtgatcgcttaggaatgaatgtgatttgaactcattcatgttgagagtaagcaatgcttttttttccagggtgtcaaattgagaaccaggtagatccccaccacctacagtaaaaaggaccctaaagtaaattggttgaagaaattagatcccaaagattcttggtgaattttgaagtcttcatcagtatatccatattaaaacgagatgacagaagccaaagtaattatggcaa

SEQ ID NO: 189357 - DNA, 1735 bp, Homo sapiens
  Payload ID: 17393
  Gene Symbol: TAF1D
  Gene Name: TATA box binding protein (TBP)-associated factor, RNA polymerase I, D, 41kDa
  Uniprot ID: Q9H5J8
  ENST ID: ENST00000526015
  CDS Start-End: 200-1036
ttttcttccgcacggttggaggaggtcggctggttatcgggagttggagggctgaggtcgggagggtggtgtgtacagagctctaggacaccaggccagtcgcgggttttgggccgaggcctgggttacaagcagcaagtgcgcggttggggccactgcgaggccgttttagaaaactgtttaaaacaaagagcaattgatggataaatcaggaatagattctcttgaccatgtgacatctgatgctgtggaacttgcaaatcgaagtgataactcttctgatagcagcttatttaaaactcagtgtatcccttactcacctaaaggggagaaaagaaaccccattcgaaaatttgttcgtacacctgaaagtgttcacgcaagtgattcatcaagtgactcatcttttgaaccaataccattgactataaaagctatttttgaaagattcaagaacaggaaaaagagatataaaaaaaagaaaaagaggaggtaccagccaacaggaagaccacggggaagaccagaaggaaggagaaatcctatatactcactaatagataagaagaaacaatttagaagcagaggatctggcttcccatttttagaatcagagaatgaaaaaaacgcaccttggagaaaaattttaacgtttgagcaagctgttgcaagaggattttttaactatattgaaaaactgaagtatgaacaccacctgaaagaatcattgaagcaaatgaatgttggtgaagatttagaaaatgaagattttgacagtcgtagatacaaatttttggatgatgatggatccatttctcctattgaggagtcaacagcagaggatgaggatgcaacacatcttgaagataacgaatgtgatatcaaattggcaggggatagtttcatagtaagttctgaattccctgtaagactgagtgtatacttagaagaagaggatattactgaagaagctgctttgtctaaaaagagagctacaaaagccaaaaatactggacagagaggcctgaaaatgtgacaggatcatgaatgtcaaaggcttttatcttgagaacatggtgtctggagttaaaggactattgttagatctgtgggaaggaattacaagacagttgctaaaagtttgaaaaagacggttgctaaacgttatgaaaaaccagataatctacttttttaccttaggtattggcatactccacacatctgtaccattcttgagtgatcgcttaggaatgaatgtgatttgaactcattcatgttgagagggtgtcaaattgagaaccaggtagatccccaccacctacagtaaaaaggaccctaaagtaaattggttgaagaaattagatcccaaagattcttggtgaattttgaagtcttcatcagtatatccatattaaaacgagatgacagaagccaaagtaattatgggctgacaggacaactggatcagtttcattaaaaagggcaaacttgaagataaatcttttgactccagctctttagaggatctaaagtgaccttgatggacagtggaagaaatcacaacatggaattcctcgaataacaatttattgactttaaataattttgtctaatgctacatatacacaattaaaaaacctttacactatttctagaaagtcagcatgtatttttggctcgaagtttctctagtgttttctgtggaaggaataaaaatttgagtttcagttgtgta

SEQ ID NO: 189358 - DNA, 737 bp, Homo sapiens
  Payload ID: 17393
  Gene Symbol: TAF1D
  Gene Name: TATA box binding protein (TBP)-associated factor, RNA polymerase I, D, 41kDa
  ENST ID: ENST00000534770
  CDS Start-End: 187-297
ggttggaggaggtcggctggttatcgggagttggagggctgaggtcgggagggtggtgtgtacagagctctaggacaccaggccagtcgcgggttttgggccgaggcctgggttacaagcagcaagtgcgcggttggggccactgcgaggccgttttagaaaactgtttaaaacaaagagcaattgatggataaatcaggaatagattctcttgaccatgtgacatctgatgctgtggaacttgcaaatcgaaggggagaaaagaaaccccattcgaaaatttgttcgtacacctgaaagtgttcacgcaagtgattcatcaagtgactcatcttttgaaccaataccattgactataaaagctatttttgaaagattcaagaacaggaaaaagagatataaaaaaaagaaaaagaggaggtaccagccaacaggaagaccacggggaagaccagaaggaaggagaaatcctatatactcactaatagataagaagaaacaatttagaagcagaggatctggcttcccatttttagaatcagagaatgaaaaaaacgcaccttggagaaaaattttaacgtttgagcaagctgttgcaagaggattttttaactatattgaaaaactgaagtatgaacaccacctgaaagaatcattgaagcaaatgaatgttggtgaagatttagaaaatgaagattttgacagtcgtagatacaaatttttggatgatgatggat

SEQ ID NO: 189359 - DNA, 483 bp, Homo sapiens
  Payload ID: 17393
  Gene Symbol: TAF1D
  Gene Name: TATA box binding protein (TBP)-associated factor, RNA polymerase I, D, 41kDa
  ENST ID: ENST00000540232
  CDS Start-End: 1-129
gtaagttctgaattccctgtaagactgagtgtatacttagaagaagaggatattactgaagaagctgctttgtctaaaaagagagctacaaaagccaaaaatactggacagagaggcctgaaaatgtgacaggatcatgaatgtcaaaggcttttatcttgagaacatggtgtctggagttaaaggtattggcatactccacacatctgtaccattcttgagtgatcgcttaggaatgaatgtgatttgaactcattcatgttgagagtaagcaatgcttttttttccagggtgtcaaattgagaaccaggtagatccccaccacctacagtaaaaaggaccctaaagtaaattggttgaagaaattagatcccaaagattcttggtgaattttgaagtcttcatcagtatatccatattaaaacgagatgacagaagccaaagtaattatgggctgacaggacaactggatcagtttcatta

SEQ ID NO: 189360 - DNA, 505 bp, Homo sapiens
  Payload ID: 17393
  Gene Symbol: TAF1D
  Gene Name: TATA box binding protein (TBP)-associated factor, RNA polymerase I, D, 41kDa
  ENST ID: ENST00000533794
  CDS Start-End: 1-79
tattactgaagaagctgctttgtctaaaaagagagctacaaaagccaaaaatactggacagagaggcctgaaaatgtgacaggatcatgaatgtcaaaggcttttatcttgagaacatggtgtctggagttaaaggtattggcatactccacacatctgtaccattcttgagtgatcgcttaggaatgaatgtgatttgaactcattcatgttgagaggtaagtaaaatatttaacttataataatcaaggactcaaaagatgaaaaatagaaattacaccatcccagtatttcaggtataacacagaattagtaagatactggcaaaaatattacaatgtatatatttgtatagagaaggaaaatgaagagactgcatgtctatacctaccaaacgaaactacctgtgttctttgcatcattattcaactggcagttacacatatttcatcctaaagtcacgtaaacctgtgtggatatgttgaatcaatagggatatgaatta

SEQ ID NO: 189361 - DNA, 2037 bp, Homo sapiens
  Payload ID: 17394
  Gene Symbol: TBPL2
  Gene Name: TATA box binding protein like 2
  Uniprot ID: Q6SJ96
  ENST ID: ENST00000247219
  CDS Start-End: 72-1199
acgcttctctcgcgccctctgcaggaacctgggccgagggccgccccgcctcgctgcccccaggctcataaatggcctctgcgccctggccggagcgggttccgaggctgctcgctccgcgcttaccctcttacccgcccccacccccaacagtgggattacggtccatggagcaggaggagacctacctggagctctacctggaccagtgcgccgctcaggatggccttgccccacccaggtctcccctgttcagcccagttgtaccttatgatatgtacatactgaatgcatccaatccggatactgcatttaattcgaaccctgaagtcaaagaaacatctggtgatttctcatctgtggatcttagcttcctaccagatgaagttacccaggaaaataaagaccagcctgtcattagcaaacacgaaactgaagaaaattctgaaagccaaagtccacaaagtaggttgccatcacccagcgaacaggacgttgggctgggcttaaacagcagcagtttgtcaaattcccattcacagctgcaccctggtgatactgactcagtccagccctctcctgagaaaccaaactccgactccttgtctctggcatccataactcccatgacaccaatgacccctatttcagaatgttgtggaattgtacctcaactacagaatatagtttccactgtaaacctggcctgtaagttggatctgaagaaaatagctttgcatgcaaaaaatgcagaatataacccaaagaggtttgctgctgtcataatgaggatccgagagcccaggacaacagcccttatatttagctctgggaagatggtctgcacgggagccaaaagtgaagagcagtctcgacttgcagcaagaaaatatgctcgtgtggtgcagaagcttgggttccctgccagattcctcgattttaaaattcagaacatggttggaagctgtgatgtgagatttcccatcaggctggaaggtttggtgctaacccatcagcagttcagtagttacgagcctgaactgtttcctggtcttatttatagaatggtaaaaccacgaattgtgttgcttatctttgtatctggaaaagttgtgttgacaggtgccaaagaacgttctgagatctatgaagcatttgaaaacatctatcctattctaaaaggttttaaaaaagcctgagcatatcattcagcatctcacattattctggtttgaatatgtccataagcccagcacagaaacagctggattcttctacgtttaattgtagatgttacaagtacgttacttattaaagggcgactctgtgtaagtaacctaagaaacgaagaaaaattcttattcaaaatgactccttttgtgttattttaaaaactgaacaagtaaacatttcaaaatttgagagatttagggtctcactagaatgatattgtagcatcatgaagactcaatgcgtttccttttagccggaagggccatcttccagtaatttgccaaaatgacgaacacaaagggaaagaggtgaggcacctgatacatgttctctaggccttttagaaaagatggagttgttcctttggccacatacatgcgaatctacgaaaaaggtgatattgtagacatcaagggaatggctgcttttcaaaaaggagtgctccgcaaatgttaccacagcaaagctggaagagtctacagtgttacccagcatgctgttggcattgtaaacaagggcaagatttttgccaagagaatgaatgtgcttactgagccaggctggtcttgaactcctgacctcagttgatccatctgcctgggccttggcactctaagagccaagtaagtttcctgaaacgcgtgaaggtaaataatcagaaaaagacgtcaaagggagaggtgtctgagttcaactgaagcgccagcctgctccacccagacaagcacttagaaccaatggagggagcctgggctgctggaacctattccctatgagttcatggcataataggtgtcaaaaaaa

SEQ ID NO: 189362 - DNA, 559 bp, Homo sapiens
  Payload ID: 17394
  Gene Symbol: TBPL2
  Gene Name: TATA box binding protein like 2
  ENST ID: ENST00000556755
  CDS Start-End: 493-559
cttcccggccgccatcccatctaggaagtgaggagtgtctctgcccggccgcccatcgtctgagatgtggggagcgcctctgccccgccgcccgtctgggatgtgaggagcgcctctacgcggccgcgaccccatccaggaggtgaggagcgtctctgcccggccgccccgtctgagaagtgaggagaccctccgcccggcagccgccccgtctgagaagtgaggagcccctccgcccggcagccgccccgtctgagaatgggattacggtccatggagcaggaggagacctacctggagctctacctggaccagtgcgccgctcaggtgggagaatttttttataaagacaatgatcagcactgaggtagaaatggtgactttccctagcatttaacacagcaaagaagagcccagacaggaaaggttctgagaaaggatggccttgccccacccaggtctcccctgttcagcccagttgtaccttatgatatgtacatactgaatgcatccaatccggatactgcatttaattcgaaccctgaagtcaaagaaacat

SEQ ID NO: 189363 - DNA, 6849 bp, Homo sapiens
  Payload ID: 17395
  Gene Symbol: TMF1
  Gene Name: TATA element modulatory factor 1
  Uniprot ID: P82094
  ENST ID: ENST00000398559
  CDS Start-End: 218-3499
gcaagcgcatgcgcacatgggcccccttcgtctcagctgtgcgggaacggccgagggtaacatcccgggctcgcgggaggctgtcggggtaatggccacacgctgacagaaccagccgagtggaaaaggggagcgaagccgttcctctgcacccttccccaggcctgaggccttcccgcttggtgctgccgccgccactgccggctgaggaggggcgatgagttggttcaacgcctcccagctctccagcttcgctaagcaggccctgtcccaggcccagaagtctattgacagggttctggacatccaggaagaggagccgagcatctgggccgagaccattccgtatggagagccgggaataagttcccctgtcagtggaggatgggatacttcaacctgggggttgaaatcaaacactgaacctcagagtccaccaatagcctctcctaaagcaatcacaaagccagttcggaggactgtggtcgatgaatctgaaaatttcttcagtgcctttctctcgccaactgatgtccagaccattcagaagagtccagtggtatcaaaacctccagcaaaatcacaacgaccagaagaagaagtgaaaagcagcttacatgaatccttgcacattggccagtcaagaactcctgaaacaactgaatcacaagtaaaagactcttctttgtgtgtttcaggggaaactctggcagcaggtacttcatcacctaaaactgaaggcaagcacgaagaaactgttaataaagaatcggatatgaaggtgccaactgtaagtttgaaagtatctgaaagtgtaattgatgtgaaaacaactatggaaagtatatctaatacgtctacgcagtctctcacagcagaaacaaaggacatagctttggaacctaaggaacaaaaacatgaagacaggcagagcaatacaccttctcctcctgttagtaccttttcatcaggtacttctaccaccagtgatattgaagttttagatcatgaaagtgtaataagtgagagctcagcgagctcgagacaagagactacagattcaaaatcaagtcttcacttgatgcagacatcttttcagcttctctctgcatctgcttgtcctgaatataatcgtttagatgatttccaaaaactcactgagagttgctgttcatctgatgcttttgaaagaatagactcatttagtgtacagtcattagatagccggagtgtaagtgaaatcaattcagatgatgaattgtcaggcaagggatatgctttagtgcctattatagttaattcttcaactccaaagtctaaaacagttgaatctgctgaaggaaaatctgaagaagtaaatgaaacattagttatacccactgaggaagcagaaatggaagaaagtggacgaagtgcaactcctgttaactgtgaacagcctgatatcttggtttcttccacaccaataaatgaaggacagactgtgttagacaaggtggctgagcagtgtgaacctgctgaaagtcagccagaagcactttctgagaaggaagatgtttgcaagacagttgaatttctgaatgaaaagctggaaaaaagggaggctcagttattatctcttagtaaggaaaaagcacttctagaagaagcttttgataacctgaaagatgaaatgttcagagtgaaagaagaaagcagtagcatttcttccttgaaagatgagtttactcaaagaattgcagaagcagaaaagaaagttcaactagcctgcaaagagagagatgctgctaaaaaggaaatcaaaaacataaaagaagaacttgccactagattaaatagtagtgaaactgcagaccttttgaaagagaaagatgagcagatccgagggttaatggaagaaggagaaaaactttcaaaacagcagctgcacaattctaacatcatcaagaaattaagagctaaagacaaggagaatgaaaatatggttgcaaagctgaacaaaaaagttaaagagctagaagaggagttgcagcatttgaaacaggtccttgatggcaaagaagaggttgagaaacaacatagagaaaatattaaaaaactaaattccatggtagaacgccaagagaaagatcttggccgtcttcaggtagacatggatgaacttgaagaaaagaaccgaagtattcaggctgccctggatagtgcatacaaagaacttactgatcttcacaaagccaatgctgcaaaggatagtgaggcacaggaagctgctctgagccgtgaaatgaaagctaaagaagaactttctgcagcattagagaaggcccaagaagaagcccgtcagcagcaagaaacattagccattcaagtgggggaccttaggcttgcattgcagcgtacagaacaagcggctgccagaaaggaggattatttacgccatgagatcggtgaacttcagcagagactccaggaagcagagaatcgaaaccaggaactgagtcaaagtgtttcatcaacaacaagaccattgcttcgacaaatagaaaatttgcaagcaaccctgggatcccagacatcgtcgtgggagaaattagagaagaatctttctgataggcttggtgaatcccagaccttgctggcagcagcagttgagagagaacgtgcagctacagaagaactccttgctaacaaaattcagatgtcttccatggagtcacagaattctcttttaagacaggaaaacagtagatttcaagcccagctagaatcagagaaaaataggctgtgtaaactggaggatgagaacaataggtaccaggttgaattggaaaacctaaaagatgaatatgtaagaacacttgaagagacgaggaaagaaaagacattgttgaatagtcagttagaaatggaaagaatgaaagttgaacaagaaaggaagaaagccatttttactcaagaaacaataaaagaaaaggaacgcaagccattttctgtttctagcactcccaccatgtcacgctcaagttcaataagtggtgttgatatggcaggactacagacatcttttctgtctcaggatgagtctcatgatcactcatttggaccaatgcctatatcagcaaatggaagcaatctttatgatgctgtaaggatgggagcaggatcaagcataattgaaaacctacagtctcagctaaagctaagggaaggggaaatcactcatttacagctagaaattggcaatctagaaaaaactcgatcaataatggctgaagaactagttaaattaacaaatcaaaatgatgaacttgaagagaaggtgaaggagatacccaaacttagaactcagctaagagatttggatcaaaggtacaacactattctgcagatgtatggagaaaaagcagaagaggcagaagaacttcgattagatctcgaagatgtaaaaaatatgtacaaaactcaaatagatgaacttttaagacaaagtctcagttaacttgtgaaaattgaattcccatcaaactgaatgtaagcatttaatatctaaacatttaatgtggacttccaataaattcttttatagaattagaaagtgggatttactgtagagtgtaaaaatttttttaaaattgttttacactatgtagtaatatttacagttaaattattttgtgcaatatttgaactttatttttgaaactattctttaaagatttattttttaaagcattcattttttttccttgaatagcacagagatttattactttatcctcatataaatatggctagagaagaagaatggtgttcatatatgtattgtagatatacaactagttgtatctataatttgtaagtgtttatatatatattaagaacatttgaagagtaatgttaacatactgaaactttgaaatctttcacatttaaaatttcaacatatcttaattactgctcatgaaaatgtacattaagtgttaaagtaaaaaattattaaatctgtggctattaaattttaaactaatttttttcctttaaaagtaagagtcacactgacactgtctgaaatttaaagagtgaatgatttaaacttaaaaaaaattttgatctgaaaatttatttcacccagctttcacaattaagtctgtataaaatgtggtaccttttggtacctatccagagaaacctgtacatattcaatgttatctagatgtgattggataatggagaaaatttatttataatgattttgcaatggcatcaataacatttaaatgattttgaagaagtattattttactaccctataaaatgaatcgaaaataataaagttcttaacataatttactctttaaaaattacctgttcatattttgtaaacccatatttttagcacattaaaaatgaatgtttgatattacagaatattcataacaaaatggaagaattataggaattaacttgaatttggcatttttaattttgtgatttatcattttattttttcttgaaatttcaaacacaaggaaagcatagaatagcttttaaaagtagctatgccttcttccaaatgttattttattcaaaaaggtaaccaggttgtgttttaaacctgtgaaatattgtgatgcattttattactgaaagttatttaactgcctttacttgcacataaaaactctcatttacggccaggtgctgtggctcatgcctgtaatcccagcactttgggaggccaaggcgggcatatcacctgatgtcaggagttcaagaccagcatggccagcagtttggtgaaaccccatctctactaaaaatacaaaaattagcctggcgtggtggtgtgcgcctgtaatcctagctactcgggaggctgaggcaggagcattgcttgaacctgggaggtggaggttacaatgagccaagattgtgccactgcactccagcatgggtgacagagaaagactccgtctcaaaaaaaaaaaaacaaactcttatttaatttttagttaaaattaaaacactagtacttcagaatatagatacaagtacaccatcttgaagaatttggagtttttcagggcaattcaaatgacctcattttttgttctttttgtattccagacagtgtttctgtcattggatctctgattggtagtgttaataaatattctttcagtgtgagccagattcataaaattaattttcttcattttagtagtaaaaagtagtctaatagctttttgtcagcttgatttttttgtgtgtgtaatattcaagggcagaatgacaggacagataagcaataagaaatgtatagaattagaaaatatagtagttccctcttacccatgggacatacgttccaagacccccagtgaacgtctgaaaccatggatagtatagacacctctatacactgttttttcctatacatatatacctatgataaagttctatttataaatcagggacagcaagagataaacaataactgcaaatagaacaattataacagtgcactgtaataaaagtgatgtaaatgtgatatgtctgtctctttctctcaaaatatcttattgtactgtactcacctgtaatcagactgtggttgaccgtgagtaaccgaaaccacagaaagcaaaatcgtggataaggggagactactctatatgaaacttaagttacaaaattctctgaagcatttgaaactagacgttttggaattataaaatagtccctttaaaatatccactagtagaaaaaaacttcatttgcagagaaaagattgcaataaaactcattcctaaacttttcaattttataaaattaaacattctttttttatccgtattaacaatttctagttacatagtttctagttacatattaccatatattactctttatctacaaataaatagctgatactcaaactgatcatattttgattgttaaacacttggatctctcaatacttctgtaagttaaagtgaacttaaacagtttcttgaaaaactccagtaggtggcagaatacctattgaatattcgttgctatactttgctgtttgtcattaaaacatctctacccatattcttgcaaaataatatttatattttaatggataggaaaatgatttgcaattagatgtttccattcttgaaagaaaaaagctgcaaataacattttcaagaatataaaaaaatgagtaaacaaagggaaggttgtttggtcatttatagacaattaagcacagactgtagatgtccttccaattcttgggaggctaaactgagtctaccatttcttacatttcttttacctattttttgagaattgccagttgtacagtgtttagcatgtggaatgtaccaaatatatctatgttgtgacttaagatattctaaatgtggataacttctgacctaggaaacatgaagtttgtagtgaagtaagtgaaaagaatgttcaggaaattttttttctccatctcttcagttggcatttattgagagttttatttgaatgcttattaaaagtatatgatttataatatttagaaaatagaagaaaaaagaaaactgtagatgttttatcttgttttaatactgtatgtttagtacgtatacatttatgttctagtgtatcaaaatttttcattttcattaaagtgaatccaattttccatattctaggtccattttaaaccatgaaaactttaatcacatattttgtaaagggctgaaagtatgatttaaactacagattgatatattttaattctaaatgaaaggtaatgtaaataagcatggatctgattgaataaagattttaaaatagtaa

SEQ ID NO: 189364 - DNA, 3399 bp, Homo sapiens
  Payload ID: 17395
  Gene Symbol: TMF1
  Gene Name: TATA element modulatory factor 1
  ENST ID: ENST00000488010
  CDS Start-End: 205-2532
cacatgggcccccttcgtctcagctgtgcgggaacggccgagggtaacatcccgggctcgcgggaggctgtcggggtaatggccacacgctgacagaaccagccgagtggaaaaggggagcgaagccgttcctctgcacccttccccaggcctgaggccttcccgcttggtgctgccgccgccactgccggctgaggaggggcgatgagttggttcaacgcctcccagctctccagcttcgctaagcaggccctgtcccaggcccagaagtctattgacagggttctggacatccaggaagaggagccgagcatctgggccgagaccattccgtatggagagccgggaataagttcccctgtcagtggaggatgggatacttcaacctgggggttgaaatcaaacactgaacctcagagtccaccaatagcctctcctaaagcaatcacaaagccagttcggaggactgtggtcgatgaatctgaaaatttcttcagtgcctttctctcgccaactgatgtccagaccattcagaagagtccagtggtatcaaaacctccagcaaaatcacaacgaccagaagaagaagtgaaaagcagcttacatgaatccttgcacattggccagtcaagaactcctgaaacaactgaatcacaagtaaaagactcttctttgtgtgtttcaggggaaactctggcagcaggtacttcatcacctaaaactgaaggcaagcacgaagaaactgttaataaagaatcggatatgaaggtgccaactgtaagtttgaaagtatctgaaagtgtaattgatgtgaaaacaactatggaaagtatatctaatacgtctacgcagtctctcacagcagaaacaaaggacatagctttggaacctaaggaacaaaaacatgaagacaggcagagcaatacaccttctcctcctgttagtaccttttcatcaggtacttctaccaccagtgatattgaagttttagatcatgaaagtgtaataagtgagagctcagcgagctcgagacaagagactacagattcaaaatcaagtcttcacttgatgcagacatcttttcagcttctctctgcatctgcttgtcctgaatataatcgtttagatgatttccaaaaactcactgagagttgctgttcatctgatgcttttgaaagaatagactcatttagtgtacagtcattagatagccggagtgtaagtgaaatcaattcagatgatgaattgtcaggcaagggatatgctttagtgcctattatagttaattcttcaactccaaagtctaaaacagttgaatctgctgaaggaaaatctgaagaagtaaatgaaacattagttatacccactgaggaagcagaaatggaagaaagtggacgaagtgcaactcctgttaactgtgaacagcctgatatcttggtttcttccacaccaataaatgaaggacagactgtgttagacaaggtggctgagcagtgtgaacctgctgaaagtcagccagaagcactttctgagaaggaagatgtttgcaagacagttgaatttctgaatgaaaagctggaaaaaagggaggctcagttattatctcttagtaaggaaaaagcacttctagaagaagcttttgataacctgaaagatgaaatgttcagagtgaaagaagaaagcagtagcatttcttccttgaaagatgagtttactcaaagaattgcagaagcagaaaagaaagttcaactagcctgcaaagagagagatgctgctaaaaaggaaatcaaaaacataaaagaagaacttgccactagattaaatagtagtgaaactgcagaccttttgaaagagaaagatgagcagatccgagggttaatggaagaaggagaaaaactttcaaaacagcagctgcacaattctaacatcatcaagaaattaagagctaaagacaaggagaatgaaaatatggttgcaaagctgaacaaaaaagttaaagagctagaagaggagttgcagcatttgaaacaggtccttgatggcaaagaagaggttgagaaacaacatagagaaaatattaaaaaactaaattccatggtagaacgccaagagaaagatcttggccgtcttcaggtagacatggatgaacttgaagaaaagaaccgaagtattcaggctgccctggatagtgcatacaaagaacttactgatcttcacaaagccaatgctgcaaaggatagtgaggcacaggaagctgctctgagccgtgaaatgaaagctaaagaagaactttctgcagcattagagaaggcccaagaagaagcccgtcagcagcaagaaacattagccattcaagtgggggaccttaggcttgcattgcagcgtacagaacaagcggctgccagaaaggaggattatttacgccatgagatcggtgaacttcagcagttgagagagaacgtgcagctacagaagaactccttgctaacaaaattcagatgtcttccatggagtcacagaattctcttttaagacaggaaaacagtagatttcaagcccagctagaatcagagaaaaataggctgtgtaaactggaggatgagaacaataggtaccaggttgaattggaaaacctaaaagatgaatatgtaagaacacttgaagagacgaggaaagaaaagacattgttgaatagtcagttagaaatggaaagaatgaaagttgaacaagaaaggaagaaagccatttttactcaagaaacaataaaagaaaaggaacgcaagccattttctgtttctagcactcccaccatgtcacgctcaagttcaataagtggtgttgatatggcaggactacagacatcttttctgtctcaggatgagtctcatgatcactcatttggaccaatgcctatatcagcaaatggaagcaatctttatgatgctgtaaggatgggagcaggatcaagcataattgaaaacctacagtctcagctaaagctaagggaaggggaaatcactcatttacagctagaaattggcaatctagaaaaaactcgatcaataatggctgaagaactagttaaattaacaaatcaaaatgatgaacttgaagagaaggtgaaggagatacccaaacttagaactcagctaagagatttggatcaaaggtacaacactattctgcagatgtatggagaaaaagcagaagaggcagaagaacttcgattagatctcgaagatgtaaaaaatatgtacaaaactcaaatagatgaacttttaagacaaagtctcagttaacttgtgaaaattgaattcccatcaaactgaatgtaagcatttaatatctaaacatttaatgtggacttccaataaattcttttatagaattagaaagtgg

SEQ ID NO: 189365 - DNA, 3279 bp, Homo sapiens
  Payload ID: 17395
  Gene Symbol: TMF1
  Gene Name: TATA element modulatory factor 1
  ENST ID: ENST00000543976
  CDS Start-End: 1-3279
atgagttggttcaacgcctcccagctctccagcttcgctaagcaggccctgtcccaggcccagaagtctattgacagggttctggacatccaggaagaggagccgagcatctgggccgagaccattccgtatggagagccgggaataagttcccctgtcagtggaggatgggatacttcaacctgggggttgaaatcaaacactgaacctcagagtccaccaatagcctctcctaaagcaatcacaaagccagttcggaggactgtggtcgatgaatctgaaaatttcttcagtgcctttctctcgccaactgatgtccagaccattcagaagagtccagtggtatcaaaacctccagcaaaatcacaacgaccagaagaagaagtgaaaagcagcttacatgaatccttgcacattggccagtcaagaactcctgaaacaactgaatcacaagtaaaagactcttctttgtgtgtttcaggggaaactctggcagcaggtacttcatcacctaaaactgaaggcaagcacgaagaaactgttaataaagaatcggatatgaaggtgccaactgtaagtttgaaagtatctgaaagtgtaattgatgtgaaaacaactatggaaagtatatctaatacgtctacgcagtctctcacagcagaaacaaaggacatagctttggaacctaaggaacaaaaacatgaagacaggcagagcaatacaccttctcctcctgttagtaccttttcatcaggtacttctaccaccagtgatattgaagttttagatcatgaaagtgtaataagtgagagctcagcgagctcgagacaagagactacagattcaaaatcaagtcttcacttgatgcagacatcttttcagcttctctctgcatctgcttgtcctgaatataatcgtttagatgatttccaaaaactcactgagagttgctgttcatctgatgcttttgaaagaatagactcatttagtgtacagtcattagatagccggagtgtaagtgaaatcaattcagatgatgaattgtcaggcaagggatatgctttagtgcctattatagttaattcttcaactccaaagtctaaaacagttgaatctgctgaaggaaaatctgaagaagtaaatgaaacattagttatacccactgaggaagcagaaatggaagaaagtggacgaagtgcaactcctgttaactgtgaacagcctgatatcttggtttcttccacaccaataaatgaaggacagactgtgttagacaaggtggctgagcagtgtgaacctgctgaaagtcagccagaagcactttctgagaaggaagatgtttgcaagacagttgaatttctgaatgaaaagctggaaaaaagggaggctcagttattatctcttagtaaggaaaaagcacttctagaagaagcttttgataacctgaaagatgaaatgttcagagtgaaagaagaaagcagtagcatttcttccttgaaagatgagtttactcaaagaattgcagaagcagaaaagaaagttcaactagcctgcaaagagagagatgctgctaaaaaggaaatcaaaaacataaaagaagaacttgccactagattaaatagtagtgaaactgcagaccttttgaaagagaaagatgagcagatccgagggttaatggaagaaggagaaaaactttcaaaacagcagctgcacaattctaacatcatcaagaaattaagagctaaagacaaggagaatgaaaatatggttgcaaagctgaacaaaaaagttaaagagctagaagaggagttgcagcatttgaaacaggtccttgatggcaaagaagaggttgagaaacaacatagagaaaatattaaaaaactaaattccatggtagaacgccaagagaaagatcttggccgtcttcaggtagacatggatgaacttgaagaaaagaaccgaagtattcaggctgccctggatagtgcatacaaagaacttactgatcttcacaaagccaatgctgcaaaggatagtgaggcacaggaagctgctctgagccgtgaaatgaaagctaaagaagaactttctgcagcattagagaaggcccaagaagaagcccgtcagcagcaagaaacattagccattcaagtgggggaccttaggcttgcattgcagcgtacagaacaagcggctgccagaaaggaggattatttacgccatgagatcggtgaacttcagcagagactccaggaagcagagaatcgaaaccaggaactgagtcaaagtgtttcatcaacaacaagaccattgcttcgacaaatagaaaatttgcaagcaaccctgggatcccagacatcgtcgtgggagaaattagagaagaatctttctgataggcttggtgaatcccagaccttgctggcagcagcagttgagagagaacgtgcagctacagaagaactccttgctaacaaaattcagatgtcttccatggagtcacagaattctcttttaagacaggaaaacagtagatttcaagcccagctagaatcagagaaaaataggctgtgtaaactggaggatgagaacaataggtaccaggttgaattggaaaacctaaaagatgaatatgtaagaacacttgaagagacgaggaaagaaaagacattgttgaatagtcagttagaaatggaaagaatgaaagttgaacaagaaaggaagaaagccatttttactcaagaaacaataaaagaaaaggaacgcaagccattttctgtttctagcactcccaccatgtcacgctcaagttcaataagtggtgttgatatggcaggactacagacatcttttctgtctcaggatgagtctcatgatcactcatttggaccaatgcctatatcagcaaatggaagcaatctttatgatgctgtaaggatgggaaggatcaagcatattgaaaacctacagtctcagctaaagctaagggaaggggaaatcactcatttacagctagaaattggcaatctagaaaaaactcgatcaataatggctgaagaactagttaaattaacaaatcaaaatgatgaacttgaagagaaggtgaaggagatacccaaacttagaactcagctaagagatttggatcaaaggtacaacactattctgcagatgtatggagaaaaagcagaagaggcagaagaacttcgattagatctcgaagatgtaaaaaatatgtacaaaactcaaatagatgaacttttaagacaaagtctcagttaa

SEQ ID NO: 189366 - DNA, 1018 bp, Homo sapiens
  Payload ID: 17396
  Gene Symbol: TATDN1
  Gene Name: TatD DNase domain containing 1
  Uniprot ID: Q6P1N9
  ENST ID: ENST00000276692
  CDS Start-End: 39-932
acttccgcttccgctggggaggtcctccatgcgcagtcatgagtcgcttcaagtttatcgatattggtatcaacttgactgaccctatgttcagaggaatttataggggggttcaaaagcatcaagatgacttacaggatgtaatagggagagctgtcgagattggtgttaaaaagtttatgattacaggtggaaatctacaagacagtaaagatgcactgcatttggcacaaacaaatggtatgtttttcagtacagttggatgtcatcctacaagatgtggtgaatttgaaaagaataaccctgatctttacttaaaggagttgctaaatcttgctgaaaacaataaagggaaagttgtggcaataggagaatgcggacttgattttgaccgactgcagttttgtcccaaagatactcaactcaaatattttgaaaaacagtttgaactgtcagaacaaacaaaattaccaatgtttcttcattgtcgaaactcacatgctgaatttttggacataatgaaaagaaatagagatcggtgtgtagggggagtggtgcattcatttgatggtaccaaggaagcagcagctgctttgattgacttggatctttatataggatttaatggttgctcactgaaaactgaagctaatttggaagttttgaagtcaattcctagtgaaaaattaatgattgagacagatgcaccttggtgtggagtcaaaagtacacatgctggatcaaaatatataagaactgcatttcctaccaaaaagaagtgggaaagtgggcactgcttaaaagacagaaatgaaccctgccatataattcaaatattggagataatgtcagcagtgagagatgaggatccactggaattagccaatacactatataacaatactattaaagtattttttcctggaatataattggtatatgtcttccactttccatcatgtatgtaaaatttcatagtaaaacttcctgatagtttcaataaagaaattatctgcaa

SEQ ID NO: 189367 - DNA, 692 bp, Homo sapiens
  Payload ID: 17396
  Gene Symbol: TATDN1
  Gene Name: TatD DNase domain containing 1
  ENST ID: ENST00000523152
  CDS Start-End: 413-692
aagtggcgaagcctggatttgaacccgggtctaccataggattctgtgaagcgagaggccaccttccaattccgttcccgaagtccttgaacctccaggtacccaggggcctctccacctccatggggccccgagggtcacctccccgagtcctgggtccccatcccttacctctggacgcaccacgactcgaggtggcgtagcgcccgcttataaagccgcaacaccttttgctgatgggtcaggtagggtcccgacgccaagaacgccattacggcgctgaccttccccggccgcgcggagagccgggaaactgcacgcctgctgcgggtgactgagcggggccagccggaagggcggagttgccggcggccacttccgcttccgctggggaggtcctccatgcgcagtcatgagtcgcttcaagtttatcggtatgtttttcagtacagttggatgtcatcctacaagatgtggtgaatttgaaaagaataaccctgatctttacttaaaggagttgctaaatcttgctgaaaacaataaagggaaagttgtggcaataggagaatgcggacttgattttgaccgactgcagttttgtcccaaagatactcaactcaaatattttgaaaaacagtttgaactgtcagaacaaacaaaattaccaatgtttcttcattgtcgaaactcac

SEQ ID NO: 189368 - DNA, 591 bp, Homo sapiens
  Payload ID: 17396
  Gene Symbol: TATDN1
  Gene Name: TatD DNase domain containing 1
  ENST ID: ENST00000523888
  CDS Start-End: 262-591
atgcgcagtcatgagtcgcttcaagtttatcgatcataggtgacagtgatgtgacacgattcagtgagcccaataactgaggcttcaacttaagagttgtggttttctcctggttacaaacagtgccgttttctactcttactttgttttgaaaacgaaaagtcaatatttgaagaactcttaaataataaaatattggtatcaacttgactgaccctatgttcagaggaatttataggggggttcaaaagcatcaagtttatgattacaggtggaaatctacaagacagtaaagatgcactgcatttggcacaaacaaatggtatgtttttcagtacagttggatgtcatcctacaagatgtggtgaatttgaaaagaataaccctgatctttacttaaaggagttgctaaatcttgctgaaaacaataaagggaaagttgtggcaataggagaatgcggacttgattttgaccgactgcagttttgtcccaaagatactcaactcaaatattttgaaaaacagtttgaactgtcagaacaaacaaaattaccaatgtttcttcattgtcgaaactcacatgctgaattt

SEQ ID NO: 189369 - DNA, 889 bp, Homo sapiens
  Payload ID: 17396
  Gene Symbol: TATDN1
  Gene Name: TatD DNase domain containing 1
  Uniprot ID: Q6P1N9
  ENST ID: ENST00000519548
  CDS Start-End: 56-808
ttccgctggggaggtcctccatgcgcagtcatgagtcgcttcaagtttatcgtttatgattacaggtggaaatctacaagacagtaaagatgcactgcatttggcacaaacaaatggtatgtttttcagtacagttggatgtcatcctacaagatgtggtgaatttgaaaagaataaccctgatctttacttaaaggagttgctaaatcttgctgaaaacaataaagggaaagttgtggcaataggagaatgcggacttgattttgaccgactgcagttttgtcccaaagatactcaactcaaatattttgaaaaacagtttgaactgtcagaacaaacaaaattaccaatgtttcttcattgtcgaaactcacatgctgaatttttggacataatgaaaagaaatagagatcggtgtgtagggggagtggtgcattcatttgatggtaccaaggaagcagcagctgctttgattgacttggatctttatataggatttaatggttgctcactgaaaactgaagctaatttggaagttttgaagtcaattcctagtgaaaaattaatgattgagacagatgcaccttggtgtggagtcaaaagtacacatgctggatcaaaatatataagaactgcatttcctaccaaaaagaagtgggaaagtgggcactgcttaaaagacagaaatgaaccctgccatataattcaaatattggagataatgtcagcagtgagagatgaggatccactggaattagccaatacactatataacaatactattaaagtattttttcctggaatataattggtatatgtcttccactttccatcatgtatgtaaaatttcatagtaaaacttcctgatagtttcaataaagaaattatc

SEQ ID NO: 189370 - DNA, 667 bp, Homo sapiens
  Payload ID: 17396
  Gene Symbol: TATDN1
  Gene Name: TatD DNase domain containing 1
  ENST ID: ENST00000522310
  CDS Start-End: 49-171
gccggcggccacttccgcttccgctggggaggtcctccatgcgcagtcatgagtcgcttcaagtttatcgatattggtatcaacttgactgaccctatgttcagaggaatttataggggggttcaaaagcatcaagtttatgattacaggtggaaatctacaagacagtaaagatgcactgcatttggcacaaacaaatggtatcctcatatttcttttaccaaaaaaaaaatgaattaagtaattttgaagaagtctttctgaaaactgcttcaggtatgtttttcagtacagttggatgtcatcctacaagatgtggtgaatttgaaaagaataaccctgatctttacttaaaggagttgctaaatcttgctgaaaacaataaagggaaagttgtggcaataggagaatgcggacttgattttgaccgactgcagttttgtcccaaagatactcaactcaaatattttgaaaaacagtttgaactgtcagaacaaacaaaattaccaatgtttcttcattgtcgaaactcacatgctgaatttttggacataatgaaaagaaatagagatcggtgtgtagggggagtggtgcattcatttgatggtaccaaggaagcagcagctgctttgattgacttggatctttatataggatttaatggttg

SEQ ID NO: 189371 - DNA, 1134 bp, Homo sapiens
  Payload ID: 17396
  Gene Symbol: TATDN1
  Gene Name: TatD DNase domain containing 1
  ENST ID: ENST00000523214
  CDS Start-End: 43-666
ggccacttccgcttccgctggggaggtcctccatgcgcagtcatgagtcgcttcaagtttatcgatattggtatcaacttgactgaccctatgttcagaggaatttataggggggttcaaaagcatcaagatgacttacaggatgtaatagggagagctgtcgagattggtgttaaaaagtttatgattacaggtggaaatctacaagacagtaaagatgcactgcatttggcacaaacaaatggtatgtttttcagtacagttggatgtcatcctacaagatgtggtgaatttgaaaagaataaccctgatctttacttaaaggagttgctaaatcttgctgaaaacaataaagggaaagttgtggcaataggagaatgcggacttgattttgaccgactgcagttttgtcccaaagatactcaactcaaatattttgaaaaacagtttgaactgtcagaacaaacaaaattaccaatgtttcttcattgtcgaaactcacatgctgaatttttggacataatgaaaagaaatagagatcggtgtgtagggggagtggtgcattcatttgatggtaccaaggaagcagcagctgctttgattgacttggatctttatataggatttaatggttgcattatgtatacatatacacgtcatatctgactatggacgaacggtttattctgtgacagtcatacatctctgcagtcaaagaaaccgaggctcaaagaaattaggaaacagctcactgaaaactgaagctaatttggaagttttgaagtcaattcctagtgaaaaattaatgattgagacagatgcaccttggtgtggagtcaaaagtacacatgctggatcaaaatatataagaactgcatttcctaccaaaaagaagtgggaaagtgggcactgcttaaaagacagaaatgaaccctgccatataattcaaatattggagataatgtcagcagtgagagatgaggatccactggaattagccaatacactatataacaatactattaaagtattttttcctggaatataattggtatatgtcttccactttccatcatgtatgtaaaatttcatagtaaaacttcctgatagtttcaataaagaaattatctgcaa

SEQ ID NO: 189372 - DNA, 629 bp, Homo sapiens
  Payload ID: 17396
  Gene Symbol: TATDN1
  Gene Name: TatD DNase domain containing 1
  ENST ID: ENST00000520321
  CDS Start-End: 27-197
gctggggaggtcctccatgcgcagtcatgagtcgcttcaagtttatcgatgacttacaggatgtaatagggagagctgtcgagattggtgttaaaaagtttatgattacaggtggaaatctacaagacagtaaagatgcactgcatttggcacaaacaaatggtatcctcatatttcttttaccaaaaaaaaaatgaattaagtaattttgaagaagtctttctgaaaactgcttcaggtatgtttttcagtacagttggatgtcatcctacaagatgtggtgaatttgaaaagaataaccctgatctttacttaaaggagttgctaaatcttgctgaaaacaataaagggaaagttgtggcaataggagaatgcggacttgattttgaccgactgcagttttgtcccaaagatactcaactcaaatattttgaaaaacagtttgaactgtcagaacaaacaaaattaccaatgtttcttcattgtcgaaactcacatgctgaatttttggacataatgaaaagaaatagagatcggtgtgtagggggagtggtgcattcatttgatggtaccaaggaagcagcagctgctttgattgacttggatctttatataggatttaatggttg

SEQ ID NO: 189373 - DNA, 677 bp, Homo sapiens
  Payload ID: 17396
  Gene Symbol: TATDN1
  Gene Name: TatD DNase domain containing 1
  ENST ID: ENST00000519776
  CDS Start-End: 64-186
cggaagggcggagttgccggcggccacttccgcttccgctggggaggtcctccatgcgcagtcatgagtcgcttcaagtttatcgatattggtatcaacttgactgaccctatgttcagaggaatttataggggggttcaaaagcatcaagtttatgattacaggtggaaatctacaagacagtaaagatgcactgcatttggcacaaacaaatggtatgtttttcagtacagttggatgtcatcctacaagatgtggtgaatttgaaaagaataaccctgatctttacttaaaggagttgctaaatcttgctgaaaacaataaagggaaagttgtggcaataggagaatgcggacttgattttgaccgactgcagttttgtcccaaagatactcaactcaaatattttgaaaaacagtttgaactgtcagaacaaacaaaattaccaatgtttcttcattgtcgaaactcacatgctgaatttttggacataatgaaaagaaatagagatcggtgtgtagggggagtggtgcattcatttgatggtaccaaggaagcagcagctgctttgattgacttggatctttatataggatttaatggttgctcactgaaaactgaagctaatttggaagttttgaagtcaattcctagtgaaaaattaatgattgagacag

SEQ ID NO: 189374 - DNA, 815 bp, Homo sapiens
  Payload ID: 17396
  Gene Symbol: TATDN1
  Gene Name: TatD DNase domain containing 1
  ENST ID: ENST00000517678
  CDS Start-End: 178-810
gcttccgctggggaggtcctccatgcgcagtcatgagtcgcttcaagtttatcggtaagaggagcgttttccacgcccttgggtctttctgacttgtcccgggcgtcggtcaccaaggtcacaggacccaggaattgcgccctccggcattatattggtatcaacttgactgaccctatgttcagaggaatttataggggggttcaaaagcatcaaggtatgtttttcagtacagttggatgtcatcctacaagatgtggtgaatttgaaaagaataaccctgatctttacttaaaggagttgctaaatcttgctgaaaacaataaagggaaagttgtggcaataggagaatgcggacttgattttgaccgactgcagttttgtcccaaagatactcaactcaaatattttgaaaaacagtttgaactgtcagaacaaacaaaattaccaatgtttcttcattgtcgaaactcacatgctgaatttttggacataatgaaaagaaatagagatcggtgtgtagggggagtggtgcattcatttgatggtaccaaggaagcagcagctgctttgattgacttggatctttatataggatttaatggttgctcactgaaaactgaagctaatttggaagttttgaagtcaattcctagtgaaaaattaatgattgagacagatgcaccttggtgtggagtcaaaagtacacatgctggatcaaaatatataagaactgcatttcctaccaaaaagaagtgggaaagtgggcactgcttaaaagacagaaatgaaccctgccatataatgtgagtatt

SEQ ID NO: 189375 - DNA, 990 bp, Homo sapiens
  Payload ID: 17396
  Gene Symbol: TATDN1
  Gene Name: TatD DNase domain containing 1
  ENST ID: ENST00000522810
  CDS Start-End: 25-990
tggggaggtcctccatgcgcagtcatgagtcgcttcaagtttatcgatattggtatcaacttgactgaccctatgttcagaggaatttataggggggttcaaaagcatcaagatgacttacaggatgtaatagggagagctgtcgagattggtgttaaaaagtttatgattacaggtggaaatctacaagacagtaaagatgcactgcatttggcacaaacaaatggtatgtttttcagtacagttggatgtcatcctacaagatgtggtgaatttgaaaagaataaccctgatctttacttaaaggagttgctaaatcttgctgaaaacaataaagggaaagttgtggcaataggagaatgcggacttgattttgaccgactgcagttttgtcccaaagatactcaactcaaatattttgaaaaacagtttgaactgtcagaacaaacaaaattaccaatgtttcttcattgtcgaaactcacatgctgaatttttggacataatgaaaagaaatagagatcggtgtgtagggggagtggtgcattcatttgatggtaccaaggaagcagcagctgctttgattgacttggatctttatataggatttaatgcattatgtatacatatacacgtcatatctgactatggacgaacggtttattctgtgacagtcatacatctctgcagtcaaagaaaccgaggctcaaagaaattaggaaacagctcactgaaaactgaagctaatttggaagttttgaagtcaattcctagtgaaaaattaatgattgagacagatgcaccttggtgtggagtcaaaagtacacatgctggatcaaaatatataagaactgcatttcctaccaaaaagaagtgggaaagtgggcactgcttaaaagacagaaatgaaccctgccatataattcaaatattggagataatgtcagcagtgagagatgaggatccactggaattagccaatacactatat

SEQ ID NO: 189376 - DNA, 604 bp, Homo sapiens
  Payload ID: 17396
  Gene Symbol: TATDN1
  Gene Name: TatD DNase domain containing 1
  ENST ID: ENST00000519232
  CDS Start-End: 1-604
ttcaagtttatcggtaagaggagcgttttccacgcccttgggtctttctgacttgtcccgggcgtcggtcaccaaggtcacaggacccaggaattgcgccctccggcattatattggtatcaacttgactgaccctatgttcagaggaatttataggggggttcaaaagcatcaagatgacttacaggatgtaatagggagagctgtcgagattggtgttaaaaagtttatgattacaggtggaaatctacaagacagtaaagatgcactgcatttggcacaaacaaatggtatgtttttcagtacagttggatgtcatcctacaagatgtggtgaatttgaaaagaataaccctgatctttacttaaaggagttgctaaatcttgctgaaaacaataaagggaaagttgtggcaataggagaatgcggacttgattttgaccgactgcagttttgtcccaaagatactcaactcaaatattttgaaaaacagtttgaactgtcagaacaaacaaaattaccaatgtttcttcattgtcgaaactcacatgctgaatttttggacataatgaaaagaaatagagatcggtgtgtagggggagtg

SEQ ID NO: 189377 - DNA, 690 bp, Homo sapiens
  Payload ID: 17396
  Gene Symbol: TATDN1
  Gene Name: TatD DNase domain containing 1
  ENST ID: ENST00000520938
  CDS Start-End: 188-376
ggccacttccgcttccgctggggaggtcctccatgcgcagtcatgagtcgcttcaagtttatcggtaagaggagcgttttccacgcccttgggtctttctgacttgtcccgggcgtcggtcaccaaggtcacaggacccaggaattgcgccctccggcattatattggtatcaacttgactgaccctatgttcagaggaatttataggggggttcaaaagcatcaagatgacttacaggatgtaatagggagagctgtcgagattggtgttaaaaagtttatgattacaggtggaaatctacaagacagtaaagatgcactgcatttggcacaaacaaatggtatcctcatatttcttttaccaaaaaaaaaatgaattaagtaattttgaagaagtctttctgaaaactgcttcaggtatgtttttcagtacagttggatgtcatcctacaagatgtggtgaatttgaaaagaataaccctgatctttacttaaaggagttgctaaatcttgctgaaaacaataaagggaaagttgtggcaataggagaatgcggacttgattttgaccgactgcagttttgtcccaaagatactcaactcaaatattttgaaaaacagtttgaactgtcagaacaaacaaaattaccaatgtttcttcattgtcgaaactcacatgctgaatttttgg

SEQ ID NO: 189378 - DNA, 782 bp, Homo sapiens
  Payload ID: 17396
  Gene Symbol: TATDN1
  Gene Name: TatD DNase domain containing 1
  ENST ID: ENST00000522927
  CDS Start-End: 33-260
gcttccgctggggaggtcctccatgcgcagtcatgagtcgcttcaagtttatcgatgacttacaggatgtaatagggagagctgtcgagattggtgttaaaaagtttatgattacaggtggaaatctacaagacagtaaagatgcactgcatttggcacaaacaaatgatattttgaaaaacagtttgaactgtcagaacaaacaaaattaccaatgtttcttcattgtcgaaactcacatgctgaatttttggacataatgaaaagaaatagagatcggtgtgtagggggagtggtgcattcatttgatggtaccaaggaagcagcagctgctttgattgacttggatctttatataggatttaatggttgctcactgaaaactgaagctaatttggaagttttgaagtcaattcctagtgaaaaattaatgattgagacagatgcaccttggtgtggagtcaaaagtacacatgctggatcaaaatatataagaactgcatttcctaccaaaaagaagtgggaaagtgggcactgcttaaaagacagaaatgaaccctgccatataattcaaatattggagataatgtcagcagtgagagatgaggatccactggaattagccaatacactatataacaatactattaaagtattttttcctggaatataattggtatatgtcttccactttccatcatgtatgtaaaatttcatagtaaaacttcctgatagtttcaataaagaaattatctgcaagttgtctaaagaaatactatata

SEQ ID NO: 189379 - DNA, 726 bp, Homo sapiens
  Payload ID: 17396
  Gene Symbol: TATDN1
  Gene Name: TatD DNase domain containing 1
  ENST ID: ENST00000605953
  CDS Start-End: 37-669
ttccgcttccgctggggaggtcctccatgcgcagtcatgagtcgcttcaagtttatcgatattggtatcaacttgactgaccctatgttcagaggaatttataggggggttcaaaagcatcaagatgacttacaggatgtaatagggagagctgtcgagattggtgttaaaaagtttatgattacaggtggaaatctacaagacagtaaagatgcactgcatttggcacaaacaaatggtatgtttttcagtacagttggatgtcatcctacaagatgtggtgaatttgaaaagaataaccctgatctttacttaaaggagttgctaaatcttgctgaaaacaataaagggaaagttgtggcaataggagaatgcggacttgattttgaccgactgcagttttgtcccaaagatactcaactcaaatattttgaaaaacagtttgaactgtcagaacaaacaaaattaccaatgtttcttcattgtcgaaactcacatgctgaatttttggacataatgaaaagaaatagagatcggtgtgtagggggagtggtgcattcatttgatggtaccaaggaagcagcagctgctttgattgacttggatctttatataggatttaatggttggtacgttcttaggttgctttggtttttaacttttatttaagcagatttcttaaattgtcttacagtgaattgctgatgaagatttattttcattaaa

SEQ ID NO: 189380 - DNA, 915 bp, Homo sapiens
  Payload ID: 17396
  Gene Symbol: TATDN1
  Gene Name: TatD DNase domain containing 1
  ENST ID: ENST00000630259
  CDS Start-End: 91-822
ggccacttccgcttccgctggggaggtcctccatgcgcagtcatgagtcgcttcaagtttatcgatattggtatcaacttgactgaccctatgttcagaggaatttataggggggttcaaaagcatcaaggtatgtttttcagtacagttggatgtcatcctacaagatgtggtgaatttgaaaagaataaccctgatctttacttaaaggagttgctaaatcttgctgaaaacaataaagggaaagttgtggcaataggagaatgcggacttgattttgaccgactgcagttttgtcccaaagatactcaactcaaatattttgaaaaacagtttgaactgtcagaacaaacaaaattaccaatgtttcttcattgtcgaaactcacatgctgaatttttggacataatgaaaagaaatagagatcggtgtgtagggggagtggtgcattcatttgatggtaccaaggaagcagcagctgctttgattgacttggatctttatataggatttaatggttgctcactgaaaactgaagctaatttggaagttttgaagtcaattcctagtgaaaaattaatgattgagacagatgcaccttggtgtggagtcaaaagtacacatgctggatcaaaatatataagaactgcatttcctaccaaaaagaagtgggaaagtgggcactgcttaaaagacagaaatgaaccctgccatataattcaaatattggagataatgtcagcagtgagagatgaggatccactggaattagccaatacactatataacaatactattaaagtattttttcctggaatataattggtatatgtcttccactttccatcatgtatgtaaaatttcatagtaaaacttcctgatagtttcaataaagaaattatctgcaagttgtct

SEQ ID NO: 189381 - DNA, 5342 bp, Homo sapiens
  Payload ID: 17397
  Gene Symbol: TATDN2
  Gene Name: TatD DNase domain containing 2
  Uniprot ID: Q93075
  ENST ID: ENST00000287652
  CDS Start-End: 1052-3337
tttttttttttttttttggtgccttctaattctaattcttcccatttctgggtgtgtacttagtctctctgagccacagttttctgctctataaagtggggtgataatgctcagtacacggtttgctttggctcgatgagaaatccaggtctgaaagcttcaggtacagcggccggcgctgaggaaaacagcgttaagtgaggcgcgtcagcggacaccacctgcctgcacatctggctggcctcaacttcccgctgttcgagcccacgtgagtggctccgccccatctggcttctgaccaatggacgagcttcctaaggcgtaccgtcccgactccaaggcgcctggctttgaggcgggctgcgtcttgctcggagtcccgccccttgccgggtcgagcaatgggcgccttccgtttggcgcaggccccgcccctgtcgctctccggcctgcgggccgcagggctcgttccggagggcgggcgccacggaggccggagtggtcgcagttcgggcggaggccgggccaggcggggctgtagggctggggcaggcggcgggctgcccggcgggacagctgcggcagccggcggggggcgtcctgagttggcggtcgagggcgctgccagctcccgaggggccgctcgggccccttccggcccgggtctggttgggccgcaggagcagggcgggctgcggcgcccgggtctggccctggcctacgggctaagcgcccggccccggggccgcggatccggcagccatgtgtggatcttgaagcgccatgtggtcttctgaagcgcttgacagttctaaagggctttatattgcaaactgatcaaagcgcttcgtagccccggaagcgcttaggcatctccgaagtagcgctgggcaaagtgaaggcttcctgatctcagaagcacgttgtgggcttggaaaccgacggcagcctttagtcaattttggatcgctttgacttctccaacacggtttggcatctctgaaaccttgagaactgtgatgggcagtggaaagaagagggaaaggtgcccatggcgtccgagcggggcaaggtcaagcacaactggagcagcacgtcggaagggtgtccccgcaagcgcagctgcctccgggagccctgtgatgtggccccctccagccggccagctcagaggtctgcgtcgcgttctggagggcccagcagccccaagcgcctgaaagcccagaaggaggacgatgtggcttgctcgcggaggttatcctggggctcatcccgccgcagaaataactcctcctcctccttctccccacatttcttgggccctggtgtgggcggggccgcctccaaaggctgcctgattcggaacactcgggggttcctgtcttcagggggatcccctctgcgtcctgccaacgcctctttggaagaaatggcttctctagaggaggaagcctgcagccttaaggttgattccaaagatagttctcataactccacaaactctgaatttgcagctgaagctgagggtcagaatgatacaattgaggaacccaacaaggtccagaaaaggaagagggatagacttcgagaccagggctccacaatgatctacctgaaggctatccagggcatcctggggaaatcgatgccaaaaaggaagggagaggctgccactcgggcaaaaccaagcgcagcagagcatcccagccatggagaaggaccagccaggagtgaaggaccagccaagactgcagaaggagcagccaggagtgtcacagtcactgctgctcagaaggagaaagacgcaaccccagaggtcagcatggaggaggataagacagtgccagagaggagcagcttctatgacaggagagtagttatagaccctcaagagaaacccagtgaggagccccttggggaccgaaggactgtcattgacaaatgctctccacccctagagttcttggatgactctgactctcatttagaaatccaaaagcataaagatagggaggtggtgatggagcacccctcttctggaagtgactggtctgatgttgaggagatctccacagtcagattctctcaggaggaacctgtctccctgaaaccttcagccgttccggagccttcttccttcaccaccgactatgtcatgtaccctcctcatttgtacagtagtccttggtgtgactacgccagctattggaccagcagccccaagccttctagctacccctccacaggcagcagcagcaacgatgcagcccaggttgggaagagcagccggagccgcatgagtgattattcccccaactctacagggagtgtccaaaacacctccagagacatggaggcctcagaggaaggctggtcccagaattctcgttcatttcgcttctccagaagctcagaagaaagagaggtgaaggagaaaagaacattccaagaggagatgcctccgcgtccttgtggaggacacgcatccagctccctgccaaagagccacctggagccaagcctagaggagggcttcattgacactcattgtcacctggacatgctctattccaagctatctttccaagggacctttacaaagttcagaaaaatttacagcagctccttccctaaggaatttcagggctgcatctctgacttctgtgatccccgcaccctgacagattgcctatgggaggagctgttgaaagaggatctggtctggggggcctttggctgtcaccctcattttgcacgttactacagtgagagtcaagaaagaaatcttttgcaagccttaaggcaccctaaggctgtggcatttggagaaatgggcttggattactcttacaagtgcaccacgcctgtcccagaacagcacaaggtatttgagagacagctgcagctggctgtgtctctaaagaagcccttggtgatccactgccgagaagctgatgaagatctgctagaaatcatgaaaaagtttgtgccccctgactacaagatccataggcattgcttcaccggcagctacccggtcattgagcccctgctgaagtactttcccaacatgtctgtgggcttcacggcagtgctgacatactcctctgcctgggaggcccgggaagccttgaggcagatcccactggagagaatcatcgtggaaacggatgctccctatttcctccctcgccaggttcccaaaagcctttgccagtatgcccacccgggcctggccttgcatacggtccgagagattgccagagtcaaagatcagccactctccctcaccttggctgccttgcgtgagaacaccagtcgcctctacagtctttaagcagagaagggcgaccagcagcctgacagaacacaggctggcttgaagtctgtgtctcaggtcgaggatgtgtttagagagctgattggaacacagaaaaccaggacaggatgttttcctccaagcgggtcataaggcttcagcttctgggtggtgggtggggtggggtgggcatggaatgaggggtatggggactgcctgtaatagcactgggattttgcctcccagccaaaatgctccagggtaggcagcaaagaagaaagagtgcgatatgagggtacagtgagtttggcagtccaaattctgttctctgcagcctgtttttgagtagttggtgaataaagtcacccgcctacttgtctaagcacatgtgggtgtgtaactcagttcctggttctcggttctaaaaacagacttccaactgggaaactttttgggggaaattaactggacacctatctcggaggtttattttcttgcaaccagtgaagtcgtcctcctcccttccctggataactcttcagtttgactgtcactgttctggtgtcaactccagcgtcggcacaggcagaaggacttcagctgctggtctcattggttccactgccattgatatgggggggtgcagaggagcactcattgtccatgatggagatccaggacagactgggggactccgggaagaggctttcttggggaagaggaccccaaaggaggtacttcctcctcactgatgccctcagggctgctgtgtgggtgtgttaagctgataaggttcagtttgcggcggaaactacctgctagtcttgtgtcaggggctgccagcctccttttgtttcacttttgcccccttcttgggaacatttgaccaaaaataatcctcatttcatcttgtgtacagtcctttgtgtaccccgcccaggttgagaggtgaatcagcgtaattctccgaagctctgctgggcagctcagccatgttacattgtctatgcagaataagcaggcctggtgtctgcaaatgtaccagtccttctcccgcatctcctgggtgcccccttggctttgcctctcctgtgtcctgtctttctgcgttttagaagtgagagcctctccttcaccttttgagcaactgagtcatctcaagtcctgagctctgctctgccgcctgctggtgccttgtaaaggtatactcgttacaggccctagaggttctaatggtccagggttaagtgagaggagactgtactttgtttcaaaggatccttcaccctgatctgcagtgaggtggatagatcacctggagtccctcgtctgtggtcttggaggcttaaattgtaaaatacatcccttatggaatcctaaattcctctaggtgtttttggaaggcgcatttgagccttgtgagctaaaatggaatggatttaatatttcctatctggcatttccatcttgcccctggtacacaagtcactggcctggaactcagccttgattcactgtccgtcttcacggattagctgtgctgttatgttgtctgtgctgcagattggcccatgtgggaagtcgggggggacctgatttcctgcttggaagacttgggggactgccgagcatatcaaagtgtttatagtcaccaagtgaactgcagcacaaccatctcctctccagcaagccctgaagtcagtagtgcctgcaggtgaaaccaaccagccctgtgttagaggaggaaaagcggagatgacatggaagtctccaagcctgtgccatccacctgccaaggaaaagcacaaggtgctatctacttttctctctaggatttagattatcatttatgtgctgttgcacagtgaaacctcacctgtgtgggcgtgaaagctgattggcattgtttttgattcagctttttggatggctaattgttttcactgtgctgtgggaatgcctctgtattttttcccctctttggccatctttttctgaaaataaagtgatggatcctctagcc

SEQ ID NO: 189382 - DNA, 689 bp, Homo sapiens
  Payload ID: 17397
  Gene Symbol: TATDN2
  Gene Name: TatD DNase domain containing 2
  ENST ID: ENST00000426850
  CDS Start-End: 1-549
ttgcaagccttaaggcaccctaaggctgtggcatttggagaaatgggcttggattactcttacaagtgcaccacgcctgtcccagaacagcacaaggtatttgagagacagctgcagctggctgtgtctctaaagaagcccttggtgatccactgccgagaagctgatgaagatctgctagaaatcatgaaaaagtttgtgccccctgactacaagatccataggcattgcttcaccggcagctacccggtcattgagcccctgctgaagtactttcccaacatgtctgtgggcttcacggcagtgctgacatactcctctgcctgggaggcccgggaagccttgaggcagatcccactggagagaatcatcgtggaaacggatgctccctatttcctccctcgccaggttcccaaaagcctttgccagtatgcccacccgggcctggccttgcatacggtccgagagattgccagagtcaaagatcagccactctccctcaccttggctgccttgcgtgagaacaccagtcgcctctacagtctttaagcagagaaggtacagtcctcgggagtctcctagaaaaggtcgtaaaactcacattctgtattttttaaaaaccaggacaagtcttttgttgcattttgttaatgtaaagaatataaacatagtatgagcattaagcctga

SEQ ID NO: 189383 - DNA, 4484 bp, Homo sapiens
  Payload ID: 17397
  Gene Symbol: TATDN2
  Gene Name: TatD DNase domain containing 2
  Uniprot ID: Q93075
  ENST ID: ENST00000448281
  CDS Start-End: 163-2448
ggcaaagtgaaggcttcctgatctcagaagcacgttgtgggcttggaaaccgacggcagcctttagtcaattttggatcgctttgacttctccaacacggtttggcatctctgaaaccttgagaactgtgatgggcagtggaaagaagagggaaaggtgcccatggcgtccgagcggggcaaggtcaagcacaactggagcagcacgtcggaagggtgtccccgcaagcgcagctgcctccgggagccctgtgatgtggccccctccagccggccagctcagaggtctgcgtcgcgttctggagggcccagcagccccaagcgcctgaaagcccagaaggaggacgatgtggcttgctcgcggaggttatcctggggctcatcccgccgcagaaataactcctcctcctccttctccccacatttcttgggccctggtgtgggcggggccgcctccaaaggctgcctgattcggaacactcgggggttcctgtcttcagggggatcccctctgcgtcctgccaacgcctctttggaagaaatggcttctctagaggaggaagcctgcagccttaaggttgattccaaagatagttctcataactccacaaactctgaatttgcagctgaagctgagggtcagaatgatacaattgaggaacccaacaaggtccagaaaaggaagagggatagacttcgagaccagggctccacaatgatctacctgaaggctatccagggcatcctggggaaatcgatgccaaaaaggaagggagaggctgccactcgggcaaaaccaagcgcagcagagcatcccagccatggagaaggaccagccaggagtgaaggaccagccaagactgcagaaggagcagccaggagtgtcacagtcactgctgctcagaaggagaaagacgcaaccccagaggtcagcatggaggaggataagacagtgccagagaggagcagcttctatgacaggagagtagttatagaccctcaagagaaacccagtgaggagccccttggggaccgaaggactgtcattgacaaatgctctccacccctagagttcttggatgactctgactctcatttagaaatccaaaagcataaagatagggaggtggtgatggagcacccctcttctggaagtgactggtctgatgttgaggagatctccacagtcagattctctcaggaggaacctgtctccctgaaaccttcagccgttccggagccttcttccttcaccaccgactatgtcatgtaccctcctcatttgtacagtagtccttggtgtgactacgccagctattggaccagcagccccaagccttctagctacccctccacaggcagcagcagcaacgatgcagcccaggttgggaagagcagccggagccgcatgagtgattattcccccaactctacagggagtgtccaaaacacctccagagacatggaggcctcagaggaaggctggtcccagaattctcgttcatttcgcttctccagaagctcagaagaaagagaggtgaaggagaaaagaacattccaagaggagatgcctccgcgtccttgtggaggacacgcatccagctccctgccaaagagccacctggagccaagcctagaggagggcttcattgacactcattgtcacctggacatgctctattccaagctatctttccaagggacctttacaaagttcagaaaaatttacagcagctccttccctaaggaatttcagggctgcatctctgacttctgtgatccccgcaccctgacagattgcctatgggaggagctgttgaaagaggatctggtctggggggcctttggctgtcaccctcattttgcacgttactacagtgagagtcaagaaagaaatcttttgcaagccttaaggcaccctaaggctgtggcatttggagaaatgggcttggattactcttacaagtgcaccacgcctgtcccagaacagcacaaggtatttgagagacagctgcagctggctgtgtctctaaagaagcccttggtgatccactgccgagaagctgatgaagatctgctagaaatcatgaaaaagtttgtgccccctgactacaagatccataggcattgcttcaccggcagctacccggtcattgagcccctgctgaagtactttcccaacatgtctgtgggcttcacggcagtgctgacatactcctctgcctgggaggcccgggaagccttgaggcagatcccactggagagaatcatcgtggaaacggatgctccctatttcctccctcgccaggttcccaaaagcctttgccagtatgcccacccgggcctggccttgcatacggtccgagagattgccagagtcaaagatcagccactctccctcaccttggctgccttgcgtgagaacaccagtcgcctctacagtctttaagcagagaaggtacagtcctcgggagtctcctagaaaagggcgaccagcagcctgacagaacacaggctggcttgaagtctgtgtctcaggtcgaggatgtgtttagagagctgattggaacacagaaaaccaggacaggatgttttcctccaagcgggtcataaggcttcagcttctgggtggtgggtggggtggggtgggcatggaatgaggggtatggggactgcctgtaatagcactgggattttgcctcccagccaaaatgctccagggtaggcagcaaagaagaaagagtgcgatatgagggtacagtgagtttggcagtccaaattctgttctctgcagcctgtttttgagtagttggtgaataaagtcacccgcctacttgtctaagcacatgtgggtgtgtaactcagttcctggttctcggttctaaaaacagacttccaactgggaaactttttgggggaaattaactggacacctatctcggaggtttattttcttgcaaccagtgaagtcgtcctcctcccttccctggataactcttcagtttgactgtcactgttctggtgtcaactccagcgtcggcacaggcagaaggacttcagctgctggtctcattggttccactgccattgatatgggggggtgcagaggagcactcattgtccatgatggagatccaggacagactgggggactccgggaagaggctttcttggggaagaggaccccaaaggaggtacttcctcctcactgatgccctcagggctgctgtgtgggtgtgttaagctgataaggttcagtttgcggcggaaactacctgctagtcttgtgtcaggggctgccagcctccttttgtttcacttttgcccccttcttgggaacatttgaccaaaaataatcctcatttcatcttgtgtacagtcctttgtgtaccccgcccaggttgagaggtgaatcagcgtaattctccgaagctctgctgggcagctcagccatgttacattgtctatgcagaataagcaggcctggtgtctgcaaatgtaccagtccttctcccgcatctcctgggtgcccccttggctttgcctctcctgtgtcctgtctttctgcgttttagaagtgagagcctctccttcaccttttgagcaactgagtcatctcaagtcctgagctctgctctgccgcctgctggtgccttgtaaaggtatactcgttacaggccctagaggttctaatggtccagggttaagtgagaggagactgtactttgtttcaaaggatccttcaccctgatctgcagtgaggtggatagatcacctggagtccctcgtctgtggtcttggaggcttaaattgtaaaatacatcccttatggaatcctaaattcctctaggtgtttttggaaggcgcatttgagccttgtgagctaaaatggaatggatttaatatttcctatctggcatttccatcttgcccctggtacacaagtcactggcctggaactcagccttgattcactgtccgtcttcacggattagctgtgctgttatgttgtctgtgctgcagattggcccatgtgggaagtcgggggggacctgatttcctgcttggaagacttgggggactgccgagcatatcaaagtgtttatagtcaccaagtgaactgcagcacaaccatctcctctccagcaagccctgaagtcagtagtgcctgcaggtgaaaccaaccagccctgtgttagaggaggaaaagcggagatgacatggaagtctccaagcctgtgccatccacctgccaaggaaaagcacaaggtgctatctacttttctctctaggatttagattatcatttatgtgctgttgcacagtgaaacctcacctgtgtgggcgtgaaagctgattggcattgtttttgattcagctttttggatggctaattgttttcactgtgctgtgggaatgcctctgtattttttcccctctttggccatctttttctgaaaataaagtgatggatcctctagccaa

SEQ ID NO: 189384 - DNA, 2321 bp, Homo sapiens
  Payload ID: 17398
  Gene Symbol: TATDN3
  Gene Name: TatD DNase domain containing 3
  Uniprot ID: Q17R31
  ENST ID: ENST00000366973
  CDS Start-End: 39-860
tctgctggccggtctaaagcggcagccgccggggcgcaatgcgagcggctggcgtaggcttggtggactgtcactgccacctctccgccccggactttgaccgcgatttggatgatgtgttggagaaagccaagaaggccaatgttgtggcccttgtggcagttgccgaacattcaggagaatttgaaaagattatgcaactttcagaaaggtataatgggtttgtcctgccatgcttgggtgttcatccagttcaaggacttccaccagaagaccaaagaagtgtcacactaaaggatttggatgtagctttgcccattattgagaattataaggatcggttgttggcaattggagaggttggactagatttctcccccagatttgctggcactggtgaacagaaggaagagcaaagacaagtcctaatcagacagatccagttagccaaaagactaaatttgcctgtaaatgtgcactcacgctctgctggaagacctaccatcaaccttttacaagagcaaggtgctgagaaggtactgctgcatgcatttgatggtcggccatctgtagccatggaaggagtaagagctgggtacttcttctcaattcccccttctatcataagaagtggacagcagaaacttgtgaaacaattgcctttaacttctatatgcttagaaacagattcacctgcactaggaccagaaaaacaggtacggaatgagccctggaacatttctatttcagcagaatatattgcccaggtgaaagggatctcagtggaagaagttatagaagtgacgacacagaatgcattaaaactgtttcctaagctccgacacttgctccagaaatagcttcaaaaccatccattacaaaatcgaatcaactgcagggggcagcatttgaaaaatagaaatgttctgatgaagaatctgaactgaagaagctgttttatagggttatagaagattgtaattgtagagaaatatttctcttagaaataaaactgggcttggatcctgaaaccctgggttctgattctagccttgtgctgcttttcaattagccgagttctggcaggatattgggaaaatactgctacttcttacattgcccttttatatagaaccaccacctgaactgaaaccattgctactgggaagggtggctcccacaggaagagtataagcactactgtgatgaggatggagtaagctaaagtatacttttttttttttttgatggagtttcgctgttgttgcccaggctggagtgcaatggcacgatcttggctcactgcaacctccacttcccaggttctagcgagtctcctccctcagcctcccaagtagctgggattacaggcatgtgccaccatgcccagctaattttgtatttttagtagagacagggtttctccatgttggtcaggctggtctcgaactcccgacctcaggtgatccgcccgcctcggcctcccaaagtgctgggattacaggcatgagccactgcgccagcctaaagtgtgttcttaccacctatttttcttcccataggagttagccagtgaagggagaatgtctggttttctatgctgtcagaaatctcttttctaggtttgtaaaattgaacttttagtacttcgaattatttctctttaagataaaaatgcatacgatttttacactgatcttagatttttgacttatgaggccagtggtttaaacaatcattattgaataccaagcccaaaagtttagttaatacaccaattgtaagttctggtctgaattttgtcaacatatttagaatgtaaatggcattattaaaaatgtatctgatttctctgtgaacagtaatatttcatatttttaagtttaaaaatgttagtgtaagccaggcacagtggcattcacctgtagtgccaaccactcaggaggctgagatgggagaccttttaagcctgagtttgagtcaggcctgggcaacatagatgtgagcacctatctctaaaaatgtaaataaataaaaatctcaaaaaaattaaaaatctcaagtgtaaaaacagttctgtagatagatggtagtgatggtagcacatcaatgtgaaggtatttaatgccactgaactgtacacttataacgaattaggataaattttatgttatgtgtatttactacaattttttaaaaatcgtatatgtagtttaacaggtgtggtcaatatcaaaacttaggtatttaatcttgttaaattatataagcagaaaatgctggaaaaagtacctgtcatagaaaaaaataaacttcctaaa

SEQ ID NO: 189385 - DNA, 2389 bp, Homo sapiens
  Payload ID: 17398
  Gene Symbol: TATDN3
  Gene Name: TatD DNase domain containing 3
  Uniprot ID: Q17R31
  ENST ID: ENST00000366974
  CDS Start-End: 95-919
agcatgcatccggctggaaactcaggacgctgcagctgaaacgttccggctccggctctgctggccggtctaaagcggcagccgccggggcgcaatgcgagcggctggcgtaggcttggtggactgtcactgccacctctccgccccggactttgaccgcgatttggatgatgtgttggagaaagccaagaaggccaatgttgtggcccttgtggcagttgccgaacattcaggagaatttgaaaagattatgcaactttcagaaaggtataatgggtttgtcctgccatgcttgggtgttcatccagttcaaggacttccaccagaagaccaaagaagtgtcacactaaaggatttggatgtagctttgcccattattgagaattataaggatcggttgttggcaattggagaggttggactagatttctcccccagatttgctggcactggtgaacagaaggaagagcaaagacaagtcctaatcagacagatccagttagccaaaagactaaatttgcctgtaaatgtgcactcacgctctgctggaagacctaccatcaaccttttacaagagcaaggtgctgagaaggtactgctgcatgcatttgatggtcggccatctgtagccatggaaggagtaagagctgggtacttcttctcaattcccccttctatcataagaagtggacagaagcagaaacttgtgaaacaattgcctttaacttctatatgcttagaaacagattcacctgcactaggaccagaaaaacaggtacggaatgagccctggaacatttctatttcagcagaatatattgcccaggtgaaagggatctcagtggaagaagttatagaagtgacgacacagaatgcattaaaactgtttcctaagctccgacacttgctccagaaatagcttcaaaaccatccattacaaaatcgaatcaactgcagggggcagcatttgaaaaatagaaatgttctgatgaagaatctgaactgaagaagctgttttatagggttatagaagattgtaattgtagagaaatatttctcttagaaataaaactgggcttggatcctgaaaccctgggttctgattctagccttgtgctgcttttcaattagccgagttctggcaggatattgggaaaatactgctacttcttacattgcccttttatatagaaccaccacctgaactgaaaccattgctactgggaagggtggctcccacaggaagagtataagcactactgtgatgaggatggagtaagctaaagtatacttttttttttttttgatggagtttcgctgttgttgcccaggctggagtgcaatggcacgatcttggctcactgcaacctccacttcccaggttctagcgagtctcctccctcagcctcccaagtagctgggattacaggcatgtgccaccatgcccagctaattttgtatttttagtagagacagggtttctccatgttggtcaggctggtctcgaactcccgacctcaggtgatccgcccgcctcggcctcccaaagtgctgggattacaggcatgagccactgcgccagcctaaagtgtgttcttaccacctatttttcttcccataggagttagccagtgaagggagaatgtctggttttctatgctgtcagaaatctcttttctaggtttgtaaaattgaacttttagtacttcgaattatttctctttaagataaaaatgcatacgatttttacactgatcttagatttttgacttatgaggccagtggtttaaacaatcattattgaataccaagcccaaaagtttagttaatacaccaattgtaagttctggtctgaattttgtcaacatatttagaatgtaaatggcattattaaaaatgtatctgatttctctgtgaacagtaatatttcatatttttaagtttaaaaatgttagtgtaagccaggcacagtggcattcacctgtagtgccaaccactcaggaggctgagatgggagaccttttaagcctgagtttgagtcaggcctgggcaacatagatgtgagcacctatctctaaaaatgtaaataaataaaaatctcaaaaaaattaaaaatctcaagtgtaaaaacagttctgtagatagatggtagtgatggtagcacatcaatgtgaaggtatttaatgccactgaactgtacacttataacgaattaggataaattttatgttatgtgtatttactacaattttttaaaaatcgtatatgtagtttaacaggtgtggtcaatatcaaaacttaggtatttaatcttgttaaattatataagcagaaaatgctggaaaaagtacctgtcatagaaaaaaataaacttcctaaatcaaagtga

SEQ ID NO: 189386 - DNA, 1381 bp, Homo sapiens
  Payload ID: 17398
  Gene Symbol: TATDN3
  Gene Name: TatD DNase domain containing 3
  Uniprot ID: Q17R31
  ENST ID: ENST00000532324
  CDS Start-End: 95-940
agcatgcatccggctggaaactcaggacgctgcagctgaaacgttccggctccggctctgctggccggtctaaagcggcagccgccggggcgcaatgcgagcggctggcgtaggcttggtggactgtcactgccacctctccgccccggactttgaccgcgatttggatgatgtgttggagaaagccaagaaggccaatgttgtggcccttgtggcagttgccgaacattcaggagaatttgaaaagattatgcaactttcagaaaggtataatgggtttgtcctgccatgcttgggtgttcatccagttcaaggacttccaccagaagaccaaagaagtgtcacactaaaggatttggatgtagctttgcccattattgagaattataaggatcggttgttggcaattggagaggttggactagatttctcccccagatttgctggcactggtgaacagaaggaagagcaaagacaagtcctaatcagacagatccagttagccaaaagactaaatttgcctgtaaatgtgcactcacgctctgctggaagacctaccatcaaccttttacaagagcaaggtgctgagaaggtactgctgcatgcatttgatggtcggccatctgtagccatggaaggagtaagagctgggtacttcttctcaattcccccttctatcataagaagtggacagctgctttctcttttctctaagaagcagaaacttgtgaaacaattgcctttaacttctatatgcttagaaacagattcacctgcactaggaccagaaaaacaggtacggaatgagccctggaacatttctatttcagcagaatatattgcccaggtgaaagggatctcagtggaagaagttatagaagtgacgacacagaatgcattaaaactgtttcctaagctccgacacttgctccagaaatagcttcaaaaccatccattacaaaatcgaatcaactgcagggggcagcatttgaaaaatagaaatgttctgatgaagaatctgaactgaagaagctgttttatagggttatagaagattgtaattgtagagaaatatttctcttagaaataaaactgggcttggatcctgaaaccctgggttctgattctagccttgtgctgcttttcaattagccgagttctggcaggatattgggaaaatactgctacttcttacattgcccttttatatagaaccaccacctgaactgaaaccattgctactgggaagggtggctcccacaggaagagtataagcactactgtgatgaggatggagtaagctaaagtatacttttttttttttttgatggagtttcgctgttgttgcccaggctggagtgcaatggcacgatcttggctc

SEQ ID NO: 189387 - DNA, 498 bp, Homo sapiens
  Payload ID: 17398
  Gene Symbol: TATDN3
  Gene Name: TatD DNase domain containing 3
  ENST ID: ENST00000488246
  CDS Start-End: 1-433
gcgagcggctggcgtaggcttggtggactgtcactgccacctctccgccccggactttgaccgcgatttggatgatgtgttggagaaagccaagaaggccaatgttgtggcccttgtggcagttgccgaacattcaggagaatttgaaaagattatgcaactttcagaaaggtataatgggtttgtcctgccatgcttgggtgttcatccagttcaaggacttccaccagaagaccaaagaagtgtcacactaaaggatttggatgtagctttgcccattattgagaattataaggatcggttgttggcaattggagaggttggactagatttctcccccagatttgctggcactggtgaacagaaggaagagcaaagacaagtcctaatcagacagatccagttagccaaaagactaaatttgcctgtgtaggttaattattttcctatgttaatagctatagagcaaattaaataatgatcagagttctcctgaaa

SEQ ID NO: 189388 - DNA, 946 bp, Homo sapiens
  Payload ID: 17398
  Gene Symbol: TATDN3
  Gene Name: TatD DNase domain containing 3
  ENST ID: ENST00000527693
  CDS Start-End: 1-125
gaagacctaccatcaaccttttacaagagcaagaagcagaaacttgtgaaacaattgcctttaacttctatatgcttagaaacagattcacctgcactaggaccagaaaaacaggtacggaatgagccctggaacatttctatttcagcagaatatattgcccaggtgaaagggatctcagtggaagaagttatagaagtgacgacacagaatgcattaaaactgtttcctaagctccgacacttgctccagaaatagcttcaaaaccatccattacaaaatcgaatcaactgcagggggcagcatttgaaaaatagaaatgttctgatgaagaatctgaactgaagaagctgttttatagggttatagaagattgtaattgtagagaaatatttctcttagaaataaaactgggcttggatcctgaaaccctgggttctgattctagccttgtgctgcttttcaattagccgagttctggcaggatattgggaaaatactgctacttcttacattgcccttttatatagaaccaccacctgaactgaaaccattgctactgggaagggtggctcccacaggaagagtataagcactactgtgatgaggatggagtaagctaaagtatacttttttttttttttgatggagtttcgctgttgttgcccaggctggagtgcaatggcacgatcttggctcactgcaacctccacttcccaggttctagcgagtctcctccctcagcctcccaagtagctgggattacaggcatgtgccaccatgcccagctaattttgtatttttagtagagacagggtttctccatgttggtcaggctggtctcgaactcccgacctcaggtgatccgcccgcctcggcctcccaaagtgctgggattacaggcatgagccactgcgccagcctaaagtgtgttcttaccacctat

SEQ ID NO: 189389 - DNA, 492 bp, Homo sapiens
  Payload ID: 17398
  Gene Symbol: TATDN3
  Gene Name: TatD DNase domain containing 3
  ENST ID: ENST00000530441
  CDS Start-End: 72-257
aggacgctgcagctgaaacgttccggctccggctctgctggccggtctaaagcggcagccgccggggcgcaatgcgagcggctggcgtaggcttggtggactgtcactgccacctctccgccccggactttgaccgcgatttggatgatgtgttggagaaagccaagaaggccaatgttgtggcccttgtggcagttgccgaacattcaggagaatttgaaaagattatgcaactttcagaaaggatttggatgtagctttgcccattattgagaattataaggatcggttgttggcaattggagaggttggactagatttctcccccagatttgctggcactggtgaacagaaggaagagcaaagacaagtcctaatcagacagatccagttagccaaaagactaaatttgcctgtgtaggttaattattttcctatgttaatagctatagagcaaattaaataatgatcagagttctcctgaaatggaac

SEQ ID NO: 189390 - DNA, 2206 bp, Homo sapiens
  Payload ID: 17398
  Gene Symbol: TATDN3
  Gene Name: TatD DNase domain containing 3
  ENST ID: ENST00000525574
  CDS Start-End: 1-182
gagcggctggcgtaggcttggtggactgtcactgccacctctccgccccggactttgaccgcgatttggatgatgtgttggagaaagccaagaaggccaatgttgtggcccttgtggcagttgccgaacattcaggagaatttgaaaagattatgcaactttcagaaaggatttggatgtagctttgcccattattgagaattataaggatcggttgttggcaattggagaggttggactagatttctcccccagatttgctggcactggtgaacagaaggaagagcaaagacaagtcctaatcagacagatccagttagccaaaagactaaatttgcctgtaaatgtgcactcacgctctgctggaagacctaccatcaaccttttacaagagcaaggtgctgagaaggtactgctgcatgcatttgatggtcggccatctgtagccatggaaggagtaagagctgggtacttcttctcaattcccccttctatcataagaagtggacagaagcagaaacttgtgaaacaattgcctttaacttctatatgcttagaaacagattcacctgcactaggaccagaaaaacaggtacggaatgagccctggaacatttctatttcagcagaatatattgcccaggtgaaagggatctcagtggaagaagttatagaagtgacgacacagaatgcattaaaactgtttcctaagctccgacacttgctccagaaatagcttcaaaaccatccattacaaaatcgaatcaactgcagggggcagcatttgaaaaatagaaatgttctgatgaagaatctgaactgaagaagctgttttatagggttatagaagattgtaattgtagagaaatatttctcttagaaataaaactgggcttggatcctgaaaccctgggttctgattctagccttgtgctgcttttcaattagccgagttctggcaggatattgggaaaatactgctacttcttacattgcccttttatatagaaccaccacctgaactgaaaccattgctactgggaagggtggctcccacaggaagagtataagcactactgtgatgaggatggagtaagctaaagtatacttttttttttttttgatggagtttcgctgttgttgcccaggctggagtgcaatggcacgatcttggctcactgcaacctccacttcccaggttctagcgagtctcctccctcagcctcccaagtagctgggattacaggcatgtgccaccatgcccagctaattttgtatttttagtagagacagggtttctccatgttggtcaggctggtctcgaactcccgacctcaggtgatccgcccgcctcggcctcccaaagtgctgggattacaggcatgagccactgcgccagcctaaagtgtgttcttaccacctatttttcttcccataggagttagccagtgaagggagaatgtctggttttctatgctgtcagaaatctcttttctaggtttgtaaaattgaacttttagtacttcgaattatttctctttaagataaaaatgcatacgatttttacactgatcttagatttttgacttatgaggccagtggtttaaacaatcattattgaataccaagcccaaaagtttagttaatacaccaattgtaagttctggtctgaattttgtcaacatatttagaatgtaaatggcattattaaaaatgtatctgatttctctgtgaacagtaatatttcatatttttaagtttaaaaatgttagtgtaagccaggcacagtggcattcacctgtagtgccaaccactcaggaggctgagatgggagaccttttaagcctgagtttgagtcaggcctgggcaacatagatgtgagcacctatctctaaaaatgtaaataaataaaaatctcaaaaaaattaaaaatctcaagtgtaaaaacagttctgtagatagatggtagtgatggtagcacatcaatgtgaaggtatttaatgccactgaactgtacacttataacgaattaggataaattttatgttatgtgtatttactacaattttttaaaaatcgtatatgtagtttaacaggtgtggtcaatatcaaaacttaggtatttaatcttgttaaattatataagcagaaaatgctggaaaaagtacctgtcatagaaaaaaataaacttcctaaatcaaagtga

SEQ ID NO: 189391 - DNA, 1291 bp, Homo sapiens
  Payload ID: 17398
  Gene Symbol: TATDN3
  Gene Name: TatD DNase domain containing 3
  Uniprot ID: Q17R31
  ENST ID: ENST00000531963
  CDS Start-End: 39-761
tctgctggccggtctaaagcggcagccgccggggcgcaatgcgagcggctggcgtaggcttggtggactgtcactgccacctctccgccccggactttgaccgcgatttggatgatgtgttggagaaagccaagaaggccaatgttgtggcccttgtggcagttgccgaacattcaggagaatttgaaaagattatgcaactttcagaaaggtataatgggtttgtcctgccatgcttgggtgttcatccagttcaaggacttccaccagaagaccaaagaagtgtcacactaaaggatttggatgtagctttgcccattattgagaattataaggatcggttgttggcaattggagaggttggactagatttctcccccagatttgctggcactggtgaacagaaggaagagcaaagacaagtcctaatcagacagatccagttagccaaaagactaaatttgcctgtaaatgtgcactcacgctctgctggaagacctaccatcaaccttttacaagagcaaggtgctgagaaggtactgctgcatgcatttgatggtcggccatctgtagccatggaaggagtaagagctgggtacttcttctcaattcccccttctatcataagaagtggacagctgctttctcttttctctaagaagcagaaacttgtgaaacaattgcctttaacttctatatgcttagaaacagattcacctgcactaggaccagaaaaacagcagaatatattgcccaggtgaaagggatctcagtggaagaagttatagaagtgacgacacagaatgcattaaaactgtttcctaagctccgacacttgctccagaaatagcttcaaaaccatccattacaaaatcgaatcaactgcagggggcagcatttgaaaaatagaaatgttctgatgaagaatctgaactgaagaagctgttttatagggttatagaagattgtaattgtagagaaatatttctcttagaaataaaactgggcttggatcctgaaaccctgggttctgattctagccttgtgctgcttttcaattagccgagttctggcaggatattgggaaaatactgctacttcttacattgcccttttatatagaaccaccacctgaactgaaaccattgctactgggaagggtggctcccacaggaagagtataagcactactgtgatgaggatggagtaagctaaagtatacttttttttttttttgatggagtttcgctgttgttgcccaggctggagtgcaatggcacgatcttggctc

SEQ ID NO: 189392 - DNA, 547 bp, Homo sapiens
  Payload ID: 17398
  Gene Symbol: TATDN3
  Gene Name: TatD DNase domain containing 3
  ENST ID: ENST00000530399
  CDS Start-End: 64-547
agatgttcttgaagtctgaaagaggaaggggagctagtcaaggagactgacaagtagccaccaatgagagagtggtattgcagaagtgaagggtggaaagcatttcaagaaggaaggagtaagcaagatttggatgatgtgttggagaaagccaagaaggccaatgttgtggcccttgtggcagttgccgaacattcaggagaatttgaaaagattatgcaactttcagaaaggtataatgggtttgtcctgccatgcttgggtgttcatccagttcaaggacttccaccagaagaccaaagaagtgtcacactaaaggatttggatgtagctttgcccattattgagaattataaggatcggttgttggcaattggagaggttggactagatttctcccccagatttgctggcactggtgaacagaaggaagagcaaagacaagtcctaatcagacagatccagttagccaaaagactaaatttgcctgtaaatgtgcactcacgctctgctggaagacctaccatcaaccttttacaagagcaag

SEQ ID NO: 189393 - DNA, 417 bp, Homo sapiens
  Payload ID: 17398
  Gene Symbol: TATDN3
  Gene Name: TatD DNase domain containing 3
  ENST ID: ENST00000533650
  CDS Start-End: 12-317
gccggggcgcaatgcgagcggctggcgtaggcttggtggactgtcactgccacctctccgccccggactttgaccgcgatttggatgatgtgttggagaaagccaagaaggccaatgttgtggcccttgtggcagttgccgaacattcaggagaatttgaaaagattatgcaactttcagaaaggtataatgggtttgtcctgccatgcttgggtgttcatccagttcaaggacttccaccagaagaccaaagaagtgtcacactaaaggtgctgagaaggtactgctgcatgcatttgatggtcggccatctgtagccatggaaggagtaagagctgggtacttcttctcaattcccccttctatcataagaagtggacagaagcagaaacttgtgaaacaattgcctttaacttc

SEQ ID NO: 189394 - DNA, 1073 bp, Homo sapiens
  Payload ID: 17398
  Gene Symbol: TATDN3
  Gene Name: TatD DNase domain containing 3
  Uniprot ID: Q17R31
  ENST ID: ENST00000526641
  CDS Start-End: 53-814
gttccggctccggctctgctggccggtctaaagcggcagccgccggggcgcaatgcgagcggctggcgtaggcttggtggactgtcactgccacctctccgccccggactttgaccgcgatttggatgatgtgttggagaaagccaagaaggccaatgttgtggcccttgtggcagttgccgaacattcaggagaatttgaaaagattatgcaactttcagaaaggtataatgggtttgtcctgccatgcttgggtgttcatccagttcaaggacttccaccagaagaccaaagaagtgtcacactaaaggttggactagatttctcccccagatttgctggcactggtgaacagaaggaagagcaaagacaagtcctaatcagacagatccagttagccaaaagactaaatttgcctgtaaatgtgcactcacgctctgctggaagacctaccatcaaccttttacaagagcaaggtgctgagaaggtactgctgcatgcatttgatggtcggccatctgtagccatggaaggagtaagagctgggtacttcttctcaattcccccttctatcataagaagtggacagaagcagaaacttgtgaaacaattgcctttaacttctatatgcttagaaacagattcacctgcactaggaccagaaaaacaggtacggaatgagccctggaacatttctatttcagcagaatatattgcccaggtgaaagggatctcagtggaagaagttatagaagtgacgacacagaatgcattaaaactgtttcctaagctccgacacttgctccagaaatagcttcaaaaccatccattacaaaatcgaatcaactgcagggggcagcatttgaaaaatagaaatgttctgatgaagaatctgaactgaagaagctgttttatagggttatagaagattgtaattgtagagaaatatttctcttagaaataaaactgggcttggatcctgaaaccctgggttctgattctagccttgtgctgcttttcaattagccgagttctggcaggatattgggaaaatactgctacttcttacattg

SEQ ID NO: 189395 - DNA, 794 bp, Homo sapiens
  Payload ID: 17398
  Gene Symbol: TATDN3
  Gene Name: TatD DNase domain containing 3
  ENST ID: ENST00000526997
  CDS Start-End: 17-592
cagccgccggggcgcaatgcgagcggctggcgtaggcttggtggactgtcactgccacctctccgccccggactttgaccgcgatttggatgatgtgttggagaaagccaagaaggccaatgttgtggcccttgtggcagttgccgaacattcaggagaatttgaaaagattatgcaactttcagaaaggtataatgggtttgtcctgccatgcttgggtgttcatccagttcaaggacttccaccagaagaccaaagaagtgtcacactaaaggatttggatgtagctttgcccattattgagaattataaggatcggttgttggcaattggagaggttggactagatttctcccccagatttgctggcactggtgaacagaaggaagagcaaagacaagtcctaatcagacagatccagttagccaaaagactaaatttgcctgtaaatgtgcactcacgctctgctggaagacctaccatcaaccttttacaagagcaagcagaaacttgtgaaacaattgcctttaacttctatatgcttagaaacagattcacctgcactaggaccagaaaaacaggtacggaatgagccctggaacatttctatttcagcagaatatattgcccaggtgaaagggatctcagtggaagaagttatagaagtgacgacacagaatgcattaaaactgtttcctaagctccgacacttgctccagaaatagcttcaaaaccatccattacaaaatcgaatcaactgcagggggcagcatttgaaaaatagaaatgttctg

SEQ ID NO: 189396 - DNA, 551 bp, Homo sapiens
  Payload ID: 17398
  Gene Symbol: TATDN3
  Gene Name: TatD DNase domain containing 3
  ENST ID: ENST00000606486
  CDS Start-End: 1-95
catgcttgggtgttcatccagttcaaggacttccaccagaagaccaaagaagtgtcacactaaaggtaacagtcatacaaaacaggaaccattaaaaacaaacaaacgaaagaattatttgactcagtaatcctcctctttctaatttatattctcaggaaataatccaaaagaaggaaacattaccttctttaacaaagatgtttgttgcaacattattcgtaatagagaaaaagtagaaacagcctagaggttcagaaacaaaggaatcattagttaagttgtagagtgttaaatataatgcatttatagaaaatgaggattataaagtattatagcacatggaaaatacttactgtataatatagggagaaaagcaggataccaaatagcatattcactatgagtgacatctacataagcatatattcataaggaaaagactgcagagaaaacacagaaatgatagtaattgtgatgatctgttagaattatctgtaacttttttcacatttttttggtactgtagtcatgttgctttggcaaaaaag

SEQ ID NO: 189397 - DNA, 6932 bp, Homo sapiens
  Payload ID: 17399
  Gene Symbol: TTBK1
  Gene Name: tau tubulin kinase 1
  Uniprot ID: Q5TCY1
  ENST ID: ENST00000259750
  CDS Start-End: 84-4049
cagccgcagccgcagcgggcacagagcaggtagatggccccctcagggcaggcccggcggacacccctccctctggctggcggatgcagtgcctagcggccgcccttaaggacgaaaccaacatgagtgggggaggggagcaggccgacatcctgccggccaactacgtggtcaaggatcgctggaaggtgctgaaaaagatcgggggcgggggctttggtgagatctacgaggccatggacctgctgaccagggagaatgtggccctcaaggtggagtcagcccagcagcccaagcaggtcctcaagatggaggtggccgtgctcaagaagttgcaagggaaggaccatgtgtgcaggttcattggctgtggcaggaacgagaagtttaactatgtagtgatgcagctccagggccggaacctggccgacctgcgccgtagccagccgcgaggcaccttcacgctgagcaccacattgcggctgggcaagcagatcttggagtccatcgaggccatccactctgtgggcttcctgcaccgtgacatcaagccttcaaactttgccatgggcaggctgccctccacctacaggaagtgctatatgctggacttcgggctggcccggcagtacaccaacaccacgggggatgtgcggccccctcggaatgtggccgggtttcgaggaacggttcgctatgcctcagtcaatgcccacaagaaccgggagatgggccgccacgacgacctgtggtccctcttctacatgctggtggagtttgcagtgggccagctgccctggaggaagatcaaggacaaggaacaggtagggatgatcaaggagaagtatgagcaccggatgctgctgaagcacatgccgtcagagttccacctcttcctggaccacattgccagcctcgactacttcaccaagcccgactaccagttgatcatgtcagtgtttgagaacagcatgaaggagaggggcattgccgagaatgaggcctttgactgggagaaggcaggcaccgatgccctcctgtccacgagcacctctaccccgccccagcagaacacccggcagacggcagccatgtttggggtggtcaatgtgacgccagtgcctggggacctgctccgggagaacaccgaggatgtgctacagggagagcacctgagtgaccaggagaatgcacccccaattctgcccgggaggccctctgaggggctgggccccagtccccaccttgtcccccaccccgggggtcctgaggctgaagtctgggaggagacagatgtcaaccggaacaaactccggatcaacatcggcaaaagcccctgtgtggaggaggaacagagccgaggcatgggggtccccagctccccagtgcgtgcccccccagactcccccacaaccccagtccgttctctgcgctaccggagggtgaacagccctgagtcagaaaggctgtccacggcggacgggcgagtggagctacctgagaggaggtcacggatggatctgcctggctcgccctcgcgccaggcctgctcctctcagccagcccagatgctgtcagtggacacaggccacgctgaccgacaggccagtggccgcatggacgtgtcagcctctgtggagcaggaggccctgagcaacgccttccgctcggtgccgctggctgaggaggaggatttcgacagcaaagagtgggtcatcatcgacaaggagacggagctcaaggacttccctccaggggctgagcccagcacatcgggcaccacggatgaggagcccgaggagctgcggccactgcccgaggagggcgaagagcggcggcggctgggggcagagcccaccgtccggccccggggacgcagcatgcaggcgctggcggaggaggacctgcagcatttgccgccccagcccctgccaccccagctgagccagggcgatggccgttccgagacgtcacagccccccacgcctggcagcccttcccactcacccctgcactcgggaccccgccctcgacggagagagtcggaccccacaggcccacagagacaggtgttctccgtggcgcccccatttgaggtgaatggcctcccacgagctgtgcctctgagtctgccctaccaggacttcaaaagagacctctccgattaccgagaacgggcgcggttgctcaacagggtccggagggtgggcttctcgcacatgctgctcaccaccccccaggtcccactggctcctgttcagcctcaggctaatgggaaggaggaagaggaggaggaggaggaagatgaggaagaggaagaagaggatgaggaagaagaagaggaggaagaggaagaggaggaggaagaagaggaggaggaggaagaggaggaggaggctgcagcggcagttgccttgggggaggtgctggggcctcgtagtggctccagcagtgaggggagtgagaggagcactgaccggagccaggagggtgccccgtccacgctgctggcagacgatcagaaggagtccaggggccgggcctccatggccgatggggacctggagcctgaggagggctccaaaacgctggtgcttgtctctcctggcgacatgaagaagtcgcccgtcactgccgaactggcccccgaccccgacctgggcaccctggctgccctcactcctcagcatgagcggccccagcccacgggcagccagctggacgtatctgagccaggcaccctgtcctctgtcctcaagtctgagcccaagcccccggggcctggggcagggctgggggccgggacagtgaccacaggggtcgggggcgtggcagtcacctcctcacccttcaccaaagttgagaggacctttgtgcacattgcggagaaaacccacctcaacgtcatgtcttccggtggacaagccttgcggtctgaggagttcagcgctgggggcgagctgggtctggagctggcctctgatgggggcgctgtggaggagggggcccgagcgcccctggagaacggcctcgccctgtcagggctgaatggggctgagatagagggctctgccctgtctggggccccccgggaaaccccctcagagatggccacaaactcactgcccaatggcccggcccttgcagacgggccagccccggtgtccccgctggagccaagccctgagaaagtggccaccatctcccccagacgccatgctatgccaggctctcgccccaggagccgtatccctgtcctgctctctgaggaggacacgggctcggagccctcaggctcactgtcggccaaagagcggtggagcaagcgggctcggccgcagcaggacctggcgcggctggtgatggagaagaggcagggccgcctgctgttgcggctggcctcaggggcctcgtcctcctccagtgaggagcagcgccgtgcctctgagaccctctcaggcacgggctctgaggaggacacgcccgcctctgagccggcagcggccttgcccaggaagagcgggagggcagccgccaccaggagccggattccccgccccattggcctccgcatgcccatgcctgttgcagcccagcagcccgccagcagatcccatggcgcggccccagcattggacacagccatcaccagcaggctccagctgcagacgcccccagggtcggccactgctgctgacctccgccccaaacaacctcctggccgcggcctgggcccagggcgagcccaagccggagccaggcccccagcgccgcgcagcccgcgcctccccgcgtccacatccgccgcgcgcaatgccagcgcgtccccccggagccagtccctgtcccgcagagagagcccctccccctcgcaccaggcccggcccggggtccccccgccccggggcgtcccgccggcccgggcccagcctgatggcaccccctcccccgggggctccaagaaaggacccagagggaaactccaggctcagcgcgcaacaaccaaaggccgggcaggaggcgcggagggccgggctggggccagataatgacgcccgctgctctccgcggtcccccaccctcaccccggccccccacccgcagccggccacactggagcagctcccagcacagccttacgcgcccgacgcgcgccacccgcggccccagctttccgcctgcacccgcgaggacgcgcgcgagcacacgcggcgccccgccaggccttagggcccgtgggggacgcggccccgcgccgcggggagggtctgcctccccttcctcgccctgtgtcctctcatcctcccgccgcccgtcaggccggccagcctcacatcagtctctccgccccggggaaggctcagccacttttcatcgaggactccacttctggggacgcctggttcgttcgcccaccaggcctaggctacgctccatgctcccccagcaatctctgcctacacctcctgcggcgccttgccctcctccgacccctttccagccaaagtccccccaccccttcagagaagcagcctcaaattccagaagtggaggctccagcctccccgcgagggtccagccccacagtcttctgggagccattgtggccagggacggcctctggactgccaggctgggttggggacccagggaacatcggtctactcaggtgtgagggggcaggtctgacctgccccaaagttggctccatcctggacaactcggtgagaggcagtgggcaagtgatcttggagatgggtgggcaggtgattctgtgggcaggggatgtgctcccctgcacctctggggtgcagaaacctcttgcctccagatttgggtggagcctctgtgggaaccataggaagtgtgtgggctgccttcctgggcaagtatttcccagtgggaagttggagggggctttaacaaagttttactccctcccctgttcccctgatctagtgctcaggacccttcaccatcaggaattccttcctgtcatctaacctcagtcctgcctactgcagttccagccaacctgctctttcctgagttcaaagcaggtggagactggctggttaccatctttgcactggcccttcggagattcggggactcagttctggtggggtcaccctccctgtcctcccgcctgtgggagggagggagggctggctcaggcatcgtctcccgcaatgggcagagagagcagagacaggtggaccaacagacagctggcccctggaggcagaaaggcccttctaacttccagattgtatgcttgagtgatgggtccccagcccaagcccactcttccctcagctcacccttcagcctgttccttcttgccctgaccccagcccgtgcagctgctctactccaggaatggatgtggggactcttcctgggttctggctcctgcatagctcaccccacctcatcatgagcctcaactgcctacatctggggcaagcagcacaccggctgcagatgggacagccagccctgcctatctggacaggcccctgcagcctctgtcccctggcctagcctctctgtccttccctgagtcacagagagcaagccaagacatccagggaaagaggaagaaaggccttagtgtgccccagcagtctggctgcgtccagccaccatcacccggaaggatgcccacaaggcagctgaccctgaaagcagcctccccctcatggagagtcagcagcttgggcagccacttccaggccagggtggtggcttctctgcagaccagctgaggggaggactcctgggtggacagcctttgacgtccaccccacgctgatgcagaagctcccagaacactcaggaaacttctccggacagagccctccttgtcaacttgaggccctcccaaggccctctactgccctctgggtccagcagagggagtggaggaagggccactgcctcccacctagagcttctccgaatgacaatcagctcgtgccaggtggggaccaggatatgactcctggtgcccaggccctgggcctgctccttgccaccaaccgaaccgtgaatgtagggcccccagcctcacctctgccccaggaccaacaacaccctggtttggagctgggaggaagaagggggcctgagagagccccaggtccattctacccccagcttcactcagcactggagctggcagagacgcaaaacccagtctgcccttgggattccaaacctccctagggctcccaactgacctcaggcctctgagtcactgaatgtcaccaggagaggtgggggagggaaagtgggccagtggggagggggtcacctaggggactgcctctgtgcctctccccaggaagcatccagggcagaggaagccacatctcccggtgcccccaaccccagctgcagcctcctccccctgagcattcattctctccaccaggcctccaggtcctgagcccttcctctgtaaaagtgtcacaccacctccctcagcacttccccatcacaacaacctatgtcactgactcagatgcagggtctgctcaccccaacacatgccttccctccccagccacaccgtgcacgaagggggcacaggagaggagaggggctgtgccccaggctccccatttcccagctcctcacagaggcctggtttgctcagtcttctgaactccagggaccagccctggtgggcatggggtggggagcagggagttgcccttcccctccctcgggaagccacctaagaatgtttacatgccaaacagaatgtaacacccctccccaagcccttcccagtcactgcatggcctctgcccatcctgcacctgtccaccccaccccaacaccctggaagccactgtcaatgattagatcgggtctcggaagggaagtagccatcacaccattaaaaagcctgtggacctttt

SEQ ID NO: 189398 - DNA, 2449 bp, Homo sapiens
  Payload ID: 17399
  Gene Symbol: TTBK1
  Gene Name: tau tubulin kinase 1
  ENST ID: ENST00000304139
  CDS Start-End: 163-2168
aataaaaggaacgagggtctggcgaagacaggagtgttcctctgaaacctcggggcccctggcaccggagcttagtttctggcggattggaggcagaatgacatttgcactgaagtgctgaaaaagatcgggggcgggggctttggtgagatctacgaggccatggacctgctgaccagggagaatgtggccctcaaggtggagtcagcccagcagcccaagcaggtcctcaagatggaggtggccgtgctcaagaagttgcaagggaaggaccatgtgtgcaggttcattggctgtggcaggaacgagaagtttaactatgtagtgatgcagctccagggccggaacctggccgacctgcgccgtagccagccgcgaggcaccttcacgctgagcaccacattgcggctgggcaagcagatcttggagtccatcgaggccatccactctgtgggcttcctgcaccgtgacatcaagccttcaaactttgccatgggcaggctgccctccacctacaggaagtgctatatgctggacttcgggctggcccggcagtacaccaacaccacgggggatgtgcggccccctcggaatgtggccgggtttcgaggaacggttcgctatgcctcagtcaatgcccacaagaaccgggagatgggccgccacgacgacctgtggtccctcttctacatgctggtggagtttgcagtgggccagctgccctggaggaagatcaaggacaaggaacaggtagggatgatcaaggagaagtatgagcaccggatgctgctgaagcacatgccgtcagagttccacctcttcctggaccacattgccagcctcgactacttcaccaagcccgactaccagttgatcatgtcagtgtttgagaacagcatgaaggagaggggcattgccgagaatgaggcctttgactgggagaaggcaggcaccgatgccctcctgtccacgagcacctctaccccgccccagcagaacacccggcagacggcagccatgtttggggtggtcaatgtgacgccagtgcctggggacctgctccgggagaacaccgaggatgtgctacagggagagcacctgagtgaccaggagaatgcacccccaattctgcccgggaggccctctgaggggctgggccccagtccccaccttgtcccccaccccgggggtcctgaggctgaagtctgggaggagacagatgtcaaccggaacaaactccggatcaacatcggcaaaagcccctgtgtggaggaggaacagagccgaggcatgggggtccccagctccccagtgcgtgcccccccagactcccccacaaccccagtccgttctctgcgctaccggagggtgaacagccctgagtcagaaaggctgtccacggcggacgggcgagtggagctacctgagaggaggtcacggatggatctgcctggctcgccctcgcgccaggcctgctcctctcagccagcccagatgctgtcagtggacacaggccacgctgaccgacaggccagtggccgcatggacgtgtcagcctctgtggagcaggaggccctgagcaacgccttccgctcggtgccgctggctgaggaggaggatttcgacagcaaagagtgggtcatcatcgacaaggagacggagctcaaggacttccctccaggggctgagcccagcacatcgggcaccacggatgaggagcccgaggagctgcggccactgcccgaggagggcgaagagcggcggcggctgggggcagagcccaccgtccggccccggggacgcagcatgcaggcgctggcggaggaggacctgcagcatttgccgccccagcccctgccaccccagctgagccagggcgatggccgttccgagacgtcacagccccccacgcctggcagcccttcccactcacccctgcactcgggaccccgccctcgacggagagagtcggaccccacaggcccacagagacagttggaggaggacagactctcggggcactccctcccgcggtacagccccctgcgacgactggcgtcctccgtgttctcctcctccacgctggagacggagcattaccctcaccccggcggcggcggctcctcgggctcctccggttccctcattcagcgcagccgctcggctgagagcagccctgtgcgggcgccccaccggcgccacgcgcccctcgctgctggcaaccacagactcatgccctcggtgctccgcatctcgcggtcccagctgcagcaggtgtgggcccggttcacccacaagacctaggctgggccccccccctcctggagggggcaggtgggggggggtggggagcaggcagaggaccatggttccttcccaggacgcaataatcacacactcacacatcccatcccaccccatcatgcaatacagcccccctagaacgttg

SEQ ID NO: 189399 - DNA, 10905 bp, Homo sapiens
  Payload ID: 17400
  Gene Symbol: TTBK2
  Gene Name: tau tubulin kinase 2
  Uniprot ID: Q6IQ55
  ENST ID: ENST00000267890
  CDS Start-End: 110-3844
cagagccctcctccagaaacccctgcgtccgccacggcccaggttaaatggaaaccacccttgggaactggatgcctgtgtagctgttctaccatatcagtgtattgcaatgagtgggggaggagagcagctggatatcctgagtgttggaatcctagtgaaagaaagatggaaagtgttgagaaagattgggggtgggggctttggagaaatttacgatgccttggacatgctcaccagggaaaatgttgcactgaaggtggaatcagctcaacaaccaaaacaagttctgaaaatggaagttgctgttttgaaaaagctgcaagggaaagaccatgtttgtagatttattggctgtgggaggaatgatcgattcaactatgtggtcatgcagttgcagggtcggaatctggcagatcttcgccgtagccagtcccgaggcacattcaccattagtaccactctccggctgggtagacagattttggagtctattgaaagcattcattctgtgggattcttgcatcgagacatcaaaccgtcgaacttcgctatgggtcgctttcctagtacatgtaggaaatgttacatgcttgattttggcttggctcgacaatttaccaattcctgtggtgacgtcagaccacctcgagctgtggcaggttttcgagggacagttcgttatgcatcaatcaacgcacatcggaacagggaaatgggaagacatgatgacctttggtccttattctacatgttggtggagtttgtggttggtcagctgccctggagaaaaataaaggacaaggagcaagtaggctctattaaggagagatatgaccacaggctcatgttgaaacatctccctccagaattcagcatctttctagaccatatctcttctttggattattttacaaaaccagactaccagcttcttacatccgtgtttgacaatagcatcaagacttttggagtaattgagagtgacccttttgactgggagaagactggaaatgatggctccctaacaaccaccactacttctaccacccctcagttgcacactcgcttgacccctgctgcaattggaattgccaatgctactcccatccctggagacttgcttcgagaaaatacagatgaggtatttccagatgaacagcttagcgatggagaaaatggcatccctgttggtgtgtcaccagataaattgcctggatctctgggacacccccgtccccaggagaaggatgtttgggaagagatggatgccaacaaaaacaagataaagcttggaatttgtaaggctgctactgaagaggagaacagccatggccaggcaaatggtcttctcaatgctccaagccttgggtcaccaattcgtgtccgctcagagattactcagccagacagagatattccactggtgcgaaagttacgttccattcacagctttgagctggaaaaacgtctgaccctggagccaaagccagacactgacaagttccttgagacctgcctggagaaaatgcagaaagataccagtgcaggaaaagaatctattctccctgctctgctgcataagccttgcgttcctgctgtgtcccgtactgaccacatctggcactatgatgaagaatatcttccagatgcctccaagcctgcttctgccaacacccctgagcaggcagatggtggtggcagcaatggatttatagctgttaacctgagctcttgcaagcaagaaattgattccaaagaatgggtgattgtggacaaggagcaggaccttcaggattttaggacaaatgaggctgtaggacataaaacaactggaagtccttctgatgaggagcctgaagtacttcaagtcctggaggcatcacctcaagatgaaaagctccagttaggtccttgggcagaaaatgatcatttaaagaaggaaacctcaggtgtggtcttagcactttctgcagagggtcctcctactgctgcttcagaacaatatacagataggctggaactccagcctggagctgctagtcagtttattgcagcgacgcccacaagtctaatggaggcgcaggcagaaggaccccttacagcgattacaattcctagaccttctgtggcatctacacagtcaacttcaggaagctttcactgtggtcagcagccagagaagaaagatcttcagcccatggagcccactgtggaactttactctccaagggaaaacttctctggcttggttgtgacagagggtgaacctcctagtggaggaagcagaacagatttggggcttcagatagatcacattggtcatgacatgttacccaacattagagaaagtaacaaatctcaagacctgggaccaaaagaacttcctgatcataatagactggttgtgagagaatttgaaaatctccctggggaaactgaagagaaaagcatccttttagagtcagataatgaagatgagaagttaagtagagggcagcattgtattgagatctcctctctcccaggagatttggtaattgtggaaaaggatcactcagctactactgaacctcttgatgtgacaaaaacacagacttttagtgtggtgccaaatcaagacaaaaataatgagataatgaagcttctgacagttggaacttcagaaatttcttccagagacattgacccacatgttgaaggtcagataggccaagtggcagaaatgcaaaaaaataagatatctaaggatgatgacatcatgagtgaagacttgccaggtcatcaaggagacctctctacttttttgcaccaagagggcaagagagagaaaatcacccctagaaatggagaactatttcattgtgtttcagagaatgaacatggtgccccaacccggaaggatatggttaggtcatcctttgtaactagacacagccgaatccctgttttagcacaagagatagactcaactttggaatcatcctctccagtttctgcaaaagaaaagctcctccaaaagaaagcctatcagccagacctagtcaagcttctggtggaaaaaagacaattcaagtccttccttggcgacctctcaagtgcctctgataaattgctagaggagaaactagctactgttcctgctcccttttgtgaggaggaagtgctcactcccttttcaagactgacagtagattctcacctgagtaggtcagctgaagatagctttctgtcacccatcatctcccagtctagaaagagcaaaattccaaggccagtttcatgggtcaacacagatcaggtcaatagctcaacttcgtctcagttctttcctcggccaccaccaggaaagccacccacgaggcctggagtagaagccaggctacgcagatataaagtcctagggagtagtaactccgactcagaccttttctcccgcctggcccaaattcttcaaaatggatctcagaaaccccggagcactactcagtgcaagagtccaggatctcctcacaatccaaaaacaccacccaagagtccagttgtccctcgcaggagtcccagtgcctctcctcgaagctcatccttgcctcgcacgtctagttcctcaccatctagggctggacggccccaccatgaccagaggagttcgtccccacatctggggagaagcaagtcacctcccagccactcaggatcttcctcctccaggaggtcctgccaacaggagcattgcaaacccagcaagaatggcctgaaaggatccggcagcctccaccaccactcagccagcactaaaaccccccaagggaagagtaagccagccagtaaactcagcagataggagccaggctgcatctctttgaaaggtgtgagatcttcctcctaaacctgatgcatgtgtgtccctgtactttctatgtaaaaaaatcagtgttgatcttctcttgcaaaagaaagtaacatgatcaattatttataagaagacataatacatgataaggaattacctaaggcaggcagcaagtagattaggaatcaatgtctttgtacaagaaggaaaaatagagcaaaaatccaagggggagaaactcattaaaatgagctctcattttttaagctgcctttgaaacaaaagagttgaggataggagatagaatggaattttaggggggttgcctaatttttttaagcctcaattcaaagattatatagcaaaagtgaaacttcttgtttgatattttcattcaaaactttcccaccctgaagagtcattgatcagatattagattatataagaagtctgttgccagggagccagtattcatgtatatttggcttgtgtgtttatttcgtgtattgagaatgaacacctttactttgcctcattcctagtaccctccctggagttcagatttttttttaaaattttgtatgtctcgtctgattcaatctctctgcttttattttatggtcctagttgtactatcaaatccaattacttttttttaggtccccctgattttttttttttagagcaagagttcttaacatattacatttttattatgaaaaataagaaagttaggtaaaggaaagaaaagtctaactagagctattttgcaggctttagtgtttagggagagaaagaaagtgtgggttaatagccttcaagatagaagatgccctttcatctctgttaagtgtcctcctttagaaacttgagtagaaggaaaactgaccagagtagactgcttccttaagtcttctgggttccaactgtttgtaatatcagcatccaagatgatacgagggaagcacaatgctttggactgtgatttgagatttagaaataaattagatatattattgaggcttagaatcctcaaactttgtattttatacatttagccaataaggaattaatatctggggaaataaatttaggcaaatatttcttttttaatgttttattacctgcttctcctgtgttttagttcaacatttgggcttcttggcctgattttcatacaatctcaatttacgaagctgtaaagaggaagatatttgttctaatctcactcttctaataggaatcaggcaaatgaaagtctaccagacttttaaaatgggctgtttttatactctctaggtgttttgtgttgtaaagaccttattaaggtcaggtaaattggtctgcttgctgttgaaatttgccttctagcaaacatatgtgctttctgtttgaccttgtgtttgctgccaaacctaatacagttgaattgggaaacaaaaaaaaaagaaaggaatacatttcctccccaagtgaacatcttctaatgctgcatcaaagctgccctgaagctgcactgaacttctcttgttctctttatctgtgttgagctttttaaaaaaacaaactcaaaacactattgaggcatataacgtctcttataagaaatgtagcatagtgtggaatcttaatttctctccagtttcaaacactccagaggaatgcaatagataagacatacttgctgtttatctaaagcaactgtaatattggaagatcagtccttctgtattatattgtataatagttgctataacactacttgcatgtcttcatggtaaattatataaatatttataaatatatagagagacatatccttatatagagtcattctttgtcattctccatttgtaatttcgagatcacagatggcgaaattccttttctattgtgtgcctcatgtacacttgggccttgcctatcttcattttctgaaactatgttcttggcatgtgacacctcagagtcttcttgccttccctgtgtacaatgcaagggtgggcagtatttaacaagccaagataggttatttaattttcatttcaaaaagattttaatagggaaaaaattacagggacatgcttgtaatactggttcagagatttgtcatgttaatcacatagttctctccttatagttagagtggataaactgggatgatgatgagtctgacagatttttaaaacatttcttaaaaattgccattctactttcctcttttcatctcactttttttgcagggggtcgggggaataatgaagaaattgtcatatttctgttgcattagctaaattgtgctaaaagtagctagctttaaatcctgacccctttagtcggaaatatgctagtagtaatcattggaaaagctgatgaagctacaactgtggtacgtgtgtgtgattttatttcttattggcatttctctgctggcagttggaactgacagtgatgggaatgtggcaactgaatgttttctctctttcttggttccttccatttttatctcaacttttctagtgtgttgtccccttttctaaatggcattgacaaactcatcaagatccagagataaacagtccatcgtttaagaatattttattttgcatgtagaggaaagaattaaccaaagacgtttctgctctgatactttctaaagaaaacagactaattatatataagtggtatcaataggtctgcttataagtattgtcctatgtagagatttactttttggtttttacaagcatagtttgcgcttttagatgtctctcaggtgaaaaatagaagttggcagccctgagcaagcacctgtgacacagggatttttattttagttttaaagtatgatacagagaatgaggtttttggtttgatttggtttggttgtgttttttagttctttattttttatttgggggttctcttagtgatggcatatttcaggtttcagtgacatagatcaagtaattttaaaccaatttggttattctatctaagatgagggacatggctattaaggtcaagccaaactatactaaaagtagtatagggcagcagttaaaattatcttttgaaaatcaagtattacctggtttcttctgtcacaacagaatagctggttacctagtcagtcacagttgcccttgccttcccttgttagtccctggaggtacttgagtggaacagaaggtagaattagcaacagctcaatcactttaggtagcatttctcctgaattctgctgccaaatcctcagggtctatggattggttgaaatagtaaaatcacacatagtgatttcttgcacagcgtagaggcgtttaattttagtgtatagtgaacaaagaaggaaaactgggtcatataaaatttaaccttaaaacacagattataaatatctttgaatgttaagccctaggcagacagacactctcattcttaactctggtatgcaagctggccttgctgacagtggcatagttacattaactgttttttaagttgcatgttgtgatgtgaatgttttttgtaaaagttgccaagttaatcgagtcctaaataagtagccaaatggtaactgagacccactgtagacattactcgctttatattatttgctttcaaatactaaaacctcagctgctaattcagcgctctaggtgtacagtgtctccttcccttggctcctagcaatgtagggaacttgaggttcttcagtatcttcagagattccttccaggccacatatttttatgctaatacttctatagttgcattcaatctacaaggagaaagtgtacattggtgcatgttttataaacccagacacagatagctaaaaccataattagtttttctatacccagagctttgaattaaaaacagatgctttttttttccccaagagcagacagttctacattcctaacattaggaattggtgatacgagaagcaggatccagaattcagaatgatttagtgagactcggtgaaaaaaatgcattttcccctggctgtttgaaaatttacttatttgcagataagtctagatttagtcttggagatcaaagtcttttatattttaaaaacttattctttatattgatcaaacatggcatatgttagagaaccacttcttctgtcatgtttatgtattttggaattaagttgtttgcattcactttcaaaatctgcccatttctgtttatgtgcacttaccacagatgtgtcgggactttgcctcaggggagaggtactttagcacctgtgtcactgaggagatggagtggttgacaagtactgttgcgctgtgtaacttggggtttggccctgtggacaatatattagcagaatgataccacacaaaagtattacaggattaaggcatgtaacttctatggtagtccttatgtatcagcgtatacccaagttcagaaaccacaggtgcatttttagacctttacttagagaactaaaggcagttccaaccatcagcccatatggcgggattaatgcatgaaaaccctcagagggtgttgggacatcctacttccctgtcctcacccagtggaactctggtgtgtgccttgaggataaggaagtagagtggaaactcatcctatcattgagtattctcaatattttggccttccctctggaattatgagaaatttaacaaagtctcaggaacctttagaatccattgtccaacactgctagaaaaactgtaggaggtacatggagaattcctatagttcttaggtaagtgcaagacatggcacagggatccctatccacataaaggggaatctggatgctgcacacctcaattctgagaaatccctgactgaacttggaattatgacagtaaagttttcgtcctttagttttctagagcagctcacagaaattttaaaaagtaaaacaaggccaggcgcagtggctcatgcctgtaatcccagctctttgggaggctgaggcgggcagatcacgaggtgaggagatcgagaccatcctggctaacagggtgaaaccccgtctctactgaaaatacaaaaaattagctgggcatggtggcgggcgcctgtagtcccagatgctcaggaggctgaggcaggagaatcgcttgaacctgggaggcagaagattacagtaagccaagatcgccccactgcactccagcctgggcgacagagtgagactccgtctcaaaaaaaaaaaaaaaaaaaagtaaaacaaaaataaagtctatgcccattaagacgtcttctaattcagttgtgattgtctgctcctacttaaaaaaatatttaagcttgatgtttaattattccctttcagcaaatttggatcagaaaattaaagtatgtgacaagatcaggtcaccttgaatttccacacaatctcaagacactgaatagcaaaaaagtaacattacacagtaatgattaggatatttccttagactttgctggatctttggtcttaaggtaacatgtaaaagtagtgaagcctttcctttcatggccctgtgcaatgtaacggttttctgcctcctcttcagctggaagcgttagtggtagtatgggcacagaatatatgtacactggcgatgctgaccatgcctcccaggtaccctggctctgggttccttgacctagggaacaagattggatgaggcagatctttgagcccatgtgactatagaatttgctgatgatataattttacaataacaatggataggaattttacctctctttttattagtttaatattatttaatattatgtacataagtgttcactcgcctaattaaaaacattgagtaaaccaagtttttatatagactacccttgccatatgatgctctttttctctaataatatgcagtttaaatcctgaggaatcaatgcccagcatttcaccacatctgaactctgtgtgggcattcttcactcgcctacaaggggtaaacaaggctaccagaacttgaatttgacttatagggagctacccaggaaggggaaagcccttgggactttttccaaaacaatcttctatttgaactgttcatcagccaaagtagtccactgaggtgacaaagctttcagaaatacaaagatgggaagataaaggtaacactggcccacttggggctttgacattggattgggtggactgaataaacacagcctaggtggcctgggcttgagcctcacttacttctccttgatacatagttcctggtctaccttctgaccctttttctaaaatagccagtgtctatttcactaggccatttacttacaagttcccagcttttagggaaaaaagagggaggggggagcatctagttttgaattagatatacatcttagaagtaatgagctattggcagctgttaaatcagattcagccacaaaccagaattctttcttgttgaacaagaccaatgagttagatgactttaataattccacttttctctccctctcttctcctcttcctgaaatcagagagatgagaaactactctttgaaatacctccagaggcgttttattgtgttcctttcccctccaagcagctccctttatacaattttgctcaggcaaccaaggacagagtatcggcagaaacatggagtgcttttgtataggccacctgtacataaaagtgtaattatttatttaattttcccatttgtatcatattaaagctttgtacagtgttttaagttctgttttaaaattattttgtattttatttttataacctagtaataaaatattcattccgcatgcaaaatctagttctgtttgtgtgatggtctggatttcaaaagtggaaaatatttttctaatttaataaagttattgaatacaccagatgttacaagatcaacggggagcagatagtgttactgtaaatgcagtaccacatctagaagttccctagaaaaagcagcccaggactgaatagaagctaggtgttaagtgtccctgcagttaggagatgttttcctgtaataaaattaaaatattaaaa

SEQ ID NO: 189400 - DNA, 520 bp, Homo sapiens
  Payload ID: 17400
  Gene Symbol: TTBK2
  Gene Name: tau tubulin kinase 2
  ENST ID: ENST00000566931
  CDS Start-End: 269-520
ccgccagtaaacgcggacggtaccccaggggactacccagccggccggccctggaagccgcgctcgggtcccgccgcagtcggcggtgggggatgggcaggcagtggcggtcccgcctgccgagggttaacccccgccggtcccggtcctgagctggaccagagccctcctccagaaacccctgcgtccgccacggcccaggttaaatggaaaccacccttgggaactggatgcctgtgtagctgttctaccatatcagtgtattgcaatgagtgggggaggagagcagctggatatcctgagtgttggaatcctagtgaaagaaagatggaaagtgggaaagaccatgtttgtagatttattggctgtgggaggaatgatcgattcaactatgtggtcatgcagttgcagggtcggaatctggcagatcttcgccgtagccagtcccgaggcacattcaccattagtaccactctccggctgggtagacagattttggagtctattgaaagcattcatt

SEQ ID NO: 189401 - DNA, 743 bp, Homo sapiens
  Payload ID: 17400
  Gene Symbol: TTBK2
  Gene Name: tau tubulin kinase 2
  ENST ID: ENST00000564431
  CDS Start-End: 392-743
ggcgatgggagcggtggggacgaggcggcggcggcggcaggagggggagcaggtgctggcacaagagcagcggcttgggggagccggcagcagcagtaacagcagcagcagccgccgccgccgccgccagtaaacgcggacggtaccccaggggactacccagccggccggccctggaagccgcgctcgggtcccgccgcagtcggcggtgggggatgggcaggcagtggcggtcccgcctgccgagggttaacccccgccggtcccggtcctgagctggaccagagccctcctccagaaacccctgcgtccgccacggcccaggttaaatggaaaccacccttgggaactggatgcctgtgtagctgttctaccatatcagtgtattgcaatgagtgggggaggagagcagctggatatcctgagtgttggaatcctagtgaaagaaagatggaaagtgggaaaatgttgcactgaaggtggaatcagctcaacaaccaaaacaagttctgaaaatggaagttgctgttttgaaaaagctgcaagggtcggaatctggcagatcttcgccgtagccagtcccgaggcacattcaccattagtaccactctccggctgggtagacagattttggagtctattgaaagcattcattctgtgggattcttgcatcgagacatcaaaccgtcgaacttcgctatgggtcgctttcctagtacatgtaggaaatgttacatgcttga

SEQ ID NO: 189402 - DNA, 1961 bp, Homo sapiens
  Payload ID: 17400
  Gene Symbol: TTBK2
  Gene Name: tau tubulin kinase 2
  Uniprot ID: Q6IQ55
  ENST ID: ENST00000567840
  CDS Start-End: 440-1876
agaataacgtcgggtcgggtcagcgggctctgcagtagtcgccgcagcggcgatgggagcggtggggacgaggcggcggcggcggcaggagggggagcaggtgctggcacaagagcagcggcttgggggagccggcagcagcagtaacagcagcagcagccgccgccgccgccgccagtaaacgcggacggtaccccaggggactacccagccggccggccctggaagccgcgctcgggtcccgccgcagtcggcggtgggggatgggcaggcagtggcggtcccgcctgccgagggttaacccccgccggtcccggtcctgagctggaccagagccctcctccagaaacccctgcgtccgccacggcccaggttaaatggaaaccacccttgggaactggatgcctgtgtagctgttctaccatatcagtgtattgcaatgagtgggggaggagagcagctggatatcctgagtgttggaatcctagtgaaagaaagatggaaagtgttgagaaagattgggggtgggggctttggagaaatttacgatgccttggacatgctcaccagggaaaatgttgcactgaaggtggaatcagctcaacaaccaaaacaagttctgaaaatggaagttgctgttttgaaaaagctgcaagggaaagaccatgtttgtagatttattggctgtgggaggaatgatcgattcaactatgtggtcatgcagttgcagggtcggaatctggcagatcttcgccgtagccagtcccgaggcacattcaccattagtaccactctccggctgggtagacagattttggagtctattgaaagcattcattctgtgggattcttgcatcgagacatcaaaccgtcgaacttcgctatgggtcgctttcctagtacatgtaggaaatgttacatgcttgattttggcttggctcgacaatttaccaattcctgtggtgacgtcagaccacctcgagctgtggcaggttttcgagggacagttcgttatgcatcaatcaacgcacatcggaacagggaaatgggaagacatgatgacctttggtccttattctacatgttggtggagtttgtggttggtcagctgccctggagaaaaataaaggacaaggagcaagtaggctctattaaggagagatatgaccacaggctcatgttgaaacatctccctccagaattcagcatctttctagaccatatctcttctttggattattttacaaaaccagactaccagcttcttacatccgtgtttgacaatagcatcaagacttttggagtaattgagagtgacccttttgactgggagaagactggaaatgatggctccctaacaaccaccactacttctaccacccctcagttgcacactcgcttgacccctgctgcaattggaattgccaatgctactcccatccctggagacttgcttcgagaaaatacagatgaggtatttccagatgaacagcttagcgatggagaaaatggcatccctgttggtgtgtcaccagataaattgcctggatctctgggacacccccgtccccaggagaaggatgtttgggaagagatggatgccaacaaaaacaagataaagcttggaatttgtaaggctgctactgaagaggagaacagccatggccaggcaaatggtcttctcaatgctccaagccttgggtcaccaattcgtgtccgctcagagattactcagccagacagagatattccactggtgcgaaagttacgttccattcacagctttgagctggaaaaacgtctgaccctggagccaaagccagacactgacaagttccttgagacctggtataaaatagtgtatttttctttttaaagcttctaaggtaccattattattgttgtcattgttgttattattattgtatatttctgttacataaagtctttcaaataagaaa

SEQ ID NO: 189403 - DNA, 556 bp, Homo sapiens
  Payload ID: 17400
  Gene Symbol: TTBK2
  Gene Name: tau tubulin kinase 2
  ENST ID: ENST00000562880
  CDS Start-End: 128-556
ttgaactcctggcctcaggcagtcttcccacctcaacttcccaaagttctgggattacaggttaaatggaaaccacccttgggaactggatgcctgtgtagctgttctaccatatcagtgtattgcaatgagtgggggaggagagcagctggatatcctgagtgttggaatcctagtgaaagaaagatggaaagtgttgagaaagattgggggtgggggctttggagaaatttacgatgccttggacatgctcaccagggaaaatgttgcactgaaggtggaatcagctcaacaaccaaaacaagttctgaaaatggaagttgctgttttgaaaaagctgcaagggaaagaccatgtttgtagatttattggctgtgggaggaatgatcgattcaactatgtggtcatgcagttgcagggtcggaatctggcagatcttcgccgtagccagtcccgaggcacattcaccattagtaccactctccggctgggtagacagattttggagtctattgaaagcattcattctgtgggattcttgcatcgagacatcaaa

SEQ ID NO: 189404 - DNA, 1777 bp, Homo sapiens
  Payload ID: 17400
  Gene Symbol: TTBK2
  Gene Name: tau tubulin kinase 2
  ENST ID: ENST00000567274
  CDS Start-End: 393-1724
cggcgatgggagcggtggggacgaggcggcggcggcggcaggagggggagcaggtgctggcacaagagcagcggcttgggggagccggcagcagcagtaacagcagcagcagccgccgccgccgccgccagtaaacgcggacggtaccccaggggactacccagccggccggccctggaagccgcgctcgggtcccgccgcagtcggcggtgggggatgggcaggcagtggcggtcccgcctgccgagggttaacccccgccggtcccggtcctgagctggaccagagccctcctccagaaacccctgcgtccgccacggcccaggttaaatggaaaccacccttgggaactggatgcctgtgtagctgttctaccatatcagtgtattgcaatgagtgggggaggagagcagctggatatcctgagtgttggaatcctagtgaaagaaagatggaaagtgttgagaaagattgggggtgggggctttggagaaatttacgatgccttggacatgctcaccagggaaaatgttgcactgaaggtggaatcagctcaacaaccaaaacaagttctgaaaatggaagttgctgttttgaaaaagctgcaagggaaagaccatgtttgtagatttattggctgtgggaggaatgatcgattcaactatgtggtcatgcagttgcagggtcggaatctggcagatcttcgccgtagccagtcccgaggcacattcaccattagtaccactctccggctgggtagacagattttggagtctattgaaagcattcattctgtgggattcttgcatcgagacatcaaaccgcctcgagctgtggcaggttttcgagggacagttcgttatgcatcaatcaacgcacatcggaacagggaaatgggaagacatgatgacctttggtccttattctacatgttggtggagtttgtggttggtcagctgccctggagaaaaataaaggacaaggagcaagtaggctctattaaggagagatatgaccacaggctcatgttgaaacatctccctccagaattcagcatctttctagaccatatctcttctttggattattttacaaaaccagactaccagcttcttacatccgtgtttgacaatagcatcaagacttttggagtaattgagagtgacccttttgactgggagaagactggaaatgatggctccctaacaaccaccactacttctaccacccctcagttgcacactcgcttgacccctgctgcaattggaattgccaatgctactcccatccctggagacttgcttcgagaaaatacagatgaggtatttccagatgaacagcttagcgatggagaaaatggcatccctgttggtgtgtcaccagataaattgcctggatctctgggacacccccgtccccaggagaaggatgtttgggaagagatggatgccaacaaaaacaagataaagcttggaatttgtaaggctgctactgaagaggagaacagccatggccaggcaaatggtcttctcaatgctccaagccttgggtcaccaattcgtgtccgctcagagattactcagccagacagagatattccactggtgcgaaagttacgttccattcacagctttgagctggaaaaacgtctgaccctggagccaaagccagacactgacaagttccttgagacctggtataaaatagtgtatttttctttttaaagcttctaaggtaccattattattgttgtcattgttgttattattattgtata

SEQ ID NO: 189405 - DNA, 6891 bp, Homo sapiens
  Payload ID: 17400
  Gene Symbol: TTBK2
  Gene Name: tau tubulin kinase 2
  ENST ID: ENST00000622375
  CDS Start-End: 499-5448
agaataacgtcgggtcgggtcagcgggctctgcagtagtcgccgcagcggcgatgggagcggtggggacgaggcggcggcggcggcaggagggggagcaggtgctggcacaagagcagcggcttgggggagccggcagcagcagtaacagcagcagcagccgccgccgccgccgccagtaaacgcggacggtaccccaggggactacccagccggccggccctggaagccgcgctcgggtcccgccgcagtcggcggtgggggatgggcaggcagtggcggtcccgcctgccgagggttaacccccgccggtcccggtcctgagctggaccagagccctcctccagaaacccctgcgtccgccacggcccaggttaaatggaaaccacccttgggaactggatgcctgtgtagctgttctaccatatcagtgtattgcaatgagtgggggaggagagcagctggatatcctgagtgttggaatcctagtgaaagaaagatggaaagtgttgagaaagattgggggtgggggctttggagaaatttacgatgccttggacatgctcaccagggaaaatgttgcactgaaggtggaatcagctcaacaaccaaaacaagttctgaaaatggaagttgctgttttgaaaaagctgcaaggaaagaccatgtttgtagatttattggctgtgggaggaatgatcgattcaactatgtggtcatgcagttgcagggtcggaatctggcagatcttcgccgtagccagtcccgaggcacattcaccattagtaccactctccggctgggtagacagattttggagtctattgaaagcattcattctgtgggattcttgcatcgagacatcaaaccgtcgaacttcgctatgggtcgctttcctagtacatgtaggaaatgttacatgcttgattttggcttggctcgacaatttaccaattcctgtggtgacgtcagaccacctcgagctgtggcaggttttcgagggacagttcgttatgcatcaatcaacgcacatcggaacagggaaatgggaagacatgatgacctttggtccttattctacatgttggtggagtttgtggttggtcagctgccctggagaaaaataaaggacaaggagcaagtaggctctattaaggagagatatgaccacaggctcatgttgaaacatctccctccagaattcagcatctttctagaccatatctcttctttggattattttacaaaaccagactaccagatgtccatcagggtgacccggaagtcctacaaggtgtccacctctggcccccaggcctttaacagcctctcctacacgagtgggcctggtgcctgcatcagctcctcgagcttctcccgaatgggcagcagcagcttccggggtggcctgggtgcaggatatggtggggccagtggaggcatcaccaccatcactgtcaaccaaagcctgctgagccctcttaacctggaggtggaccccaacatccaggccgtgcgcacccaggaggagaagcagatcaagaccctcaacaacaagtttttctccttcatagacaaggtacggttcctggagcagcagaacaagatgcttgagaccaagtggagcctcgtgcagcagcagaagatggctcggagcaacatggacaacatgttcgagagctacatcaacaaccttaagtggcagctggagactctgggccaggagaagctgaagctggaggcggagcttggcaacatgcatgggctggtggaggacttcaggaacaagtatgaggttgagatcagtaaatgtacagagatggagaatgaatttgtgctcatcaaggagtatgtagatgaagcttacatgaacaagatggagctggagtcttccctgaaagagctgactgccaagatcagcttcctcaggcagctgtatgaagaggagatcgggagctgcagtcccagatctcggatacatctgtggtgctgttcatggacaacagccgcttcctggacatggacagcatcatccctgaggtcaaggccagagggcttccctggaggctgccacgcagataccgagcagcgtggggagctagccattaaggatgccaatgccaagctgtctgagctggaggccgccctgcagctagccagtcaagacatggcgcggcagctgcgtgagtaccaggagctgatgaacgtcaagctggccctggatatcaagatcgccacctacaggaagctgttggagggcgaggagagctggctggagtctgggatgcagaacatgagtatccatatgaagaccaccagcagctatgcaggtggtcagagcttggcctatgggggcctcacaagccctggcctcagctacggcctgggctccagctttggctctggcatgggctccagctccttcagccacaccagctcctccagggccgtggtcatgaagaagatcgaaacccgtgatgggaagctagtgtctgagtcctccaacgtcctgcccaatttgagaattactgccacacttcttacatccgtgtttgacaatagcatcaagacttttggagtaattgagagtgacccttttgactgggagaagactggaaatgatggctccctaacaaccaccactacttctaccacccctcagttgcacactcgcttgacccctgctgcaattggaattgccaatgctactcccatccctggagacttgcttcgagaaaatacagatgaggtatttccagatgaacagcttagcgatggagaaaatggcatccctgttggtgtgtcaccagataaattgcctggatctctgggacacccccgtccccaggagaaggatgtttgggaagagatggatgccaacaaaaacaagataaagcttggaatttgtaaggctgctactgaagaggagaacagccatggccaggcaaatggtcttctcaatgctccaagccttgggtcaccaattcgtgtccgctcagagattactcagccagacagagatattccactggtgcgaaagttacgttccattcacagctttgagctggaaaaacgtctgaccctggagccaaagccagacactgacaagttccttgagacctgcctggagaaaatgcagaaagataccagtgcaggaaaagaatctattctccctgctctgctgcataagccttgcgttcctgctgtgtcccgtactgaccacatctggcactatgatgaagaatatcttccagatgcctccaagcctgcttctgccaacacccctgagcaggcagatggtggtggcagcaatggatttatagctgttaacctgagctcttgcaagcaagaaattgattccaaagaatgggtgattgtggacaaggagcaggaccttcaggattttaggacaaatgaggctgtaggacataaaacaactggaagtccttctgatgaggagcctgaagtacttcaagtcctggaggcatcacctcaagatgaaaagctccagttaggtccttgggcagaaaatgatcatttaaagaaggaaacctcaggtgtggtcttagcactttctgcagagggtcctcctactgctgcttcagaacaatatacagataggctggaactccagcctggagctgctagtcagtttattgcagcgacgcccacaagtctaatggaggcgcaggcagaaggaccccttacagcgattacaattcctagaccttctgtggcatctacacagtcaacttcaggaagctttcactgtggtcagcagccagagaagaaagatcttcagcccatggagcccactgtggaactttactctccaagggaaaacttctctggcttggttgtgacagagggtgaacctcctagtggaggaagcagaacagatttggggcttcagatagatcacattggtcatgacatgttacccaacattagagaaagtaacaaatctcaagacctgggaccaaaagaacttcctgatcataatagactggttgtgagagaatttgaaaatctccctggggaaactgaagagaaaagcatccttttagagtcagataatgaagatgagaagttaagtagagggcagcattgtattgagatctcctctctcccaggagatttggtaattgtggaaaaggatcactcagctactactgaacctcttgatgtgacaaaaacacagacttttagtgtggtgccaaatcaagacaaaaataatgagataatgaagcttctgacagttggaacttcagaaatttcttccagagacattgacccacatgttgaaggtcagataggccaagtggcagaaatgcaaaaaaataagatatctaaggatgatgacatcatgagtgaagacttgccaggtcatcaaggagacctctctacttttttgcaccaagagggcaagagagagaaaatcacccctagaaatggagaactatttcattgtgtttcagagaatgaacatggtgccccaacccggaaggatatggttaggtcatcctttgtaactagacacagccgaatccctgttttagcacaagagatagactcaactttggaatcatcctctccagtttctgcaaaagaaaagctcctccaaaagaaagcctatcagccagacctagtcaagcttctggtggaaaaaagacaattcaagtccttccttggcgacctctcaagtgcctctgataaattgctagaggagaaactagctactgttcctgctcccttttgtgaggaggaagtgctcactcccttttcaagactgacagtagattctcacctgagtaggtcagctgaagatagctttctgtcacccatcatctcccagtctagaaagagcaaaattccaaggccagtttcatgggtcaacacagatcaggtcaatagctcaacttcgtctcagttctttcctcggccaccaccaggaaagccacccacgaggcctggagtagaagccaggctacgcagatataaagtcctagggagtagtaactccgactcagaccttttctcccgcctggcccaaattcttcaaaatggatctcagaaaccccggagcactactcagtgcaagagtccaggatctcctcacaatccaaaaacaccacccaagagtccagttgtccctcgcaggagtcccagtgcctctcctcgaagctcatccttgcctcgcacgtctagttcctcaccatctagggctggacggccccaccatgaccagaggagttcgtccccacatctggggagaagcaagtcacctcccagccactcaggatcttcctcctccaggaggtcctgccaacaggagcattgcaaacccagcaagaatggcctgaaaggatccggcagcctccaccaccactcagccagcactaaaaccccccaagggaagagtaagccagccagtaaactcagcagataggagccaggctgcatctctttgaaaggtgtgagatcttcctcctaaacctgatgcatgtgtgtccctgtactttctatgtaaaaaaatcagtgttgatcttctcttgcaaaagaaagtaacatgatcaattatttataagaagacataatacatgataaggaattacctaaggcaggcagcaagtagattaggaatcaatgtctttgtacaagaaggaaaaatagagcaaaaatccaagggggagaaactcattaaaatgagctctcattttttaagctgcctttgaaacaaaagagttgaggataggagatagaatggaattttaggggggttgcctaatttttttaagcctcaattcaaagattatatagcaaaagtgaaacttcttgtttgatattttcattcaaaactttcccaccctgaagagtcattgatcagatattagattatataagaagtctgttgccagggagccagtattcatgtatatttggcttgtgtgtttatttcgtgtattgagaatgaacacctttactttgcctcattcctagtaccctccctggagttcagatttttttttaaaattttgtatgtctcgtctgattcaatctctctgcttttattttatggtcctagttgtactatcaaatccaattacttttttttaggtccccctgattttttttttttagagcaagagttcttaacatattacatttttattatgaaaaataagaaagttaggtaaaggaaagaaaagtctaactagagctattttgcaggctttagtgtttagggagagaaagaaagtgtgggttaatagccttcaagatagaagatgccctttcatctctgttaagtgtcctcctttagaaacttgagtagaaggaaaactgaccagagtagactgcttccttaagtcttctgggttccaactgtttgtaatatcagcatccaagatgatacgagggaagcacaatgctttggactgtgatttgagatttagaaataaattagatatattattgaggcttagaatcctcaaactttgtattttatacatttagccaataaggaattaatatctggggaaataaatttaggcaaatatttcttttttaatgttttattacctgcttctcctgtgttttagttcaacatttgggcttcttggcctgattttcatacaatctcaatttacgaagctgtaaagaggaagatatttgttctaatctcactcttctaataggaatcaggcaaatgaaagtctaccagacttttaaaatgggctgtttttatactctctaggtgttttgtgttgtaaagaccttattaaggtcaggtaaattggtctgcttgctgttgaaatttgccttctagcaaacatatgtgctttctgtttgaccttgtgtttgctgccaaacctaatacagttgaattggg

SEQ ID NO: 189406 - DNA, 2478 bp, Homo sapiens
  Payload ID: 17401
  Gene Symbol: TAX1BP1
  Gene Name: Tax1 (human T-cell leukemia virus type I) binding protein 1
  Uniprot ID: Q86VP1
  ENST ID: ENST00000265393
  CDS Start-End: 183-2426
ggaagagaccgccccgtgggcggaagtgacgcaaggcctactgtcggctgggaggggaggtgtagccggtctttgggggtaggcggtagtggcggaagaggttcggcggctgatggcggatcaggatcggaagcctgcgtaactttctcccttgatccgggagtctttccactggattcacaatgacatcctttcaagaagtcccattgcagacttccaactttgcccatgtcatctttcaaaatgtggccaagagttaccttcctaatgcacacctggaatgtcattacaccttaactccatatattcatccacatccaaaagattgggttggtatattcaaggttggatggagtactgctcgtgattattacacgtttttatggtcccctatgcctgaacattatgtggaaggatcaacagtcaattgtgtactagcattccaaggatattaccttccaaatgatgatggagaattttatcagttctgttacgttacccataagggtgaaattcgtggagcaagtacacctttccagtttcgagcttcttctccagttgaagagctgcttactatggaagatgaaggaaattctgacatgttagtggtgaccacaaaagcaggccttcttgagttgaaaattgagaaaaccatgaaagaaaaagaagaactgttaaagttaattgccgttctggaaaaagaaacagcacaacttcgagaacaagttgggagaatggaaagagaacttaaccatgagaaagaaagatgtgaccaactgcaagcagaacaaaagggtcttactgaagtaacacaaagcttaaaaatggaaaatgaagagtttaagaagaggttcagtgatgctacatccaaagcccatcagcttgaggaagatattgtgtcagtaacacataaagcaattgaaaaagaaaccgaattagacagtttaaaggacaaactcaagaaggcacaacatgaaagagaacaacttgaatgtcagttgaagacagagaaggatgaaaaggaactttataaggtacatttgaagaatacagaaatagaaaataccaagcttatgtcagaggtccagactttaaaaaatttagatgggaacaaagaaagcgtgattactcatttcaaagaagagattggcaggctgcagttatgtttggctgaaaaggaaaatctgcaaagaactttcctgcttacaacctcaagtaaagaagatacttgttttttaaaggagcaacttcgtaaagcagaggaacaggttcaggcaactcggcaagaagttgtctttctggctaaagaactcagtgatgctgtcaacgtacgagacagaacgatggcagacctgcatactgcacgcttggaaaacgagaaagtgaaaaagcagttagctgatgcagtggcagaacttaaactaaatgctatgaaaaaagatcaggacaagactgatacactggaacacgaactaagaagagaagttgaagatctgaaactccgtcttcagatggctgcagaccattataaagaaaaatttaaggaatgccaaaggctccaaaaacaaataaacaaactttcagatcaatcagctaataataataatgtcttcacaaagaaaacggggaatcagcagaaagtgaatgatgcttcagtaaacacagacccagccacttctgcctctactgtagatgtaaagccatcaccttctgcagcagaggcagattttgacatagtaacaaaggggcaagtctgtgaaatgaccaaagaaattgctgacaaaacagaaaagtataataaatgtaaacaactcttgcaggatgagaaagcaaaatgcaataaatatgctgatgaacttgcaaaaatggagctgaaatggaaagaacaagtgaaaattgctgaaaatgtaaaacttgaactagctgaagtacaggacaattataaagaacttaaaaggagtctagaaaatccagcagaaaggaaaatggaagatggagcagatggtgctttttacccagatgaaatacaaaggccacctgtcagagtcccctcttggggactggaagacaatgttgtctgcagccagcctgctcgaaactttagtcggcctgatggcttagaggactctgaggatagcaaagaagatgagaatgtgcctactgctcctgatcctccaagtcaacatttacgtgggcatgggacaggcttttgctttgattccagctttgatgttcacaagaagtgtcccctctgtgagttaatgtttcctcctaactatgatcagagcaaatttgaagaacatgttgaaagtcactggaaggtgtgcccgatgtgcagcgagcagttccctcctgactatgaccagcaggtgtttgaaaggcatgtgcagacccattttgatcagaatgttctaaattttgactagttactttttattatgagttaatatagtttagcagtaaaaaaaaaaaaaaaaa

SEQ ID NO: 189407 - DNA, 2892 bp, Homo sapiens
  Payload ID: 17401
  Gene Symbol: TAX1BP1
  Gene Name: Tax1 (human T-cell leukemia virus type I) binding protein 1
  Uniprot ID: Q86VP1
  ENST ID: ENST00000396319
  CDS Start-End: 89-2458
gaagaggttcggcggctgatggcggatcaggatcggaagcctgcgtaactttctcccttgatccgggagtctttccactggattcacaatgacatcctttcaagaagtcccattgcagacttccaactttgcccatgtcatctttcaaaatgtggccaagagttaccttcctaatgcacacctggaatgtcattacaccttaactccatatattcatccacatccaaaagattgggttggtatattcaaggttggatggagtactgctcgtgattattacacgtttttatggtcccctatgcctgaacattatgtggaaggatcaacagtcaattgtgtactagcattccaaggatattaccttccaaatgatgatggagaattttatcagttctgttacgttacccataagggtgaaattcgtggagcaagtacacctttccagtttcgagcttcttctccagttgaagagctgcttactatggaagatgaaggaaattctgacatgttagtggtgaccacaaaagcaggccttcttgagttgaaaattgagaaaaccatgaaagaaaaagaagaactgttaaagttaattgccgttctggaaaaagaaacagcacaacttcgagaacaagttgggagaatggaaagagaacttaaccatgagaaagaaagatgtgaccaactgcaagcagaacaaaagggtcttactgaagtaacacaaagcttaaaaatggaaaatgaagagtttaagaagaggttcagtgatgctacatccaaagcccatcagcttgaggaagatattgtgtcagtaacacataaagcaattgaaaaagaaaccgaattagacagtttaaaggacaaactcaagaaggcacaacatgaaagagaacaacttgaatgtcagttgaagacagagaaggatgaaaaggaactttataaggtacatttgaagaatacagaaatagaaaataccaagcttatgtcagaggtccagactttaaaaaatttagatgggaacaaagaaagcgtgattactcatttcaaagaagagattggcaggctgcagttatgtttggctgaaaaggaaaatctgcaaagaactttcctgcttacaacctcaagtaaagaagatacttgttttttaaaggagcaacttcgtaaagcagaggaacaggttcaggcaactcggcaagaagttgtctttctggctaaagaactcagtgatgctgtcaacgtacgagacagaacgatggcagacctgcatactgcacgcttggaaaacgagaaagtgaaaaagcagttagctgatgcagtggcagaacttaaactaaatgctatgaaaaaagatcaggacaagactgatacactggaacacgaactaagaagagaagttgaagatctgaaactccgtcttcagatggctgcagaccattataaagaaaaatttaaggaatgccaaaggctccaaaaacaaataaacaaactttcagatcaatcagctaataataataatgtcttcacaaagaaaacggggaatcagcagaaagtgaatgatgcttcagtaaacacagacccagccacttctgcctctactgtagatgtaaagccatcaccttctgcagcagaggcagattttgacatagtaacaaaggggcaagtctgtgaaatgaccaaagaaattgctgacaaaacagaaaagtataataaatgtaaacaactcttgcaggatgagaaagcaaaatgcaataaatatgctgatgaacttgcaaaaatggagctgaaatggaaagaacaagtgaaaattgctgaaaatgtaaaacttgaactagctgaagtacaggacaattataaagaacttaaaaggagtctagaaaatccagcagaaaggaaaatggaaggtcagaattcccagagtcctcaatgtttcaaaacatgctcagagcaaaatggttatgttctcacattgtcaaatgcacaaccagttctgcaatatggtaatccttatgcatctcaggaaacaagagatggagcagatggtgctttttacccagatgaaatacaaaggccacctgtcagagtcccctcttggggactggaagacaatgttgtctgcagccagcctgctcgaaactttagtcggcctgatggcttagaggactctgaggatagcaaagaagatgagaatgtgcctactgctcctgatcctccaagtcaacatttacgtgggcatgggacaggcttttgctttgattccagctttgatgttcacaagaagtgtcccctctgtgagttaatgtttcctcctaactatgatcagagcaaatttgaagaacatgttgaaagtcactggaaggtgtgcccgatgtgcagcgagcagttccctcctgactatgaccagcaggtgtttgaaaggcatgtgcagacccattttgatcagaatgttctaaattttgactagttactttttattatgagttaatatagtttagcagtaaaaaaaaaaaaaaaaaccacacctaaaatagaccactgaggagaccatagagcggatgctttcatgcaccctttactgcactttctgaccaggagctactttgagtttggtgttactaggatcagggtcagtctttggcttatcaataaattttaatctctgttaatcttacctgctttaaaaaaaagttcttgtgtgttcgtatctttatttattccctagtttgcagaactgtctgaataaaggatacaaggattatttcaatgttactgcactgaaaaacgtgtatgtattagtgtgctagattatttagcagaatattcacaagtttctgttgaccttgttgattgagcatgactactaaatattatgtaataaaaagcatttgtcataacagt

SEQ ID NO: 189408 - DNA, 2629 bp, Homo sapiens
  Payload ID: 17401
  Gene Symbol: TAX1BP1
  Gene Name: Tax1 (human T-cell leukemia virus type I) binding protein 1
  ENST ID: ENST00000409980
  CDS Start-End: 136-2577
ctgggaggggaggtgtagccggtctttgggggtaggcggtagtggcggaagaggttcggcggctgatggcggatcaggatcggaagcctgcgtaactttctcccttgatccgggagtctttccactggattcacaatgacatcctttcaagaagtcccattgcagacttccaactttgcccatgtcatctttcaaaatgtggccaagagttaccttcctaatgcacacctggaatgtcattacaccttaactccatatattcatccacatccaaaagattgggttggtatattcaaggttggatggagtactgctcgtgattattacacgtttttatggtcccctatgcctgaacattatgtggaaggatcaacagtcaattgtgtactagcattccaaggatattaccttccaaatgatgatggagaattttatcagttctgttacgttacccataagggtgaaattcgtggagcaagtacacctttccagtttcgagcttcttctccagttgaagagctgcttactatggaagatgaaggaaattctgacatgttagtggtgaccacaaaagcaggccttcttgagttgaaaattgagaaaaccatgaaagaaaaagaagaactgttaaagttaattgccgttctggaaaaagaaacagcacaacttcgagaacaagttgggagaatggaaagagaacttaaccatgagaaagaaagatgtgaccaactgcaagcagaacaaaagggtcttactgaagtaacacaaagcttaaaaatggaaaatgaagagtttaagaagaggttcagtgatgctacatccaaagcccatcagcttgaggaagatattgtgtcagtaacacataaagcaattgaaaaagaaaccgaattagacagtttaaaggacaaactcaagaaggcacaacatgaaagagaacaacttgaatgtcagttgaagacagagaaggatgaaaaggaactttataaggtacatttgaagaatacagaaatagaaaataccaagcttatgtcagaggtccagactttaaaaaatttagatgggaacaaagaaagcgtgattactcatttcaaagaagagattggcaggctgcagttatgtttggctgaaaaggaaaatctgcaaagaactttcctgcttacaacctcaagtaaagaagatacttgttttttaaaggagcaacttcgtaaagcagaggaacaggttcaggcaactcggcaagaagttgtctttctggctaaagaactcagtgatgctgtcaacgtacgagacagaacgatggcagacctgcatactgcacgcttggaaaacgagaaagtgaaaaagcagttagctgatgcagtggcagaacttaaactaaatgctatgaaaaaagatcaggacaagactgatacactggaacacgaactaagaagagaagttgaagatctgaaactccgtcttcagatggctgcagaccattataaagaaaaatttaaggaatgccaaaggctccaaaaacaaataaacaaactttcagatcaatcagctaataataataatgtcttcacaaagaaaacggggaatcagcagaaagtgaatgatgcttcagtaaacacagacccagccacttctgcctctactgtagatgtaaagccatcaccttctgcagcagaggcagattttgacatagtaacaaaggggcaagtctgtgaaatgaccaaagaaattgctgacaaaacagaaaagtataataaatgtaaacaactcttgcaggatgagaaagcaaaatgcaataaatatgctgatgaacttgcaaaaatggagctgaaatggaaagaacaagtgaaaattgctgaaaatgtaaaacttgaactagctgaagtacaggacaattataaacttcaattggcagagaaagacaaagaaataagtggtctgatttcacatttggaaaacctctccagggagaaggaacttaaaaggagtctagaaaatccagcagaaaggaaaatggaaggtcagaattcccagagtcctcaatgtttcaaaacatgctcagagcaaaatggttatgttctcacattgtcaaatgcacaaccagttctgcaatatggtaatccttatgcatctcaggaaacaagagatggagcagatggtgctttttacccagatgaaatacaaaggccacctgtcagagtcccctcttggggactggaagacaatgttgtctgcagccagcctgctcgaaactttagtcggcctgatggcttagaggactctgaggatagcaaagaagatgagaatgtgcctactgctcctgatcctccaagtcaacatttacgtgggcatgggacaggcttttgctttgattccagctttgatgttcacaagaagtgtcccctctgtgagttaatgtttcctcctaactatgatcagagcaaatttgaagaacatgttgaaagtcactggaaggtgtgcccgatgtgcagcgagcagttccctcctgactatgaccagcaggtgtttgaaaggcatgtgcagacccattttgatcagaatgttctaaattttgactagttactttttattatgagttaatatagtttagcagtaaaaaaaaaaaaaaaaa

SEQ ID NO: 189409 - DNA, 2221 bp, Homo sapiens
  Payload ID: 17401
  Gene Symbol: TAX1BP1
  Gene Name: Tax1 (human T-cell leukemia virus type I) binding protein 1
  ENST ID: ENST00000416801
  CDS Start-End: 131-406
aggggaggtgtagccggtctttgggggtaggcggtagtggcggaagaggttcggcggctgatggcggatcaggatcggaagcctgcgtaactttctcccttgatccgggagtctttccactggattcacaatgacatcctttcaagaagtcccattgcagacttccaactttgcccatgtcatctttcaaaatgtggccaagagttaccttcctaatgcacacctggaatgtcattacaccttaactccatatattcatccacatccaaaagattgggttggtatattcaaggttggatggagtactgctcgtgattattacacgtttttatggtcccctatgcctgaacattatgtggaaggatcaacagtcaattgtgtactagcattccaagttgaaaattgagaaaaccatgaaagaaaaagaagaactgttaaagttaattgccgttctggaaaaagaaacagcacaacttcgagaacaagttgggagaatggaaagagaacttaaccatgagaaagaaagatgtgaccaactgcaagcagaacaaaagggtcttactgaagtaacacaaagcttaaaaatggaaaatgaagagtttaagaagaggttcagtgatgctacatccaaagcccatcagcttgaggaagatattgtgtcagtaacacataaagcaattgaaaaagaaaccgaattagacagtttaaaggacaaactcaagaaggcacaacatgaaagagaacaacttgaatgtcagttgaagacagagaaggatgaaaaggaactttataaggtacatttgaagaatacagaaatagaaaataccaagcttatgtcagaggtccagactttaaaaaatttagatgggaacaaagaaagcgtgattactcatttcaaagaagagattggcaggctgcagttatgtttggctgaaaaggaaaatctgcaaagaactttcctgcttacaacctcaagtaaagaagatacttgttttttaaaggagcaacttcgtaaagcagaggaacaggttcaggcaactcggcaagaagttgtctttctggctaaagaactcagtgatgctgtcaacgtacgagacagaacgatggcagacctgcatactgcacgcttggaaaacgagaaagtgaaaaagcagttagctgatgcagtggcagaacttaaactaaatgctatgaaaaaagatcaggacaagactgatacactggaacacgaactaagaagagaagttgaagatctgaaactccgtcttcagatggctgcagaccattataaagaaaaatttaaggaatgccaaaggctccaaaaacaaataaacaaactttcagatcaatcagctaataataataatgtcttcacaaagaaaacggggaatcagcagaaagtgaatgatgcttcagtaaacacagacccagccacttctgcctctactgtagatgtaaagccatcaccttctgcagcagaggcagattttgacatagtaacaaaggggcaagtctgtgaaatgaccaaagaaattgctgacaaaacagaaaagtataataaatgtaaacaactcttgcaggatgagaaagcaaaatgcaataaatatgctgatgaacttgcaaaaatggagctgaaatggaaagaacaagtgaaaattgctgaaaatgtaaaacttgaactagctgaagtacaggacaattataaagaacttaaaaggagtctagaaaatccagcagaaaggaaaatggaagatggagcagatggtgctttttacccagatgaaatacaaaggccacctgtcagagtcccctcttggggactggaagacaatgttgtctgcagccagcctgctcgaaactttagtcggcctgatggcttagaggactctgaggatagcaaagaagatgagaatgtgcctactgctcctgatcctccaagtcaacatttacgtgggcatgggacaggcttttgctttgattccagctttgatgttcacaagaagtgtcccctctgtgagttaatgtttcctcctaactatgatcagagcaaatttgaagaacatgttgaaagtcactggaaggtgtgcccgatgtgcagcgagcagttccctcctgactatgaccagcaggtgtttgaaaggcatgtgcagacccattttgatcagaatgttctaaattttgactagttactttttattatgagttaatatagtttagcagt

SEQ ID NO: 189410 - DNA, 3174 bp, Homo sapiens
  Payload ID: 17401
  Gene Symbol: TAX1BP1
  Gene Name: Tax1 (human T-cell leukemia virus type I) binding protein 1
  Uniprot ID: Q86VP1
  ENST ID: ENST00000433216
  CDS Start-End: 466-2238
ggaagagaccgccccgtgggcggaagtgacgcaaggcctactgtcggctgggaggggaggtgtagccggtctttgggggtaggcggtagtggcggaagaggttcggcggctgatggcggatcaggatcggaagcctgcgtaactttctcccttgatccgggagtctttccactggattcacaatgacatcctttcaagaagtcccattgcagacttccaactttgcccatgtcatctttcaaaatgtggccaagagttaccttcctaatgcacacctggaatgtcattacaccttaactccatatattcatccacatccaaaagattgggttggtatattcaaggttggatggagtactgctcgtgattattacacgtttttatggtcccctatgcctgaacattatgtggaaggatcaacagtcaattgtgtactagcattccaagttgaaaattgagaaaaccatgaaagaaaaagaagaactgttaaagttaattgccgttctggaaaaagaaacagcacaacttcgagaacaagttgggagaatggaaagagaacttaaccatgagaaagaaagatgtgaccaactgcaagcagaacaaaagggtcttactgaagtaacacaaagcttaaaaatggaaaatgaagagtttaagaagaggttcagtgatgctacatccaaagcccatcagcttgaggaagatattgtgtcagtaacacataaagcaattgaaaaagaaaccgaattagacagtttaaaggacaaactcaagaaggcacaacatgaaagagaacaacttgaatgtcagttgaagacagagaaggatgaaaaggaactttataaggtacatttgaagaatacagaaatagaaaataccaagcttatgtcagaggtccagactttaaaaaatttagatgggaacaaagaaagcgtgattactcatttcaaagaagagattggcaggctgcagttatgtttggctgaaaaggaaaatctgcaaagaactttcctgcttacaacctcaagtaaagaagatacttgttttttaaaggagcaacttcgtaaagcagaggaacaggttcaggcaactcggcaagaagttgtctttctggctaaagaactcagtgatgctgtcaacgtacgagacagaacgatggcagacctgcatactgcacgcttggaaaacgagaaagtgaaaaagcagttagctgatgcagtggcagaacttaaactaaatgctatgaaaaaagatcaggacaagactgatacactggaacacgaactaagaagagaagttgaagatctgaaactccgtcttcagatggctgcagaccattataaagaaaaatttaaggaatgccaaaggctccaaaaacaaataaacaaactttcagatcaatcagctaataataataatgtcttcacaaagaaaacggggaatcagcagaaagtgaatgatgcttcagtaaacacagacccagccacttctgcctctactgtagatgtaaagccatcaccttctgcagcagaggcagattttgacatagtaacaaaggggcaagtctgtgaaatgaccaaagaaattgctgacaaaacagaaaagtataataaatgtaaacaactcttgcaggatgagaaagcaaaatgcaataaatatgctgatgaacttgcaaaaatggagctgaaatggaaagaacaagtgaaaattgctgaaaatgtaaaacttgaactagctgaagtacaggacaattataaagaacttaaaaggagtctagaaaatccagcagaaaggaaaatggaagatggagcagatggtgctttttacccagatgaaatacaaaggccacctgtcagagtcccctcttggggactggaagacaatgttgtctgcagccagcctgctcgaaactttagtcggcctgatggcttagaggactctgaggatagcaaagaagatgagaatgtgcctactgctcctgatcctccaagtcaacatttacgtgggcatgggacaggcttttgctttgattccagctttgatgttcacaagaagtgtcccctctgtgagttaatgtttcctcctaactatgatcagagcaaatttgaagaacatgttgaaagtcactggaaggtgtgcccgatgtgcagcgagcagttccctcctgactatgaccagcaggtgtttgaaaggcatgtgcagacccattttgatcagaatgttctaaattttgactagttactttttattatgagttaatatagtttagcagtaaaaaaaaaaaaaaaaaccacacctaaaatagaccactgaggagaccatagagcggatgctttcatgcaccctttactgcactttctgaccaggagctactttgagtttggtgttactaggatcagggtcagtctttggcttatcaataaattttaatctctgttaatcttacctgctttaaaaaaaagttcttgtgtgttcgtatctttatttattccctagtttgcagaactgtctgaataaaggatacaaggattatttcaatgttactgcactgaaaaacgtgtatgtattagtgtgctagattatttagcagaatattcacaagtttctgttgaccttgttgattgagcatgactactaaatattatgtaataaaaagcatttgtcataacagtcttatgaagtagttcttcgaatatagaaagttctataatttagcccatgaaatgataggtttttaattttcagaaatggagctgcatgtagaatgagatcacatgcttttatatgtgaaatattggttttagcaattaacagaaggcatactttgctaattttatggcaaaattttagaataacctgaatgattatttttaaactatcttgaagttgtatgtatatatctaatgggaaaatggaacaagagatgtcagtataattgttttcctattaaatgatctcataacaggggtgtttgtggcataaaaatcatagaatatatatcagtatcttttttacattttcctgatgagaatataaatttgaaatattctcagtaagtgattaaaagtacaatacataaacccaaatcaaagtaatgtgtttcttcagttatgtctgtgctgtatagaactgtcactaacattaaagaaagaggacacatttttcaagatctgt

SEQ ID NO: 189411 - DNA, 570 bp, Homo sapiens
  Payload ID: 17401
  Gene Symbol: TAX1BP1
  Gene Name: Tax1 (human T-cell leukemia virus type I) binding protein 1
  ENST ID: ENST00000422800
  CDS Start-End: 275-570
aatagaatcagagggcattagaactgaaaagctcctaggagctttcagtgaacaaaacttcatagccaaaaaagcacacgactgggccaggagttcagagacagtcttggtgctcaggggtttgcagccctagccgtgtggtcactcccttgcttctctggctatttccttatctataaaatgagtgggctagtttaggccgactgagacgcagacagggatacggtactgtccatggacctctgagctgccctttccacatcgctgattcacaatgacatcctttcaagaagtcccattgcagacttccaactttgcccatgtcatctttcaaaatgtggccaagagttaccttcctaatgcacacctggaatgtcattacaccttaactccatatattcatccacatccaaaagattgggttggtatattcaaggttggatggagtactgctcgtgattattacacgtttttatggtcccctatgcctgaacattatgtggaaggatcaacagtcaattgtgtactagcattccaaggatattaccttccaaatgatgatggagaatt

SEQ ID NO: 189412 - DNA, 641 bp, Homo sapiens
  Payload ID: 17401
  Gene Symbol: TAX1BP1
  Gene Name: Tax1 (human T-cell leukemia virus type I) binding protein 1
  ENST ID: ENST00000418691
  CDS Start-End: 228-641
acatatcctttctggtgctattgcaaggtttgtcagggttttacggcaacagaagactatgatgaattcgaatgggacacatttgcttctgtggagttacgattcaaactgaatgtccaatataggaaggcaacatatacaacaagcaaaagtgattttagaaataacagaacgcgggagaaaattcacacacggaaaatgatacggataacaaaagcagattcacaatgacatcctttcaagaagtcccattgcagacttccaactttgcccatgtcatctttcaaaatgtggccaagagttaccttcctaatgcacacctggaatgtcattacaccttaactccatatattcatccacatccaaaagattgggttggtatattcaaggttggatggagtactgctcgtgattattacacgtttttatggtcccctatgcctgaacattatgtggaaggatcaacagtcaattgtgtactagcattccaaggatattaccttccaaatgatgatggagaattttatcagttctgttacgttacccataagggtgaaattcgtggagcaagtacacctttccagtttcgagcttcttctccagttgaagagctgcttactatggaagatgaaggaaattct

SEQ ID NO: 189413 - DNA, 1174 bp, Homo sapiens
  Payload ID: 17401
  Gene Symbol: TAX1BP1
  Gene Name: Tax1 (human T-cell leukemia virus type I) binding protein 1
  ENST ID: ENST00000457186
  CDS Start-End: 1-981
gcagaccattataaagaaaaatttaaggaatgccaaaggctccaaaaacaaataaacaaactttcagatcaatcagctaataataataatgtcttcacaaagaaaacggggaatcagcagaaagtgaatgatgcttcagtaaacacagacccagccacttctgcctctactgtagatgtaaagccatcaccttctgcagcagaggcagattttgacatagtaacaaaggggcaagtctgtgaaatgaccaaagaaattgctgacaaaacagaaaagtataataaatgtaaacaactcttgcaggatgagaaagcaaaatgcaataaatatgctgatgaacttgcaaaaatggagctgaaatggaaagaacaagtgaaaattgctgaaaatgtaaaacttgaactagctgaagtacaggacaattataaacttcaattggcagagaaagacaaagaaataagtggtctgatttcacatttggaaaacctctccagggagaaggaacttaaaaggagtctagaaaatccagcagaaaggaaaatggaagatggagcagatggtgctttttacccagatgaaatacaaaggccacctgtcagagtcccctcttggggactggaagacaatgttgtctgcagccagcctgctcgaaactttagtcggcctgatggcttagaggactctgaggatagcaaagaagatgagaatgtgcctactgctcctgatcctccaagtcaacatttacgtgggcatgggacaggcttttgctttgattccagctttgatgttcacaagaagtgtcccctctgtgagttaatgtttcctcctaactatgatcagagcaaatttgaagaacatgttgaaagtcactggaaggtgtgcccgatgtgcagcgagcagttccctcctgactatgaccagcaggtgtttgaaaggcatgtgcagacccattttgatcagaatgttctaaattttgactagttactttttattatgagttaatatagtttagcagtaaaaaaaaaaaaaaaaaccacacctaaaatagaccactgaggagaccatagagcggatgctttcatgcaccctttactgcactttctgaccaggagctactttgagtttggtgttactaggatcagggtcagtctttggcttatcaataaattttaat

SEQ ID NO: 189414 - DNA, 3365 bp, Homo sapiens
  Payload ID: 17401
  Gene Symbol: TAX1BP1
  Gene Name: Tax1 (human T-cell leukemia virus type I) binding protein 1
  Uniprot ID: Q86VP1
  ENST ID: ENST00000543117
  CDS Start-End: 186-2429
acggcaacagaagactatgatgaattcgaatgggacacatttgcttctgtggagttacgattcaaactgaatgtccaatataggaaggcaacatatacaacaagcaaaagtgattttagaaataacagaacgcgggagaaaattcacacacggaaaatgatacggataacaaaagcagattcacaatgacatcctttcaagaagtcccattgcagacttccaactttgcccatgtcatctttcaaaatgtggccaagagttaccttcctaatgcacacctggaatgtcattacaccttaactccatatattcatccacatccaaaagattgggttggtatattcaaggttggatggagtactgctcgtgattattacacgtttttatggtcccctatgcctgaacattatgtggaaggatcaacagtcaattgtgtactagcattccaaggatattaccttccaaatgatgatggagaattttatcagttctgttacgttacccataagggtgaaattcgtggagcaagtacacctttccagtttcgagcttcttctccagttgaagagctgcttactatggaagatgaaggaaattctgacatgttagtggtgaccacaaaagcaggccttcttgagttgaaaattgagaaaaccatgaaagaaaaagaagaactgttaaagttaattgccgttctggaaaaagaaacagcacaacttcgagaacaagttgggagaatggaaagagaacttaaccatgagaaagaaagatgtgaccaactgcaagcagaacaaaagggtcttactgaagtaacacaaagcttaaaaatggaaaatgaagagtttaagaagaggttcagtgatgctacatccaaagcccatcagcttgaggaagatattgtgtcagtaacacataaagcaattgaaaaagaaaccgaattagacagtttaaaggacaaactcaagaaggcacaacatgaaagagaacaacttgaatgtcagttgaagacagagaaggatgaaaaggaactttataaggtacatttgaagaatacagaaatagaaaataccaagcttatgtcagaggtccagactttaaaaaatttagatgggaacaaagaaagcgtgattactcatttcaaagaagagattggcaggctgcagttatgtttggctgaaaaggaaaatctgcaaagaactttcctgcttacaacctcaagtaaagaagatacttgttttttaaaggagcaacttcgtaaagcagaggaacaggttcaggcaactcggcaagaagttgtctttctggctaaagaactcagtgatgctgtcaacgtacgagacagaacgatggcagacctgcatactgcacgcttggaaaacgagaaagtgaaaaagcagttagctgatgcagtggcagaacttaaactaaatgctatgaaaaaagatcaggacaagactgatacactggaacacgaactaagaagagaagttgaagatctgaaactccgtcttcagatggctgcagaccattataaagaaaaatttaaggaatgccaaaggctccaaaaacaaataaacaaactttcagatcaatcagctaataataataatgtcttcacaaagaaaacggggaatcagcagaaagtgaatgatgcttcagtaaacacagacccagccacttctgcctctactgtagatgtaaagccatcaccttctgcagcagaggcagattttgacatagtaacaaaggggcaagtctgtgaaatgaccaaagaaattgctgacaaaacagaaaagtataataaatgtaaacaactcttgcaggatgagaaagcaaaatgcaataaatatgctgatgaacttgcaaaaatggagctgaaatggaaagaacaagtgaaaattgctgaaaatgtaaaacttgaactagctgaagtacaggacaattataaagaacttaaaaggagtctagaaaatccagcagaaaggaaaatggaagatggagcagatggtgctttttacccagatgaaatacaaaggccacctgtcagagtcccctcttggggactggaagacaatgttgtctgcagccagcctgctcgaaactttagtcggcctgatggcttagaggactctgaggatagcaaagaagatgagaatgtgcctactgctcctgatcctccaagtcaacatttacgtgggcatgggacaggcttttgctttgattccagctttgatgttcacaagaagtgtcccctctgtgagttaatgtttcctcctaactatgatcagagcaaatttgaagaacatgttgaaagtcactggaaggtgtgcccgatgtgcagcgagcagttccctcctgactatgaccagcaggtgtttgaaaggcatgtgcagacccattttgatcagaatgttctaaattttgactagttactttttattatgagttaatatagtttagcagtaaaaaaaaaaaaaaaaaccacacctaaaatagaccactgaggagaccatagagcggatgctttcatgcaccctttactgcactttctgaccaggagctactttgagtttggtgttactaggatcagggtcagtctttggcttatcaataaattttaatctctgttaatcttacctgctttaaaaaaaagttcttgtgtgttcgtatctttatttattccctagtttgcagaactgtctgaataaaggatacaaggattatttcaatgttactgcactgaaaaacgtgtatgtattagtgtgctagattatttagcagaatattcacaagtttctgttgaccttgttgattgagcatgactactaaatattatgtaataaaaagcatttgtcataacagtcttatgaagtagttcttcgaatatagaaagttctataatttagcccatgaaatgataggtttttaattttcagaaatggagctgcatgtagaatgagatcacatgcttttatatgtgaaatattggttttagcaattaacagaaggcatactttgctaattttatggcaaaattttagaataacctgaatgattatttttaaactatcttgaagttgtatgtatatatctaatgggaaaatggaacaagagatgtcagtataattgttttcctattaaatgatctcataacaggggtgtttgtggcataaaaatcatagaatatatatcagtatcttttttacattttcctgatgagaatataaatttgaaatattctcagtaagtgattaaaagtacaatacataaacccaaatcaaagtaatgtgtttcttcagttatgtctgtgctgtatagaactgtcactaacattaaagaaagaggacacatttttcaagatctgt

SEQ ID NO: 189415 - DNA, 4020 bp, Homo sapiens
  Payload ID: 17401
  Gene Symbol: TAX1BP1
  Gene Name: Tax1 (human T-cell leukemia virus type I) binding protein 1
  ENST ID: ENST00000488564
  CDS Start-End: 1-429
ggcttttgctttgattccagctttgatgttcacaagaagtgtcccctctgtgagttaatgtttcctcctaactatgatcagagcaaatttgaagaacatgttgaaagtcactggaaggtgtgcccgatgtgcagcgagcagttccctcctgactatgaccagcaggtgtttgaaaggaactgggcaggcaaaaggcttctcttcccctccattcatgcacatggagctgaggatggcttcggagctgatggcactctctgtggtccaggactcatcgctgtccgactcctcatagtccacctcctcctcgtcatactcgctgcctgcaggacaagagaagtgcaaggactgtcaggagcgctcatctccccacaggttcacccggccacttccaggacaggagatgtggccgtggcagagcagcgctgacggcccagggagagggcactcccggcaccaggggactgcaaacacggctattcccttacaaccctggaagcaggagccctgcgttcccacctaagagaccagggcaagggcttcccaacaattcacagctaggagttggcggagcaagaacattaactcggttctatggcaacccagcctgtggctgcaaaggcacagggaagacttgctctggggccaaaaccaaaaataagcaacgatgacaggctcctcacactccccatgctagtgcctgacactcccaaatgagcagaacactgtccccttagttttatgctttactggcctagtaaatgcagaagtctccaaggtcgggggttacgttttggacttttaaggcatttctacttcagtggaatgaatttcaggtctttttctttatagatttgagctgggaaatttggaactaaaagagggttaccctcacgctagggagcaagaggcatagaaggccaggaggtctaaggataaatcgccagcggcagaatgtggggtagctcctggaagacgaagcgatcccctacacacgcagtactaggcaccgcatctgcccttcagctcatgcgacacttcctgctagggctgacccatcacagttacgcagctcagacaggaagcagggattctcttttattcctaagggctaagagctctgctgagaatcgaattgaaatacactctactgacttctttgcaagacggcagggatggagaaccacttcaacaggcagcctcttttgctcttttttaatgaggcccaaagccatttatttggagcttttgcacaatacaaccctgaaggacataattctaccgatcataaacagtgtaaaataatatgttgacaagtcctaatgcatttacaagccccgtggaataaataggaattatagcacaacattaataagaattatatggtagcaattacagttgtgaaattcatcccccaggtgtgaggctacattgcaccaggggcctgcctgggtgcttcaggggcttactctgctacatcaattatttcaacaccaaatattggcacttttattgggtttcattttaataggcattaataagattgtttgaagagccagttgcgccaggaacagggacgccggcatctgaggctcaaagttgaaaggagccaggaaggaaggaagggacctgaagtttactcagtgcctatgatgtttcaggcacactctgtgcattatctcatttaatcctccagtaaccctaggaggtggggattactgtcaccgttatacacacgagcaactgagccctcgtgaggttaaaacgcgcatgtgttctgaactcaccattaagggacggtgtgctttttccctcattgcttcccagcccccagtgccaggctcttctgaggggttcccttttaatctcctttgagttgctggctcttcaccatttaatactgagatggaattcgaagcagtctgttttgaagtctgttagaaattctcgggtggtgcagaaaaaacaatctggcaaacatgaagctttggagctaaatgtgggtttcaataaattctgctgtacttggccatagctccctaaataaagagagccggtttggaaacgcttgtaccaagtgacacagtggtaccacttggccacgttgcttggggtctgtcctggagcaaatcttgaaatctgtttttaagtagggcattgtttaagacattttactcttaaacaaatgccacatgctggcgtcctttaacttgcttgttagaaaactataaatgctatttcgcaaagctcctccagcgggacttcagaaagttagaaagactaatttatccatctaattgggctaatttgttaacctgaataccaagagccatgaaacatttagaatggggggagggtggggcacctcagaccaactgggggattaatgaagcccaacagaagagaaaacttcaaaactccactggatcaaaagcgatcagcccgaggcgttgaagcagcctacactgtctgcgtctcagggggaaggcacgtggtatccagccccaggcagggcaggaaggggacacacagcttaccctgcaagttggaacacttctgagagggaaaggtagtgtaggccgacaggtggtaagttggaactatcccaggcaaggtgggacacacaccactcggcagcagcttaccaccaagtccttgggtgaaactagtcatctccctcggttgcgacaagatggacttttgtttatatacttaattttgtcctctgacagagaacatcaacacagacctgggttcatgcctttgctttcgttaggtgaaggacaagccacttggcttttattttctctttcatgaaacaggcacaagtctcttccttgcaggttgaatttaaagatcagaatgagtgtgtatagaatacctgggataggaggacctccatagagtatgcactgaaaacatggaaggcagtgtaagcaatgccatctttgtaatcatattacatattccatataaaataagatgatctttagaaaggcctgttgtgaaaccaaacaaaataattccaaaagggttgggaatccctactagaaaaaacacaagagagactccaggaccagacaggccccatctgctttaagctcagagaaggagcaaagcacactccagcccccacctccaagaggctacagaggccaggagggagcgcagctggggctcagagcactgtgagcccaggcaagtgacgccacctctctgagcttcaaattgctcatctgtaaaatgggcgaacgcctgtgtgcactaaggctgttgtgaagaataactgagttcctgtttttaggactctggacaaaatgcctggcccatggtaggccttagagtagcacatggtaagaaaataaacaaaatgctatgtgagctgtttatctcatttactgttgccttgctctctcttgagaacagtcccctttttaaaccagaggaacatgctggggttctactacagcttttcttactgtaccccaaatgctccccttttattaaccaggcgtccacagcaccaggcggcagccagagggcctgcggtgggcagcgtaggggctgcgggactcgagtcacaggcgctcagatgctggcacccattcgcgtccctgacagggcgtggggtgtcctgcagaaaacttttgaggccaaaacacaaccgctgttagtctcctttcaaacattttggaactctagaaagaaataccctaaaactaagtcaccaaagcccctgggccagcctctgtcctctgctttatccatttcctcatgttttcccacaagaggaaaataaatcccaagctcgttcattcatcttcaattgctgcttcagctgctatctctcaacactcactgcagaatgaacaaatccccagcagtctccacacctttgctagggaactccttccccattcctggaaagcaggaggtagcaaagctgcttctcctagcaacaccctcccaagcttttactcctgcacttcaattaataaaaatcacgagcactgccccgac

SEQ ID NO: 189416 - DNA, 1377 bp, Homo sapiens
  Payload ID: 17402
  Gene Symbol: TAX1BP3
  Gene Name: Tax1 (human T-cell leukemia virus type I) binding protein 3
  Uniprot ID: O14907
  ENST ID: ENST00000225525
  CDS Start-End: 157-531
agtggcgctccggccagtgattggctggaggtttgttaactattcatgagggggcgggccgagcggggcggcctttgttaagcagcgagggcgcgaccgcgggtactctgctgccggcttctcggagcggcgctgggcgaccagagcagggtcgagatgtcctacatcccgggccagccggtcaccgccgtggtgcaaagagttgaaattcacaagctgcgtcaaggtgagaacttaatcctgggtttcagcattggaggtggaatcgaccaggatccttcccagaatcccttctctgaagacaagacggacaagggtatttatgtcacacgggtgtctgaaggaggccctgctgaaatcgctgggctgcagattggagacaagatcatgcaggtgaacggctgggacatgaccatggtcacacacgaccaggcccgcaagcggctcaccaagcgctcggaggaggtggtgcgtctgctggtgacgcggcagtcgctgcagaaggccgtgcagcagtccatgctgtcctagcagccaccaccatctgcgactcctgcctgccgcctctctgtacagtaacgccacttccacactctgtccccatctggcttctgctgaccgctgggccccagctcagaagggctatagctggtcccagaggcctggcctggccttccttcccttctcccatccctggcctggggcctctgggaccggctttctctcctggacaccgaggattggaaataagggcctggagctgagtagtagccagtctgctgtgaccacaggctcaggtccgaccctgctgcttggccacagcagtggctgggcaagtgggaaccactatctcttgggagcccccaaaagctgggaaatgctggaggaaccaggcctttcccgcttttgcctggctgcagggttcggctccgcccctgccccccagccctcgtgtgtccacaccgcagtgcctctgcccctcgggggactggacacacatcctgccagaggcgctacgaagctttgcccagatgaagccaggtgggctccgcgttcactcccactctcccgaggggtgctggcctccccagggtttgccttcttacggatttagacgaggttcgaggctcacctatcagggcagctctcaggattgtcattttcctctttgcctgtgggtttaacttttgtatttttttaatcacaagtttgatacaaaatgtttttatcgtactctttggagatgcccattctacttttgaatttagcttttactaattcgcatctggaagctcagcaagtgcacaagccttactttggttaccgtggaaaccactgccgcccctccccgatgtggtgcgctcaataaaaatgctg

SEQ ID NO: 189417 - DNA, 1302 bp, Homo sapiens
  Payload ID: 17402
  Gene Symbol: TAX1BP3
  Gene Name: Tax1 (human T-cell leukemia virus type I) binding protein 3
  ENST ID: ENST00000611779
  CDS Start-End: 154-450
ggcgctccggccagtgattggctggaggtttgttaactattcatgagggggcgggccgagcggggcggcctttgttaagcagcgagggcgcgaccgcgggtactctgctgccggcttctcggagcggcgctgggcgaccagagcagggtcgagatgtcctacatcccgggccagccggtcaccgccgtggtgcaaagagttgaaattcacaagctgcgtcaaggtgagaacttaatcctgggtttcagcattggaggtggaatcgaccaggatccttcccagaatcccttctctgaagacaagacggacaaggtgaacggctgggacatgaccatggtcacacacgaccaggcccgcaagcggctcaccaagcgctcggaggaggtggtgcgtctgctggtgacgcggcagtcgctgcagaaggccgtgcagcagtccatgctgtcctagcagccaccaccatctgcgactcctgcctgccgcctctctgtacagtaacgccacttccacactctgtccccatctggcttctgctgaccgctgggccccagctcagaagggctatagctggtcccagaggcctggcctggccttccttcccttctcccatccctggcctggggcctctgggaccggctttctctcctggacaccgaggattggaaataagggcctggagctgagtagtagccagtctgctgtgaccacaggctcaggtccgaccctgctgcttggccacagcagtggctgggcaagtgggaaccactatctcttgggagcccccaaaagctgggaaatgctggaggaaccaggcctttcccgcttttgcctggctgcagggttcggctccgcccctgccccccagccctcgtgtgtccacaccgcagtgcctctgcccctcgggggactggacacacatcctgccagaggcgctacgaagctttgcccagatgaagccaggtgggctccgcgttcactcccactctcccgaggggtgctggcctccccagggtttgccttcttacggatttagacgaggttcgaggctcacctatcagggcagctctcaggattgtcattttcctctttgcctgtgggtttaacttttgtatttttttaatcacaagtttgatacaaaatgtttttatcgtactctttggagatgcccattctacttttgaatttagcttttactaattcgcatctggaagctcagcaagtgcacaagccttactttggttaccgtggaaaccactgccgcccctccccgatgtggtgcgctcaataaaaatgctggaattc

SEQ ID NO: 189418 - DNA, 5012 bp, Homo sapiens
  Payload ID: 17403
  Gene Symbol: TXLNA
  Gene Name: taxilin alpha
  Uniprot ID: P40222
  ENST ID: ENST00000373609
  CDS Start-End: 282-1922
gtgccgggaagtggctccagggagaagaggcctcttccctcacccgctgtgggagctgcgccccgaaagcctgccccggcacgtcgggctctcctgacccgccaagaccagagagccgttggcgccctccgcccgggcctgccggtccgtttattttaagaagctttgtgcgcctgctgtggggatttctgatccaggctgcgaagaatttcgaagtctggaaaatagcaactgtgtttgtttctaaaggatcttctcctgacccagcatcgctcatcacaatgaagaaccaagacaaaaagaacggggctgccaaacaatccaatccaaaaagcagcccaggacaaccggaagcaggacccgagggagcccaggagcggcccagccaggcggctcctgcagtagaagcagaaggtcccggcagcagccaggctcctcggaagccggagggggctcaagccagaacggctcagtctggggcccttcgtgatgtctctgaggagctgagccgccaactggaagacatactgagcacatactgtgtggacaataaccaggggggccccggcgaggatggggcacagggtgagccggctgaacccgaagatgcagagaagtcccggacctatgtggcaaggaatggggagcctgaaccaactccagtagtcaatggagagaaggaaccctccaagggggatccaaacacagaagagatccggcagagtgacgaggtcggagaccgagaccatcgaaggccacaggagaagaaaaaagccaagggtttggggaaggagatcacgttgctgatgcagacattgaatactctgagtaccccagaggagaagctggctgctctgtgcaagaagtatgctgaactgctggaggagcaccggaattcacagaagcagatgaagctcctacagaaaaagcagagccagctggtgcaagagaaggaccacctgcgcggtgagcacagcaaggccgtcctggcccgcagcaagcttgagagcctatgccgtgagctgcagcggcacaaccgctccctcaaggaagaaggtgtgcagcgggcccgggaggaggaggagaagcgcaaggaggtgacctcgcacttccaggtgacactgaatgacattcagctgcagatggaacagcacaatgagcgcaactccaagctgcgccaagagaacatggagctggctgagaggctcaagaagctgattgagcagtatgagctgcgcgaggagcatatcgacaaagtcttcaaacacaaggacctacaacagcagctggtggatgccaagctccagcaggcccaggagatgctaaaggaggcagaagagcggcaccagcgggagaaggattttctcctgaaagaggcagtagagtcccagaggatgtgtgagctgatgaagcagcaagagacccacctgaagcaacagcttgccctatacacagagaagtttgaggagttccagaacacactttccaaaagcagcgaggtattcaccacattcaagcaggagatggaaaagatgactaagaagatcaagaagctggagaaagaaaccaccatgtaccggtcccggtgggagagcagcaacaaggccctgcttgagatggctgaggagaaaacagtccgggataaagaactggagggcctgcaggtaaaaatccaacggctggagaagctgtgccgggcactgcagacagagcgcaatgacctgaacaagagggtacaggacctgagtgctggtggccagggctccctcactgacagtggccctgagaggaggccagaggggcctggggctcaagcacccagctcccccagggtcacagaagcgccttgctacccaggagcaccgagcacagaagcatcaggccagactgggcctcaagagcccacctccgccagggcctagagagcctggtgttgggtcatgctgggaagggagcggcagcccagccaggcctggcccataaaaggctcccatgctgagcagcccattgctgaagccaggatgttctgacctggctggcatctggcacttgcaattttggattttgtgggtcagttttacgtacatagggcattttgcaaggccttgcaaatgcatttatacctgtaagtgtacagtgggcttgcattggggatgggggtgtgtacagatgaagtcagtggcttgtctgtgagctgaagagtcttgagaggggctgtcatctgtagctgccatcacagtgagttggcagaagtgacttgagcatttctctgtctgatttgaggctcagacccctccctgcccttcagagctcaagacaagtaatacacccaggtcttgactgcatttgtcttgtgagcagggcttgcttggtcagctcaggccctcctagctgctctggaggctcctttgattctctagacctggaaaaggtgtccctaggcagagccctggcagggcgctcagagctggggatttcctgcctggaacaagggacctggagaatgtttttgcgtgggatgatgtgctggtcaggagccccttgggcatcgcttcccctgccctttggtagtgccaggaccaggccaatgatgcttctcagtagccttatcattcacaggtgcctctctagcctgcacaaatgattgacaagagatcacccaaaggattatttctgaaggtgtttttttctttatttctttttctttttttttttttttctttttcttttttttttgcacatgacagtgtttgtattgaggaccttccaaggaagagggatgctgtagcagtggtgcctgggtgcctggcctccagtgtcccacctccttcaccaccccacttggctcctttgccatcttgatgctgaggtttcctgtttggtgagatcaggttgtttgtggtaaaagaaaggaaagggcttctgatggctttgccacaagcttacctgtgggtttcagtcctgagaggccaccaccagttcccatcagcactgtctccatgcagcagttgctgggtcccatgtccagctgcctctttggcttcatgggtttttctgcttcctgcccccacccccacatgtgcaatcctcaagatttgtcctgattctatttcctggcacctccctgcctgtccttggggattctacttcttcctgtgtgggagcccatagctgttgtctaacaggtaagaaatgaaattgaactattgactgggccccagaaatccataaaatggctgcagacagttgtttctgtgtcctgttctacccccactccagtacataactactatgtactgtgtagagccattctatatgctgaatgttctgctgttgcaaacttgccagggtattagccagtgtttgtgccaagcagttttctgggacaacagaatgactcagaccaagatggataggatggttagggctttgcttcttgctgtttttctttgaagctagttcattgtcctgcaggtcccttcatcttccatacctagcccactcttttagcccttaccttaaatctctcagataagttggttcacaaagaatgttaagtactgaatcatgtgtgactgagaccagagatggcaaatgaatggcacaccatttctccttctcctgccccagggcaggtaccactgatctgcatcagagttgcctgctattctctggtgtatccttcacatctaggtgccctcaagcagctgtgtgagtgttgagatctctgccatctctggctgagatactgctgtcctgtgaagtgtttcccatgacctttttcttcccctttgaatccctctgtctggagtagtccttgcctcttcctgctccagtagggccttttccctaccccagcccctgtgccaggctaagctggtacaagagctgccaacctcacagagtgtttgctaggcgagagaggtgcagggaagaggcagaggtatgcaccttcccccttgaagagaggggaaaggcctacagtggcccacataattgcctgactcacacttcagctacctcttaatgcctgtggagggactggagctgctggatcccagtgtggtggtgtaggaggccacagtgagcaggtggccccagctgggtttcccaggtcaggaatgtgggccccaggcaaggtgcagcctttgctcacagctccatccatgtctagaccttcaggccagtctgcagatgaggttccctacctttttcttctcttcattgaccaaatcaaccaatcactacagctgctctgcttctgctttccaaagtagcccaggtcctgggccagatgcaggggaggtgcctatccatgagtgaaggccagtgtcttcctcacctgggtgggtcccacacttgtgacctcagttttaggaccaagatctgtgttggtttcttagattgctagcttttcctccaggggaccacagcaggtgaagctcaagagcgcatggctctgctaatagtaaattgttttcagggccttgtccagctgagagcttcatgtccaccagattctgagaggtgtcagcagcactttttttttttatttgttgtttgttttccatgaggttatcggaccatgggctgagctcaggcactttctgtaggagactgttatttctgtaaagatggttatttaaccctcctccaccccatcacggtggccctgagggctgacccggaggccagtggagctgcctggtgtccacgggggagggccaaggcctgctgagctgattctccagctgctgccccagcctttccgccttgcacagcacagaggtggtcaccccagggacagccaggcacctgctcctcttgcccttcctgggggaagggagctgccttctgtccctgtaactgctttccttatggcccagcccggccactcagacttgtttgaagctgcactggcagcttttttgtctcctttgggtattcacaacagccagggacttgattttgatgtattttaaaccacattaaataaagagtctgttgcctta

SEQ ID NO: 189419 - DNA, 4854 bp, Homo sapiens
  Payload ID: 17403
  Gene Symbol: TXLNA
  Gene Name: taxilin alpha
  Uniprot ID: P40222
  ENST ID: ENST00000373610
  CDS Start-End: 124-1764
gaggcgggagcaggcggctggccggcagcagttactcggggtttccggtgcgaggccagaggtggggaagccatcggacgtcggcggtgaggatcttctcctgacccagcatcgctcatcacaatgaagaaccaagacaaaaagaacggggctgccaaacaatccaatccaaaaagcagcccaggacaaccggaagcaggacccgagggagcccaggagcggcccagccaggcggctcctgcagtagaagcagaaggtcccggcagcagccaggctcctcggaagccggagggggctcaagccagaacggctcagtctggggcccttcgtgatgtctctgaggagctgagccgccaactggaagacatactgagcacatactgtgtggacaataaccaggggggccccggcgaggatggggcacagggtgagccggctgaacccgaagatgcagagaagtcccggacctatgtggcaaggaatggggagcctgaaccaactccagtagtcaatggagagaaggaaccctccaagggggatccaaacacagaagagatccggcagagtgacgaggtcggagaccgagaccatcgaaggccacaggagaagaaaaaagccaagggtttggggaaggagatcacgttgctgatgcagacattgaatactctgagtaccccagaggagaagctggctgctctgtgcaagaagtatgctgaactgctggaggagcaccggaattcacagaagcagatgaagctcctacagaaaaagcagagccagctggtgcaagagaaggaccacctgcgcggtgagcacagcaaggccgtcctggcccgcagcaagcttgagagcctatgccgtgagctgcagcggcacaaccgctccctcaaggaagaaggtgtgcagcgggcccgggaggaggaggagaagcgcaaggaggtgacctcgcacttccaggtgacactgaatgacattcagctgcagatggaacagcacaatgagcgcaactccaagctgcgccaagagaacatggagctggctgagaggctcaagaagctgattgagcagtatgagctgcgcgaggagcatatcgacaaagtcttcaaacacaaggacctacaacagcagctggtggatgccaagctccagcaggcccaggagatgctaaaggaggcagaagagcggcaccagcgggagaaggattttctcctgaaagaggcagtagagtcccagaggatgtgtgagctgatgaagcagcaagagacccacctgaagcaacagcttgccctatacacagagaagtttgaggagttccagaacacactttccaaaagcagcgaggtattcaccacattcaagcaggagatggaaaagatgactaagaagatcaagaagctggagaaagaaaccaccatgtaccggtcccggtgggagagcagcaacaaggccctgcttgagatggctgaggagaaaacagtccgggataaagaactggagggcctgcaggtaaaaatccaacggctggagaagctgtgccgggcactgcagacagagcgcaatgacctgaacaagagggtacaggacctgagtgctggtggccagggctccctcactgacagtggccctgagaggaggccagaggggcctggggctcaagcacccagctcccccagggtcacagaagcgccttgctacccaggagcaccgagcacagaagcatcaggccagactgggcctcaagagcccacctccgccagggcctagagagcctggtgttgggtcatgctgggaagggagcggcagcccagccaggcctggcccataaaaggctcccatgctgagcagcccattgctgaagccaggatgttctgacctggctggcatctggcacttgcaattttggattttgtgggtcagttttacgtacatagggcattttgcaaggccttgcaaatgcatttatacctgtaagtgtacagtgggcttgcattggggatgggggtgtgtacagatgaagtcagtggcttgtctgtgagctgaagagtcttgagaggggctgtcatctgtagctgccatcacagtgagttggcagaagtgacttgagcatttctctgtctgatttgaggctcagacccctccctgcccttcagagctcaagacaagtaatacacccaggtcttgactgcatttgtcttgtgagcagggcttgcttggtcagctcaggccctcctagctgctctggaggctcctttgattctctagacctggaaaaggtgtccctaggcagagccctggcagggcgctcagagctggggatttcctgcctggaacaagggacctggagaatgtttttgcgtgggatgatgtgctggtcaggagccccttgggcatcgcttcccctgccctttggtagtgccaggaccaggccaatgatgcttctcagtagccttatcattcacaggtgcctctctagcctgcacaaatgattgacaagagatcacccaaaggattatttctgaaggtgtttttttctttatttctttttctttttttttttttttctttttcttttttttttgcacatgacagtgtttgtattgaggaccttccaaggaagagggatgctgtagcagtggtgcctgggtgcctggcctccagtgtcccacctccttcaccaccccacttggctcctttgccatcttgatgctgaggtttcctgtttggtgagatcaggttgtttgtggtaaaagaaaggaaagggcttctgatggctttgccacaagcttacctgtgggtttcagtcctgagaggccaccaccagttcccatcagcactgtctccatgcagcagttgctgggtcccatgtccagctgcctctttggcttcatgggtttttctgcttcctgcccccacccccacatgtgcaatcctcaagatttgtcctgattctatttcctggcacctccctgcctgtccttggggattctacttcttcctgtgtgggagcccatagctgttgtctaacaggtaagaaatgaaattgaactattgactgggccccagaaatccataaaatggctgcagacagttgtttctgtgtcctgttctacccccactccagtacataactactatgtactgtgtagagccattctatatgctgaatgttctgctgttgcaaacttgccagggtattagccagtgtttgtgccaagcagttttctgggacaacagaatgactcagaccaagatggataggatggttagggctttgcttcttgctgtttttctttgaagctagttcattgtcctgcaggtcccttcatcttccatacctagcccactcttttagcccttaccttaaatctctcagataagttggttcacaaagaatgttaagtactgaatcatgtgtgactgagaccagagatggcaaatgaatggcacaccatttctccttctcctgccccagggcaggtaccactgatctgcatcagagttgcctgctattctctggtgtatccttcacatctaggtgccctcaagcagctgtgtgagtgttgagatctctgccatctctggctgagatactgctgtcctgtgaagtgtttcccatgacctttttcttcccctttgaatccctctgtctggagtagtccttgcctcttcctgctccagtagggccttttccctaccccagcccctgtgccaggctaagctggtacaagagctgccaacctcacagagtgtttgctaggcgagagaggtgcagggaagaggcagaggtatgcaccttcccccttgaagagaggggaaaggcctacagtggcccacataattgcctgactcacacttcagctacctcttaatgcctgtggagggactggagctgctggatcccagtgtggtggtgtaggaggccacagtgagcaggtggccccagctgggtttcccaggtcaggaatgtgggccccaggcaaggtgcagcctttgctcacagctccatccatgtctagaccttcaggccagtctgcagatgaggttccctacctttttcttctcttcattgaccaaatcaaccaatcactacagctgctctgcttctgctttccaaagtagcccaggtcctgggccagatgcaggggaggtgcctatccatgagtgaaggccagtgtcttcctcacctgggtgggtcccacacttgtgacctcagttttaggaccaagatctgtgttggtttcttagattgctagcttttcctccaggggaccacagcaggtgaagctcaagagcgcatggctctgctaatagtaaattgttttcagggccttgtccagctgagagcttcatgtccaccagattctgagaggtgtcagcagcactttttttttttatttgttgtttgttttccatgaggttatcggaccatgggctgagctcaggcactttctgtaggagactgttatttctgtaaagatggttatttaaccctcctccaccccatcacggtggccctgagggctgacccggaggccagtggagctgcctggtgtccacgggggagggccaaggcctgctgagctgattctccagctgctgccccagcctttccgccttgcacagcacagaggtggtcaccccagggacagccaggcacctgctcctcttgcccttcctgggggaagggagctgccttctgtccctgtaactgctttccttatggcccagcccggccactcagacttgtttgaagctgcactggcagcttttttgtctcctttgggtattcacaacagccagggacttgattttgatgtattttaaaccacattaaataaagagtctgttgcctta

SEQ ID NO: 189420 - DNA, 4753 bp, Homo sapiens
  Payload ID: 17404
  Gene Symbol: TXLNB
  Gene Name: taxilin beta
  Uniprot ID: Q8N3L3
  ENST ID: ENST00000358430
  CDS Start-End: 234-2288
cagactgctgcctccatcagtgcctgtggcgtgtgtgtgtgtgtgtgtgtgtgcgcgcgcgtgcgtgcacgtgtgtatgtgtgtgtgtgtgtattgggtttctctctcccttgtaagaacacagccagcccgccctctcctgctgttgctgcagctctgacttgctttttcctgcctccttcctctcctctctcttcttgcttagcttcttgccttctgatactactcccaagatggaggctaatcactctgaacagctctcagcggaacgacagtcaacacctccaggtgacagttcatcattacccagtcacaatggcctggagaaggaagatggccaggattctccaaccccagtccaaccaccagagaaagaggcaagtgtgcaccccgatatctctgaagagctgaatcgacagctggaagacatcattaacacttatgggtctgctgccagcacagcagggaaagagggctctgccagggccagtgagcagcctgagaatgcagaatcacctgacaacgaggatggggactgtgaggaaacaactgaagaggctggaagagaacccgttgcttctggagagccacccactgtcaaagagcccgtcagcaataaggagcaaaaattggaaaagaaaatcctaaaaggattaggcaaagaagccaacctgctaatgcaaaatctgaacaagttgcaaacaccggaagaaaagtttgattttttattcaagaagtatgctgaattgctggatgaacatcgtactgagcaaaagaagttaaagctcctccaaaagaaacaggtacaaattcaaaaagaaaaggaccagttacaaggtgaacacagcagagctatcctcgctcgaagcaaattggagagtctgtgccgggagctgcagagacacaacaagactctgaaggaagaggcgcttcagcgggcacgtgaggaagaagagaaaaggaaggaaatcacaagccatttccagagtaccctcacggacatccagggccagatcgagcagcagagtgagcgaaatatgaagctctgtcaggagaacacagagcttgcagaaaagctgaaaagcatcatcgatcagtatgagctcagagaggagcatctggacaaaatatttaaacacagagaactgcagcagaagctggtggatgcaaagcttgagcaggcccaagaaatgatgaaggaagcggaggagcgacacaaacgagaaaaggaatatttgctgaaccaggcagcagagtggaaacttcaggcgaaagtgctgaaggagcaagagacagtcctgcaggctcagctcactctctactcaggaaggtttgaagaattccagagcacactaactaaaagcaacgaggtgtttgccacgttcaaacaggaaatggacaaaacaactaagaaaatgaagaagctggaaaaggacacagccacatggaaagcccgatttgagaactgtaacaaagctctgttggacatgattgaagagaaagcactgagagctaaagaatatgagtgctttgtgatgaaaatcgggaggctagagaacctctgccgtgctttacaagaagagagaaacgaactccacaaaaaaatcagagacgcagaaatatctgaaaaggatgaccaaagtcagcacaactccgatgaagagccagagtcaaacgtctctgtggatcaagagattgacgcagaggaggttaatagtgtccaaaccgccgtgaaaaatctggccacagccttcatgataattcatcatccagagtcaaccccgcaccagtccaaagaaacccaacccgaaataggcagttctcaggagagtgctgacgccgctctcaaggagccagagcaaccccctctgatcccttcacgggattcagagagtcccctgcctcccctaactcctcaggctgaagccgaaggaggcagtgatgctgaacctccctccaaggccagtaattctcctgccgggttgggagcagaaacccaatgcgagggtctccctgttggagcacaggctgatcaggcgtcctggaagccagaggcagaagcttccggtcaggccccacaggctcccaccgaggcctccctacagaagatggaggcagatgtgcctgctccagcatgcgcagcagaagagcacgttgcagccatggtgcctgcatgcgagcccagtaggcagcccccacgagcagcagcagaggagctgccagtaggggcctcagctgggccccagccgcgcaacgtggctgacaccaatctggaaggcgtcgactaagcctcaccgtgccttcagaggcttcttcctgcctctttgcatattcagcataacagcttgtcttccgaaaaaggcattaagggctagagatgtcaaatggaagagacttaggatcaagacattttttaatgttaggcagaacacattcattcagactttgctatttgttgtcaatttatagctgatttgaaggttttctatttaacactggttgacagtataattttcccaaagggcaacaaaacatacagatagcaaatttatattccttttctgttaagataatacttaaatttgttaatcaccagtaagatttgatgtttaaagacttccactgcaatatataaatactgaaaatgtgatgttctgcttatttggatatatagtttaacaagttccatagtaatttatggatgcccaggttacatttaaactatacatatacataatatatacatacgtgtgtacttattatatgtatatatacacgtatgtatagatgtgtgaatatttgtttatatacatatatgcacgtatctatatgtatatataaatgcattattacacatacatttctctcaccccttaatgcatttttctcaatgcagaatatttagatgctaatcaaaaaaatgatctcttacttgcacttgagactatggttgactaatgctctataaatccgaagagagttcggactataagtatttaggctatcattatgttgggcaaaaataagtaacccaatggtagataaatgaattcaaccagttgatcaaatggcagaaaagcagttagactacaatctgtgcagacagcatggacacaaagatgaccacaaggggcccaaaacagaaaagagaaacacaagctcacctcttggagctgcttctcctacacttctcagcccattgctttgccaccccctcatgtgccagggcatcccattccaggcttcctgcaaggaaacggttggaagtgggaaaggggagctagggattgaggggttaagggacctcacactaagaaggggctgtgctttgatcccctgcctcttgcactaccaatgtctcaagacataatattcatctcttgctgtcagacccattctatattctaaaagcttctgctccttccttcccaatttctcctttgtagcaggaaattacacccagccctcatctcaattaatgctaaataaagctattgtttttccaaaacacaaatctacactgggtctcaatatcagtgatgaggcttacaaaccaacacgttttctgccatgaggatttctctttaggccagaagtacaaaacaaaaaaaccaatggattttaaccaaaatgatttgaaatataggtgaggattcaggagaaggcaaaagctagaaacacttggggttgtcaacatgagtattacattaacattgcttgatgagaacctctaatgatactgacaacataaattacctagggtaaaggatagctgcaacaatgaaacaggaaagaagagagggagagagaggaaagggaaggaagaaaggaaggagggagaagggaagaaagaaacaatgtctaacccaaccctatcttgaaagttgaactcaagtagaaaaatggatagaaacaaaattctctagtactcatccaggaaaccattcttcaatgttgcatgtggctgtttgccaaggcacacaaagtgcttgtaggcagcaaccatatgctacaagaattgtaaactgcatacagtttgtttgaagtagacagtgaggataataacaaagttgctaggcaggaaaaaaaatcaggaaaaaagcttgtcgctatttgagaatctgtatatttttaaaggcttaaaatattataaccacagggtatccagccaaattcaacattactgcaagtcttagagatttaaacattcatttgattcagagctaaatattcaccataatccaggagggtctccttccccactgcagaggcagaacgtccaagaatggagtaagattagtcatagtaaagtctcagtctgaatatttagcaagagaaacaggcagcagaggaacccaaaggcagtaaatcaaatattctaaaacccaaagttcattattttcatccaaaagactttcacagaaacacattactcacagccatgtatatcttggacagagtttcagatggaatgacttgtctgaaatttgtaaagcttaatataggttttgggggaattattttaatattcaaagaatgttttattatagtcctttgtgttaaaatttagccttactaattataacaataactcataaagttctaaattcagaaggaatgtctgttctttatcaagtgtatgtaactattttttagaaatgccatctactttctagaaacactaaagttattgttttctaagttaaataactataatttatatatctattaaaaaggtacttctcttcccaaa

SEQ ID NO: 189421 - DNA, 398 bp, Homo sapiens
  Payload ID: 17404
  Gene Symbol: TXLNB
  Gene Name: taxilin beta
  ENST ID: ENST00000367652
  CDS Start-End: 1-398
gtatgagctcagagaggagcatctggacaaaatatttaaacacagagaactgcagcagaagctggtggatgcaaagcttgagcaggcccaagaaatgatgaaggaagcggaggagcgacacaaacgagaaaaggaatatttgctgaaccaggcagcagagtggaaacttcaggcgaaagtgctgaaggagcaagagacagtcctgcaggctcaggtgaggccaggtggacgaggcatgggggtgctgtcctcactgtccccagataaaaaggctggggccaaaggtgggcagcagaagtcctcctatgtggcaggggatggggggatgggaattggaaatgaagaacaacttcacatttattcatattttcaagtaaaaataaaagcacaatattata

SEQ ID NO: 189422 - DNA, 4401 bp, Homo sapiens
  Payload ID: 17405
  Gene Symbol: TXLNG
  Gene Name: taxilin gamma
  Uniprot ID: Q9NUQ3
  ENST ID: ENST00000380122
  CDS Start-End: 62-1648
aaggccctgcgagattctgtgccccttgtcgggccgcttgtttggctgctgccgtcacctcatggcgacgcgggtagaggaggcagcgcggggaagaggcggcggcgccgaagaggcgactgaggccggacggggcggacggcgacgcagcccgcggcagaagtttgaaattggcacaatggaagaagctggaatttgtgggctaggggtgaaagcagatatgttgtgtaactctcaatcaaatgatattcttcaacatcaaggctcaaattgtggtggcacaagtaacaagcattcattggaagaggatgaaggcagtgactttataacagagaacaggaatttggtgagcccagcatactgcacgcaagaatcaagagaggaaatccctgggggagaagctcgaacagatccccctgatggtcagcaagattcagagtgcaacaggaacaaagaaaaaactttaggaaaagaagttttattactgatgcaagccctaaacaccctttcaaccccagaggagaagctggcagctctctgtaagaaatatgctgatcttctggaggagagcaggagtgttcagaagcaaatgaagatcctgcagaagaagcaagcccagattgtgaaagagaaagttcacttgcagagtgaacatagcaaggctatcttggcaagaagcaagctagaatctctttgcagagaacttcagcgtcacaataagacgttaaaggaggaaaatatgcagcaggcacgagaggaagaagaacgacgtaaagaagcaactgcacatttccagattaccttaaatgaaattcaagcccagctggagcagcatgacatccacaacgccaaactccgacaggaaaacattgagctgggggagaagctaaagaagctcatcgaacagtacgcactgagggaagagcacattgataaggtgttcaaacataaggaactgcaacagcagctcgtggatgccaaactgcagcaaacgacacaactgataaaagaagctgatgaaaaacatcagagagagagagagtttttattaaaagaagcgacagaatcgaggcacaaatacgaacaaatgaaacagcaagaagtacaactaaaacagcagctttctctttatatggataagtttgaagaattccagactaccatggcaaaaagcaatgaactgtttacaaccttcagacaggaaatggaaaagatgacaaagaaaattaaaaaactggaaaaagaaacaataatttggcgtaccaaatgggaaaacaataataaagcacttctgcaaatggctgaagagaaaacagtccgtgataaagagtacaaggcccttcaaataaaactggaacggttagagaagctgtgcagggctcttcagacagaaaggaatgagctcaatgagaaggtggaagtcctgaaagagcaggtatccatcaaagcggccatcaaagcggcgaacagggatttagcaacacctgtgatgcagccctgtactgccctggattctcacaaggagctgaacacttcctcgaaaagagccctgggagcgcacctggaggctgagcccaagagtcagagaagcgctgtgcaaaagcccccgtccacaggctctgctccggccatcgagtcggttgactaagatgaggtgtgatcactgtattgagagatatattttgtgtataactttctctgttagtagttaactattggttttgtggtgaaaattttcttactttttctaccatatctgtattttcttagaactactggacttatgtggtacaggaggctgcttagcagttttgaatagtttaatctataaattttcctcagctgtgttgcacatcagcctcgttctccctccactggaatgcatgtgttcattgccttgtcctttctctccctgctccttgcacattatcatcctaatgaaaatttcactgacagggccgaccattacaagggaactttgttctgacgatggttccttgatgtgaaaacaatattaatttaaacgtcttagcccccccccccataatattattcagaaaaacaaaataccaaggcgattagttttgtctaataacccatttaaatgccaagtaaaaataaaactcctagtgttgggtcagaagcatatttgattgaaattagctttttgaaaacatttatatctcgggacaaattgagatggccacatgcctagaatcctaagtttcggcagaatatgtatataaagatgtcacttgtggacaaaatagtacatagaggcaaatcactagacaaataagcttagtgtttacgtgactgaacagtcatcctgctttggtttcaggtgtgggatttggaccatgaggggctcccgtagaggatggcggtttgtgtttgattctgatttgggatttcagtacatattctccacttcccatagaaggccacttattctttgaaaactggtgttcatgtttgccgttcaatgaagtcccttgtcaaagacaaggacggtcaattcacgtgtcactttcactaggcagaagtttctccaataccttctggctacttgaaagttactacaaaaattccaccagcaaagtactccaggtttttcaaaagggaattttcattatggatcagtaccaaccgaaattgattttcatttccaaaacaaacactggcaccaacatttttactttgggaagacttggcagagtgttagtcatgatctgttacttacgtgttcagtctgttttctcacccccttcttagttaccatctcttttttaagaagaaaaaagaaaagccacagtattatcaaggtctctacacttggactgggggaaaatttgaaattaagcacataacttttgaattagttctttgtttcaatgttgaatgtggcgcagttatgcagatgattaatcaggctgcactgatggaagttttgactttgtccctggtataatttgcattgaaatgctttatgaaataaaaggttctactagaactgatgttagcacattccactgagcaaaactatcagactgacacttgttaaattgcttactggactgaataaactctgttttgtccagttaaaagggttttctctttgttacaagtgttatttgtaaagtcctgtcacattcatggtcgaaactgggttgaaagaattgaaaattgtccaacagatagatagataggaaaccgcctggagtggaggagggttgtatctaagcctccactatcagtcatgttaattcaaggggccacagtggaggaaaataaatccacaaagtagattatctaattaccatcaaaatgagtcagaagcaaaaaacaccaccctccaacagcctcttaggagtacaccctgttctgctactaaaatactagactcatttccctggtggtgggggggaatgcaggtatagatcagaaatataatccaccttaaaattagtactaatgatcacattatttcacaagaactctgctggatgtacagctcttaacattttattaagccatttgtgtagcccaccacgtttctttgtggtgcttgtcctgtgtggaagattgtaaatcttgggcctgttgcatacttccaagggctttaaagcaatgtgattaacagtacttggcctgctgcttttggcttactttgtatttttagctagatgctattatagtgttgaaaggatatggattctgtctgggatgcatttgttgtcctttcagaacccttcctcccattaccctgtgaataaaaacaaatgggaccccctgagaaggacatcttcctacagtgatcacctcaccagcccagtgttgtggctttgtagcgcaccccgtatctaccatattctagaacactgtaatgctactaggctggcccagaaaaggtttaaatgttgaattcacttaaattgcaattgttgcaccatcatggaatcgtgatgtgtattatttatattggcggtggactccaaggtgtagagaaaacttgggtcttgggtaatatggaccatttcatcctcagacttgttaggagtacatttcttggtcttgagaccagtatttttcagttatgtatgcaactgcctttattacacctggttatcacaattcaattctcaggtgttgcagaaaaatctacctctttcagactgtagatggaaataactgtgaaaaaaatgatgcagatatcttctagtttgtgctaaacacactgctttatttttacagcccacgtctttcatgaggatacgaattgttaagaggcagtctcgttttgcttttcaaagacattttgtagagatttttcactaatgtgaatctgattttatctacttgattctgtatagattaagtaaatatgtatgataaacttaa

SEQ ID NO: 189423 - DNA, 3998 bp, Homo sapiens
  Payload ID: 17405
  Gene Symbol: TXLNG
  Gene Name: taxilin gamma
  Uniprot ID: Q9NUQ3
  ENST ID: ENST00000398155
  CDS Start-End: 57-1247
cctgcgagattctgtgccccttgtcgggccgcttgtttggctgctgccgtcacctcatggcgacgcgggtagaggaggcagcgcggggaagaggcggcggcgccgaagaggcgactgaggccggacggggcggacggcgacgcagcccgcggcagaagctggaggagagcaggagtgttcagaagcaaatgaagatcctgcagaagaagcaagcccagattgtgaaagagaaagttcacttgcagagtgaacatagcaaggctatcttggcaagaagcaagctagaatctctttgcagagaacttcagcgtcacaataagacgttaaaggaggaaaatatgcagcaggcacgagaggaagaagaacgacgtaaagaagcaactgcacatttccagattaccttaaatgaaattcaagcccagctggagcagcatgacatccacaacgccaaactccgacaggaaaacattgagctgggggagaagctaaagaagctcatcgaacagtacgcactgagggaagagcacattgataaggtgttcaaacataaggaactgcaacagcagctcgtggatgccaaactgcagcaaacgacacaactgataaaagaagctgatgaaaaacatcagagagagagagagtttttattaaaagaagcgacagaatcgaggcacaaatacgaacaaatgaaacagcaagaagtacaactaaaacagcagctttctctttatatggataagtttgaagaattccagactaccatggcaaaaagcaatgaactgtttacaaccttcagacaggaaatggaaaagatgacaaagaaaattaaaaaactggaaaaagaaacaataatttggcgtaccaaatgggaaaacaataataaagcacttctgcaaatggctgaagagaaaacagtccgtgataaagagtacaaggcccttcaaataaaactggaacggttagagaagctgtgcagggctcttcagacagaaaggaatgagctcaatgagaaggtggaagtcctgaaagagcaggtatccatcaaagcggccatcaaagcggcgaacagggatttagcaacacctgtgatgcagccctgtactgccctggattctcacaaggagctgaacacttcctcgaaaagagccctgggagcgcacctggaggctgagcccaagagtcagagaagcgctgtgcaaaagcccccgtccacaggctctgctccggccatcgagtcggttgactaagatgaggtgtgatcactgtattgagagatatattttgtgtataactttctctgttagtagttaactattggttttgtggtgaaaattttcttactttttctaccatatctgtattttcttagaactactggacttatgtggtacaggaggctgcttagcagttttgaatagtttaatctataaattttcctcagctgtgttgcacatcagcctcgttctccctccactggaatgcatgtgttcattgccttgtcctttctctccctgctccttgcacattatcatcctaatgaaaatttcactgacagggccgaccattacaagggaactttgttctgacgatggttccttgatgtgaaaacaatattaatttaaacgtcttagcccccccccccataatattattcagaaaaacaaaataccaaggcgattagttttgtctaataacccatttaaatgccaagtaaaaataaaactcctagtgttgggtcagaagcatatttgattgaaattagctttttgaaaacatttatatctcgggacaaattgagatggccacatgcctagaatcctaagtttcggcagaatatgtatataaagatgtcacttgtggacaaaatagtacatagaggcaaatcactagacaaataagcttagtgtttacgtgactgaacagtcatcctgctttggtttcaggtgtgggatttggaccatgaggggctcccgtagaggatggcggtttgtgtttgattctgatttgggatttcagtacatattctccacttcccatagaaggccacttattctttgaaaactggtgttcatgtttgccgttcaatgaagtcccttgtcaaagacaaggacggtcaattcacgtgtcactttcactaggcagaagtttctccaataccttctggctacttgaaagttactacaaaaattccaccagcaaagtactccaggtttttcaaaagggaattttcattatggatcagtaccaaccgaaattgattttcatttccaaaacaaacactggcaccaacatttttactttgggaagacttggcagagtgttagtcatgatctgttacttacgtgttcagtctgttttctcacccccttcttagttaccatctcttttttaagaagaaaaaagaaaagccacagtattatcaaggtctctacacttggactgggggaaaatttgaaattaagcacataacttttgaattagttctttgtttcaatgttgaatgtggcgcagttatgcagatgattaatcaggctgcactgatggaagttttgactttgtccctggtataatttgcattgaaatgctttatgaaataaaaggttctactagaactgatgttagcacattccactgagcaaaactatcagactgacacttgttaaattgcttactggactgaataaactctgttttgtccagttaaaagggttttctctttgttacaagtgttatttgtaaagtcctgtcacattcatggtcgaaactgggttgaaagaattgaaaattgtccaacagatagatagataggaaaccgcctggagtggaggagggttgtatctaagcctccactatcagtcatgttaattcaaggggccacagtggaggaaaataaatccacaaagtagattatctaattaccatcaaaatgagtcagaagcaaaaaacaccaccctccaacagcctcttaggagtacaccctgttctgctactaaaatactagactcatttccctggtggtgggggggaatgcaggtatagatcagaaatataatccaccttaaaattagtactaatgatcacattatttcacaagaactctgctggatgtacagctcttaacattttattaagccatttgtgtagcccaccacgtttctttgtggtgcttgtcctgtgtggaagattgtaaatcttgggcctgttgcatacttccaagggctttaaagcaatgtgattaacagtacttggcctgctgcttttggcttactttgtatttttagctagatgctattatagtgttgaaaggatatggattctgtctgggatgcatttgttgtcctttcagaacccttcctcccattaccctgtgaataaaaacaaatgggaccccctgagaaggacatcttcctacagtgatcacctcaccagcccagtgttgtggctttgtagcgcaccccgtatctaccatattctagaacactgtaatgctactaggctggcccagaaaaggtttaaatgttgaattcacttaaattgcaattgttgcaccatcatggaatcgtgatgtgtattatttatattggcggtggactccaaggtgtagagaaaacttgggtcttgggtaatatggaccatttcatcctcagacttgttaggagtacatttcttggtcttgagaccagtatttttcagttatgtatgcaactgcctttattacacctggttatcacaattcaattctcaggtgttgcagaaaaatctacctctttcagactgtagatggaaataactgtgaaaaaaatgatgcagatatcttctagtttgtgctaaacacactgctttatttttacagcccacgtctttcatgaggatacgaattgttaagaggcagtctcgttttgcttttcaaagacattttgtagagatttttcactaatgtgaatctgattttatctacttgattctgtatagattaagtaaatatgtatgataaactt

SEQ ID NO: 189424 - DNA, 5046 bp, Homo sapiens
  Payload ID: 17406
  Gene Symbol: TLDC1
  Gene Name: TBC/LysM-associated domain containing 1
  Uniprot ID: Q6P9B6
  ENST ID: ENST00000343629
  CDS Start-End: 184-1554
tgactcctctcttgggttccgccccacacctccgcttccacgattggaccaaatgactgcccctcagcaatgttgcctggcaacagggaaggggcggctctcgagaggagcccgtgggctgctggaccggaccggacagcaccaggaagcccggcaggagaattctgccagatatcaggacagatggggaacagcagaagccgtgtggggcggagcttttgttcacagtttcttcctgaggaacaggcagagattgatcaattgtttgatgctctgtcatcagataaaaacagcccgaatgtctcatccaaatccttctctctgaaggcactacagaaccacgtcggggaagctcttcccccagagatggtcaccaggctgtatgatggcatgcggagggtcgacctgacagggaaggcgaagggacccagtgagaacgtgtcccaggagcagttcacagcatccatgtcccacctgttgaaaggaaactccgaggagaagagtctcatgattatgaaaatgatttctgccacagaaggtcccgtgaaggccagagaagtccaaaagtttacagaggatctggttggctctgtggtgcacgtgctaagccacagacaggagctgagaggctggactgggaaggaagccccagggcccaacccccgggtgcaggtgctggctgctcagctgctctctgacatgaagctgcaagatggcaagagacttctggggccccagtggctggactatgactgtgaccgagctgtgatcgaggactgggtgttcagggtcccccatgtggccatattcctgagtgtggtcatttgcaagggctttctcatcctgtgctcgtctcttgatctgactaccctggtccctgagcgtcaagtggaccagggcaggggttttgagagcatcctggatgtcctctctgtcatgtacatcaacgcccagctgcctcgggagcagcggcaccgctggtgcctgctcttttcgtctgagctccatggacacagcttctcccagctctgtggccacatcactcaccggggaccctgtgtggctgtcctcgaggaccatgacaagcatgtgttcggtgggtttgcctcttgctcttgggaggtgaagcctcagtttcaaggggacaacagatgcttcctgttctccatctgccccagcatggctgtgtacacacacacgggctacaacgaccactacatgtacttgaaccatggacagcagacgatcccgaacggactgggtatgggggggcagcacaattactttgggctttgggtggatgttgattttgggaaaggacacagcagagccaagcccacgtgcaccacgtacaacagcccgcagctgtcggctcaggagaacttccagtttgataagatggaggtgtgggcggttggagacccctcagaggagcagttggccaagggcaacaagagcatcctggatgcggaccctgaggcccaggccctgctggagatcagtgggcattcgcgccacagcgaagggctccgggaagtcccggacgatgaatgaggagccgcctgagccttcctggagccaggacctggattcctctgggtagagggcaacgcctgcagcccctcttccctcccacatggtttaactgtaatagcgtaccgcacgggtcacagcctggtagtcccacatgtgccaagaagacgccctctgaagccatgtcctgactcatgggtggatctcccagaaatagatgttttttaagttttctttttttccctacagggtcaccctcaggatctctccaagaaatcttgtgtcaaattagtaactcagtcttatactttgttcttttttaccaacgaaatcctaagcagctgagacctttcagacccccgctggcattagggaattccgctggcattagggaattccgctggcattagggaattccgctggcattagggaattccgctggcattagggaattccgctggcattagggaattccgctggcattagggaattccgctggcattagggaattccgctggcattagggaattccgctggcattagcattgctgggatctcaacttctctattgaggagggggttcctcccgctggggttcatatggcctcactcaggccatccctgttagaaggtggtacctgatggtctgttctgacgggtgagggacagaggcatctggatgaaaatctcgacgctttctgggaacagcttccaatggcatgggagttctgtatttaaaagcatgaactgtgtataaaatggggaaatggaggcaggagactttgaggtaacatggtctggtggtggcatgagtcctcagaaggtatttgtaataaggttccacacccagctctctcagctgtttttaaatgaatgtgtgtgaggaacagatgggaaagttgggagatctgtctacagagaagcaaagttgtggttctcttgctaacttcaaggtgagggacattgggcaccctaagtttgggaacttggttgataaatacgtatatggtccattccataaatcagtggtgagtgactggcctgggttctagacctctgggaaccagcacctgagtcacagctgtctaggcctcggtgctggcctgggttctagatctctgggaaccagtgcctgagtcacagctgtcagtgcagccatttgcccagggctgctcccgagggggatgatgggaaattcagcagtgtagactgactttaaacaagctccggtgatcctgaaatgctgaagatcgtgtaggtgggttgtggggtcagcagagctgccatctgcccacgtctggaaaacaacacacggtgagtcaccggttggccatgagatctccccacttaaaggtgctgtgagcttgtctctaagatatatacctcttccttttgtcttttgctgtaagctttgaccttttgcagatctgatgaaaatacaacctcttattgtatagtttgccttgattataagccatagtaaatcgagctgttcgcatttttgcaggccttgcattttctactgggaggttcatcaaaccttccacttagcaatagccctgactcaggcagaatgcctcataaattagccttcgaaagaaaagtgcacgctcagacagtgtgtggaggggcaggagcgtgatgcagacaaggacttagtcatgactgattttccttagccagtttgtaatggcttatggggaacattgtgagcttcctacctgacatgttggcagaagtagaatattaggatcctcaagcatctctaccgtaagtccaaagaatttaggtccctattgtcactttgttttgcaatgttttttataaaaatgcaattaaatacctcactattaaactgccatgatgcctcagttaaaaaaaaaattaaatgtccgtcagtgtctgtgccttggtgaccattgattgctgcttctgcccaggccgctgcaaaggttaggactttgtccactcacatgctttccaccctgagcttgttctaaggagagtgcagatcacgaatgcacctgcttccaggcagtgcacttagagaaaggtcactggcccgggcttgggagcctgggggatgcagctctctctgtgggcttctcttggtgcacggttctgcctctggacactcaaacctttttagggcgtgtgcagggctggggccagtggacctgacagtaccttacctggctctgagaaactcgcaatcctagtttgcacaaatgaatagtttgttcttttgtgaaaccagaatgagaattcaggttctaaggactagaggtctccctacaaatgaagacttatcagggccctagaaagtgctaggaggaaggggttaaaaaaaaaatttgtccgcgttgcaaactattataaatgattgccacattgcaagctattattttctcccaccatattttttaattaaaaaaaagtctggggccgggtgcggtggctcacgcctgtaatcccagcactttgggaggccgaggtaggcggatcacctgaggtcggaagttcgagaccagcctgaccaacatggagaaaccccatctctactaaaaatacaaaattagctgggcatggtggcacatgcctgtaatctcagctactcaggaggctgaggtagtagaattgcttgaaccagggaggcagaggttgtggtgagccgagatcgtgccattgcactctagcctgggcaacaagagtgaaactccgtttcaagaaaaaaaaaaaggctgggtgtgatggctcacgcctgtaatcccagcattttgggagcttgaggcaggccgattgcttgagcccaggagttcaagaccagcctgggcaacatggcgaaaacccatctctacaaaaaaaaatacgaaaattaaccaggcatggtaacacatgcctgtggtcctagctacttgggaggctgaggtgtgaggatcatttaggcctggaaggttgaggctgctataagctgtgattgtgccactgcactccagcctgggcaacacagcaagaccctatgtttaaaaaaaattgtgtacctggtttagaaaaaaaagataaaaggatacaacttaaagtcagtcatcttcctgcctcttctccagctattttccctcctgacaggcaaaggcactgatgcaaaaatcactcaggtctcctccctgtgacttggtgcacacctgggcatcactgtcttttacacactgatgtgtccctcgctttcttttttaaagggaggtccgtaaccacccacctgcctccctcttgtctttatggactgcgtgatgtcccaccatatggatgctctcgggcctagcgttccaccgtctgcagctggggaacattttgtttgcagctaatcattgtcatgaatatcgtttatgtgtgccttgctgtgatggtgtctgtgggataaactcttagaattggaattgttggattgagaggtatatgccttttatttagatatagatgaattaaaaaaacctcttgagctcaatttatactcaa

SEQ ID NO: 189425 - DNA, 1845 bp, Homo sapiens
  Payload ID: 17406
  Gene Symbol: TLDC1
  Gene Name: TBC/LysM-associated domain containing 1
  ENST ID: ENST00000566995
  CDS Start-End: 263-844
ccgtgggctgctggaccggaccggacagcaccaggaagcccggcagggacagtgagctgataactgttcccaggccatgtaggtggccagcacaggacaggtcaccttctggcccacaggaacttcttgcccaggctcaagctgccccttcgcacaagggcctctgggctctgagacacagacaggacttcgaagcctgtccagatgaggcagttggaatctccccagcttgtggggagaattctgccagatatcaggacagatggggaacagcagaagccgtgtggggcggagcttttgttcacagtttcttcctgaggaacaggcagagattgatcaattgtttgatgctctgtcatcagataaaaacagcccgaatgtctcatccaaatccttctctctgaaggcactacagaaccacgtcggggaagctcttcccccagagatggtcaccaggctgtatgatggcatgcggagggtcgacctgacagggaaggcgaagggacccagtgagaacgtgtcccaggagcagttcacagcatccatgtcccacctgttgaaaggaaactccgaggagaagagtctcatgattatgaaaatgatttctgccacagaaggtcccgtgaaggccagagaagtccaaaagtttacagaggatctggttggctctgtggtgcacgtgctaagccacagacaggagctgagaggctggactgggaaggaagccccagggcccaacccccgggtgcaggtgctggctgctcagctgctctctgacatgaagctgcaaggcaaagacttctggggccccagtggctggactatgactgtgaccgagctgtgatcgaggactgggtgttcagggtcccccatgtggccatattcctgagtgtggtcatttgcaagggctttctcatcctgtgctcgtctcttgatctgactaccctggtccctgagcgtcaagtggaccagggcaggggttttgagagcatcctggatgtcctctctgtcatgtacatcaacgcccagctgcctcgggagcagcggcaccgctggtgcctgctcttttcgtctgagctccatggacacagcttctcccagctctgtggccacatcactcaccggggaccctgtgtggctgtcctcgaggaccatgacaagcatgtgttcggtgggtttgcctcttgctcttgggaggtgaagcctcagtttcaaggggacaacagatgcttcctgttctccatctgccccagcatggctgtgtacacacacacgggctacaacgaccactacatgtacttgaaccatggacagcagacgatcccgaacggactgggtatgggggggcagcacaattactttgggctttgggtggatgttgattttgggaaaggacacagcagagccaagcccacgtgcaccacgtacaacagcccgcagctgtcggctcaggagaacttccagtttgataagatggaggtgtgggcggttggagacccctcagaggagcagttggccaagggcaacaagagcatcctggatgcggaccctgaggcccaggccctgctggagatcagtgggcattcgcgccacagcgaagggctccgggaagtcccggacgatgaatgaggagccgcctgagccttcctggagccaggacctggattcctctgggtagagggcaacgcctgcagcccctcttccctcccacatggtttaactgtaatagcgtaccgcacgggtcacagcctggtagtcccacatgtgccaagaagacgccctctgaagccatgtcctgactcatgggtggatctcccagaaatagatgttttttaagttttcttt

SEQ ID NO: 189426 - DNA, 1837 bp, Homo sapiens
  Payload ID: 17406
  Gene Symbol: TLDC1
  Gene Name: TBC/LysM-associated domain containing 1
  ENST ID: ENST00000570036
  CDS Start-End: 116-289
aatgttgcctggcaacagggaaggggcggctctcgagaggagcccgtgggctgctggaccggaccggacagcaccaggaagcccggcaggagaattctgccagatatcaggacagatggggaacagcagaagccgtgtggggcggagcttttgttcacagtttcttcctgaggaacaggcagagattgatcaattgtttgatgctctgtcatcagataaaaacagcccgaatgtctcatccaaatccttctctctgaaggcactacagaaaggaacctggagtagataatgaatgattcacacgacatttggggacatttctaacttgagatgaacatcagaggagagagatagcctgcctcgtgtgtctcttgaaccacgtccctcctgactgccctcccagagatggggagacagacgcggtgatgggtctgccctcctggactcgtcggtccaggaaccatgacgtgtcaggtgcaccgttgcctctagaatgtaaccacgtcggggaagctcttcccccagagatggtcaccaggctgtatgatggcatgcggagggtcgacctgacagggaaggcgaagggacccagtgagaacgtgtcccaggagcagttcacagcatccatgtcccacctgttgaaaggaaactccgaggagaagagtctcatgattatgaaaatgatttctgccacagaaggtcccgtgaaggccagagaagtccaaaagtttacagaggatctggttggctctgtggtgcacgtgctaagccacagacaggagctgagaggctggactgggaaggaagccccagggcccaacccccgggtgcaggtgctggctgctcagctgctctctgacatgaagctgcaagatggcaagagacttctggggccccagtggctggactatgactgtgaccgagctgtgatcgaggactgggtgttcagggtcccccatgtggccatattcctgagtgtggtcatttgcaagggctttctcatcctgtgctcgtctcttgatctgactaccctggtccctgagcgtcaagtggaccagggcaggggttttgagagcatcctggatgtcctctctgtcatgtacatcaacgcccagctgcctcgggagcagcggcaccgctggtgcctgctcttttcgtctgagctccatggacacagcttctcccagctctgtggccacatcactcaccggggaccctgtgtggctgtcctcgaggaccatgacaagcatgtgttcggtgggtttgcctcttgctcttgggaggtgaagcctcagtttcaaggggacaacagatgcttcctgttctccatctgccccagcatggctgtgtacacacacacgggctacaacgaccactacatgtacttgaaccatggacagcagacgatcccgaacggactgggtatgggggggcagcacaattactttgggctttgggtggatgttgattttgggaaaggacacagcagagccaagcccacgtgcaccacgtacaacagcccgcagctgtcggctcaggagaacttccagtttgataagatggaggtgtgggcggttggagacccctcagaggagcagttggccaagggcaacaagagcatcctggatgcggaccctgaggcccaggccctgctggagatcagtgggcattcgcgccacagcgaagggctccgggaagtcccggacgatgaatgaggagccgcctgagccttcctggagccaggacctggattcctctgggtagagggcaacgcctgcagcccctcttccctcccacatggtttaactgtaatagcgtaccgcacgggtcacagcct

SEQ ID NO: 189427 - DNA, 552 bp, Homo sapiens
  Payload ID: 17406
  Gene Symbol: TLDC1
  Gene Name: TBC/LysM-associated domain containing 1
  ENST ID: ENST00000565765
  CDS Start-End: 417-552
ctcgagaggagcccgtgggctgctggaccggaccggacagcaccaggaagcccggcagggacagtgagctgataactgttcccaggccatgtaggtggccagcacaggacaggtcaccttctggcccacaggaacttcttgcccaggctcaagctgccccttcgcacaagggcctctgggctctgagacacagacaggacttcgaagcctgtccagatgaggcagttggaatctccccagcttgtggggagtcttgctctgtcacccaggctggagtgcactgttgtgatcttggctcactgcgacctctgcctcctggttcaagcgatcttcccacctcagcctcctgaatagctggaactatagtcacacgccaccacacccggctgagagaattctgccagatatcaggacagatggggaacagcagaagccgtgtggggcggagcttttgttcacagtttcttcctgaggaacaggcagagattgatcaattgtttgatgctctgtcatcagataaaaacagcccgaatgtctcatccaaatccttct

SEQ ID NO: 189428 - DNA, 557 bp, Homo sapiens
  Payload ID: 17406
  Gene Symbol: TLDC1
  Gene Name: TBC/LysM-associated domain containing 1
  ENST ID: ENST00000562447
  CDS Start-End: 309-557
agcaccaggaagcccggcaggagtcttgctctgtcacccaggctggagtgcactgttgtgatcttggctcactgcgacctctgcctcctggttcaagcgatcttcccacctcagcctcctgaatagctggaactatagtcacacgccaccacacccggctgagagacggggtcttgcccttttacccaggctggagtgcagtggcacgatcatagctcactgcagccttgacgtcctgtgctcacgcgatcctcccgcctcagcctttggagcagctaggactagaattctgccagatatcaggacagatggggaacagcagaagccgtgtggggcggagcttttgttcacagtttcttcctgaggaacaggcagagattgatcaattgtttgatgctctgtcatcagataaaaacagcccgaatgtctcatccaaatccttctctctgaaggcactacagaaccacgtcggggaagctcttcccccagagatggtcaccaggctgtatgatggcatgcggagggtcgacctgacagggaaggcgaagggacccagt

SEQ ID NO: 189429 - DNA, 557 bp, Homo sapiens
  Payload ID: 17406
  Gene Symbol: TLDC1
  Gene Name: TBC/LysM-associated domain containing 1
  ENST ID: ENST00000565079
  CDS Start-End: 114-557
agtggcccattttctcttggcaggcaaggttgtgcggatatgagtgtccagtctccagcttcgtgggtgcctggaggcaggtgcggagagaattctgccagatatcaggacagatggggaacagcagaagccgtgtggggcggagcttttgttcacagtttcttcctgaggaacaggcagagattgatcaattgtttgatgctctgtcatcagataaaaacagcccgaatgtctcatccaaatccttctctctgaaggcactacagaaccacgtcggggaagctcttcccccagagatggtcaccaggctgtatgatggcatgcggagggtcgacctgacagggaaggcgaagggacccagtgagaacgtgtcccaggagcagttcacagcatccatgtcccacctgttgaaaggaaactccgaggagaagagtctcatgattatgaaaatgatttctgccacagaaggtcccgtgaaggccagagaagtccaaaagtttacagaggatctggttggctctgtggtgcacgtgctaagccacagacaggagctgaga

SEQ ID NO: 189430 - DNA, 2083 bp, Homo sapiens
  Payload ID: 17407
  Gene Symbol: TLDC2
  Gene Name: TBC/LysM-associated domain containing 2
  Uniprot ID: A0PJX2
  ENST ID: ENST00000217320
  CDS Start-End: 45-692
aggattcactcactgcccacggccggctgagcagggacaggagaatgagaggcctccgctggcgttacactcggctgcccagccaggtggaggacaccctgtctggggaggagggtaacgaagaggaagaggaggaggaggcagctccagacccagctgctgctcctgaggatcccacggtgccccagctgacagaagccagccaggttttgagtgcctcagagattcggcagctcagctttcacttcccaccaagagtcaccggccatccctggagtctggtcttctgcacgtcaagggacggtttcagcctgcagagcctgtaccggcggatggagggctgcagcgggccagtgctgctggtgctcagggaccaggacgggcagatatttggagccttctcctcctcggctatccgactcagcaaaggcttctatggtactggcgagacattcctcttctccttctccccacagctgaaggtctttaagtggactggaagcaactctttctttgtgaagggagacttggattcactgatgatgggcagtggcagtggccggtttgggctgtggttggatggagacttgttccgcgggggaagctccccttgcccgaccttcaacaacgaggtgctggcccggcaggagcagttctgcatccaggagctggaggcttggcttctcagctgacagccctgcggcaacagaattctatgattgaagcctctaaatgaattgtgcaggagagggagtttgtaaacaactgactacagacattcacattgggtcatctttaaaaagctggactctgcttttggatgcttctcggaggcgagttggattttggactgaagtactgtcgttccattcctttttttgaggtgttatgagtggggctataacatcgccatcctattaggaagagagagaaaaacaggcaatagagaaaagccagtttccatcatcttatttctgagtgaaagtctcaagtgcgcacatcctcatcttgcatatagattgcttctagctgtcctcaatccagggaaactccaaattacatatgccctgtgcttggggcaaattagaaacactacagtcttacgcaggaagagccttcatgaaaacagccactggcctctgcagagatgactgggagcagcataccactgcccacctctatggcctccttcacacaccttcacggagcacaaactctgtcctgttttcccaggagaaagacgggatgcactgaacccctagcttctctctcgcctggtcccctctgcaataaaaggcccaggtctacaagatggcaaagaaggggaggaagaacagtatgtacctgcagaatttaaatttttctctgcatcaaagctctaacgttggtcccatcagcataggctccagccaaagaagctcctccacccaaaataagggagagatccaaagggaggcgatacaatgacgtgaaaccatagaggtaagaagcaaggcctcctaatacttgactctatgctaaactgttctgaacttgtgggtagatcttctttggttacaagatgatgcacgatcttggagagcctctgttgtaccaggaatacaatgctggtgggaggattcgtgctcctcatctgcttatttgctctcagatccattcttcactcttcctctccctactctgtctcacaggagctactccggtaaattacatttctcagctcccatgcctgttggtttccagttagatttggtcagtgggaggctctggtgggagactggaggtgagaagagggcagagaagtcaggttttttctctccctacctcctctggcacgagcggcagtggcagtgactattctgtggttctagcttttgcaggtggccccagctcctggactcccacctgctcccttggtctctcctatcctagaggtggtagcagcttcctgctgttgaatcactgtcctctatgctcatttagctctgccaaaacttttgtatctcacccccatgttaaattttttctgttgaactacactggatctgacttgatagaactattaaaaatagtttttaaaaaa

SEQ ID NO: 189431 - DNA, 1448 bp, Homo sapiens
  Payload ID: 17407
  Gene Symbol: TLDC2
  Gene Name: TBC/LysM-associated domain containing 2
  ENST ID: ENST00000436941
  CDS Start-End: 1-84
gtctttaagtggactggaagcaactctttctttgtgaagggagacttggattcactgatgatgggcagtggcagaattctatgattgaagcctctaaatgaattgtgcaggagagggagtttgtaaacaactgactacagacattcacattgggtcatctttaaaaagctggactctgcttttggatgcttctcggaggcgagttggattttggactgaagtactgtcgttccattcctttttttgaggtgttatgagtggggctataacatcgccatcctattaggaagagagagaaaaacaggcaatagagaaaagccagtttccatcatcttatttctgagtgaaagtctcaagtgcgcacatcctcatcttgcatatagattgcttctagctgtcctcaatccagggaaactccaaattacatatgccctgtgcttggggcaaattagaaacactacagtcttacgcaggaagagccttcatgaaaacagccactggcctctgcagagatgactgggagcagcataccactgcccacctctatggcctccttcacacaccttcacggagcacaaactctgtcctgttttcccaggagaaagacgggatgcactgaacccctagcttctctctcgcctggtcccctctgcaataaaaggcccaggtctacaagatggcaaagaaggggaggaagaacagtatgtacctgcagaatttaaatttttctctgcatcaaagctctaacgttggtcccatcagcataggctccagccaaagaagctcctccacccaaaataagggagagatccaaagggaggcgatacaatgacgtgaaaccatagaggtaagaagcaaggcctcctaatacttgactctatgctaaactgttctgaacttgtgggtagatcttctttggttacaagatgatgcacgatcttggagagcctctgttgtaccaggaatacaatgctggtgggaggattcgtgctcctcatctgcttatttgctctcagatccattcttcactcttcctctccctactctgtctcacaggagctactccggtaaattacatttctcagctcccatgcctgttggtttccagttagatttggtcagtgggaggctctggtgggagactggaggtgagaagagggcagagaagtcaggttttttctctccctacctcctctggcacgagcggcagtggcagtgactattctgtggttctagcttttgcaggtggccccagctcctggactcccacctgctcccttggtctctcctatcctagaggtggtagcagcttcctgctgttgaatcactgtcctctatgctcatttagctctgccaaaacttttgtatctcacccccatgttaaattttttctgttgaactacactggatctgacttgatagaactattaaaaatagtttttaaaaaa

SEQ ID NO: 189432 - DNA, 1179 bp, Homo sapiens
  Payload ID: 17407
  Gene Symbol: TLDC2
  Gene Name: TBC/LysM-associated domain containing 2
  Uniprot ID: A0PJX2
  ENST ID: ENST00000602922
  CDS Start-End: 55-702
ggcagggctgaggattcactcactgcccacggccggctgagcagggacaggagaatgagaggcctccgctggcgttacactcggctgcccagccaggtggaggacaccctgtctggggaggagggtaacgaagaggaagaggaggaggaggcagctccagacccagctgctgctcctgaggatcccacggtgccccagctgacagaagccagccaggttttgagtgcctcagagattcggcagctcagctttcacttcccaccaagagtcaccggccatccctggagtctggtcttctgcacgtcaagggacggtttcagcctgcagagcctgtaccggcggatggagggctgcagcgggccagtgctgctggtgctcagggaccaggacgggcagatatttggagccttctcctcctcggctatccgactcagcaaaggcttctatggtactggcgagacattcctcttctccttctccccacagctgaaggtctttaagtggactggaagcaactctttctttgtgaagggagacttggattcactgatgatgggcagtggcagtggccggtttgggctgtggttggatggagacttgttccgcgggggaagctccccttgcccgaccttcaacaacgaggtgctggcccggcaggagcagttctgcatccaggagctggaggcttggcttctcagctgacagccctgcggcaacaggtactcagccctgctcatgatgccacccaggccttcctgacacacagcagcctgtgctgtttgaaacacagatggtgaagggccctagagttggccgaggctgctggccagcctccttgtggcctggggacccaagatacaggtgggggcaggcactgctcttttgcagaggtgactttgaaggattaaaagacgcttacaccttactcaagcagcacagagaccctaagctaacagggtcttagaaaactcagaaaaatccacatctcttccccgctagtgcctgcctcctggcaaagggaagatttttcactatgctgttcctcgccagctactgaacgaggaaaaccaacctcatgaacattatcattttagaggttctacaactgattcatgtttattgtagaaaaaccagaagacgttaaaaaaattaaaattgcctaaaattcaacccccccca

SEQ ID NO: 189433 - DNA, 5700 bp, Homo sapiens
  Payload ID: 17408
  Gene Symbol: TBC1D1
  Gene Name: TBC1 (tre-2/USP6, BUB2, cdc16) domain family, member 1
  Uniprot ID: Q86TI0
  ENST ID: ENST00000261439
  CDS Start-End: 356-3862
ctcttcggctgctgctcctggtgccgccaccgtccgccggtgcctgttgctgccgccgccgcgggacctgctgtgtcctcagctgggtggagaagaggcgggcgccgagccgaggggagccccctccccgtccccccgcggcgggaagagcgcagccagccgggtgcgatggactccccgcccgcccaggccgtccccaggatgcccccaagcacctgcgcgtcccggcccggccccgggctctgagcgcgccgcggcacaggtttctgcatatgaagtgtgtaaaatagattgcttgatccaaaacagaaaaacagtgataactgttttgctgagttcccagacccttcccaagatggaaccaataacattcacagcaaggaaacatctgctttctaacgaggtctcggtggattttggcctgcagctggtgggctccctgcctgtgcattccctgaccaccatgcccatgctgccctgggttgtggctgaggtgcgaagactcagcaggcagtccaccagaaaggaacctgtaaccaagcaagtccggctttgcgtttcaccctctggactgagatgtgaacctgagccagggagaagtcaacagtgggatcccctgatctattccagcatctttgagtgcaagcctcagcgtgttcacaaactgattcacaacagtcatgacccaagttactttgcttgtctgattaaggaagacgctgtccaccggcagagtatctgctatgtgttcaaagccgatgatcaaacaaaagtgcctgagatcatcagctccatccgtcaggcggggaagatcgcccggcaggaggagctgcactgcccgtccgagttcgacgacacgttttccaagaagttcgaggtgctcttctgcggccgcgtgacggtggcgcacaagaaggctccgccggccctgatcgacgagtgcatcgagaagttcaatcacgtcagcggcagccgggggtccgagagcccccgccccaacccgccccatgccgcgcccacagggagccaggagcctgtgcgcaggcccatgcgcaagtccttctcccagcccggcctgcgctcgctggcctttaggaaggagctgcaggatgggggcctccgaagcagcggcttcttcagctccttcgaggagagcgacattgagaaccacctcattagcggacacaatattgtgcagcccacagatatcgaggaaaatcgaactatgctcttcacgattggccagtctgaagtttacctcatcagtcctgacaccaaaaaaatagcattggagaaaaattttaaggagatatccttttgctctcagggcatcagacacgtggaccactttgggtttatctgtcgggagtcttccggaggtggcggctttcattttgtctgttacgtgtttcagtgcacaaatgaggctctggttgatgaaattatgatgaccctgaaacaggccttcacggtggccgcagtgcagcagacagctaaggcgccagcccagctgtgtgagggctgccccctgcaaagcctgcacaagctctgtgagaggatagagggaatgaattcttccaaaacaaaactagaactgcaaaagcacctgacgacattaaccaatcaggagcaggcgactatttttgaagaggttcagaaattgagaccgagaaatgagcagcgagagaatgaattgattatttcttttctgagatgtttatatgaagagaaacagaaagaacacatccatattggggagatgaagcagacatcgcagatggcagcagagaatattggaagtgaattaccacccagtgccactcgatttaggctagatatgctgaaaaacaaagcaaagagatctttaacagagtctttagaaagtattttgtcccggggtaataaagccagaggcctgcaggaacactccatcagtgtggatctggatagctccctgtctagtacattaagtaacaccagcaaagagccatctgtgtgtgaaaaggaggccttgcccatctctgagagctcctttaagctcctcggctcctcggaggacctgtccagtgactcggagagtcatctcccagaagagccagctccgctgtcgccccagcaggccttcaggaggcgagcaaacaccctgagtcacttccccatcgaatgccaggaacctccacaacctgcccgggggtccccgggggtttcgcaaaggaaacttatgaggtatcactcagtgagcacagagacgcctcatgaacgaaaggactttgaatccaaagcaaaccatcttggtgattctggtgggactcctgtgaagacccggaggcattcctggaggcagcagatattcctccgagtagccaccccgcagaaggcgtgcgattcttccagcagatatgaagattattcagagctgggagagcttcccccacgatctcctttagaaccagtttgtgaagatgggccctttggccccccaccagaggaaaagaaaaggacatctcgtgagctccgagagctgtggcaaaaggctattcttcaacagatactgctgcttagaatggagaaggaaaatcagaagctccaagcctctgaaaatgatttgctgaacaagcgcctgaagctcgattatgaagaaattactccctgtcttaaagaagtaactacagtgtgggaaaagatgcttagcactccaggaagatcaaaaattaagtttgacatggaaaaaatgcactcggctgttgggcaaggtgtgccacgtcatcaccgaggtgaaatctggaaatttctagctgagcaattccaccttaaacaccagtttcccagcaaacagcagccaaaggatgtgccatacaaagaactcttaaagcagctgacttcccagcagcatgcgattcttattgaccttgggcgaacctttcctacacacccatacttctctgcccagcttggagcaggacagctatcgctttacaacattttgaaggcctactcacttctagaccaggaagtgggatattgccaaggtctcagctttgtagcaggcattttgcttcttcatatgagtgaggaagaggcgtttaaaatgctcaagtttctgatgtttgacatggggctgcggaaacagtatcggccagacatgattattttacagatccagatgtaccagctctcgaggttgcttcatgattaccacagagacctctacaatcacctggaggagcacgagatcggccccagcctctacgctgccccctggttcctcaccatgtttgcctcacagttcccgctgggattcgtagccagagtctttgatatgatttttcttcagggaacagaggtcatatttaaagtggctttaagtctgttgggaagccataagcccttgattctgcagcatgaaaacctagaaaccatagttgactttataaaaagcacgctacccaaccttggcttggtacagatggaaaagaccatcaatcaggtatttgaaatggacatcgctaaacagttacaagcttatgaagttgagtaccacgtccttcaagaagaacttatcgattcctctcctctcagtgacaaccaaagaatggataaattagagaaaaccaacagcagcttacgcaaacagaaccttgacctccttgaacagttgcaggtggcaaatggtaggatccaaagccttgaggccaccattgagaagctcctgagcagtgagagcaagctgaagcaggccatgcttaccttagaactggagcggtcggccctgctgcagacggtggaggagctgcggcggcggagcgcagagcccagcgaccgggagcctgagtgcacgcagcccgagcccacgggcgactgacagctctgcaggagagattgcaacaccatcccacactgtccaggccttaactgagagggacagaagacgctggaaggagagaaggaagcgggaagtgtgcttctcagggaggaaaccggcttgccagcaagtagattcttacgaactccaacttgcaattcagggggcatgtcccagtgttttttttgttgtttttagatactaaatcgtcccttctccagtcctgattactgtacacagtagctttagatggcgtggacgtgaataaatgcaacttatgttttcttgttggttcctttttgagtgtcactgtgtttgtaaagagcattcacaatacggtggaatttcaaaagctggaagagctcgagatcatgcctcaggcaaaggcgtgggtccatcgttcttccgagagggtttgtgtggcgactacaccctcagcgtccctggcaaggtgcagttggctctcgcccattcttgttatggaaacctaagatgatcattgggaagatcagtgatcttgggtcattgatccctggctcagaggatagcggtttccatcataaaccaagatgatgagttcagcctttatccctcgtggttccactagatgtaacttaaaggagttaacatttgaggactttgttctacatcagattttactatttgaatgtttaagatcactttattgaatttgaagatcatcaaattaaataaaatgatttatttaatttggatatcctgatcactgtcaagtgaaatggatctctctctttggtatttaaggaagtttgtctttaaaaaaaaaatagagtgttttcatacatttttgcttatcccataagtacagttgatcaaagtcatagtaggtaaatgctttatgggacagctgacaccttttagaccctaccaggtattgctagcatgtgagctgcagttgtggggtctgagatatttctttgtggtagtttcatacccatactatagagtcatgtatttatttttgcctgttgtgtgatgtaatgcaatcatgttcctttgagtctccatcccttggaaatctgacttcttgcagaaggagtaggcacatcaagatattcaggggtgccccaagagtctgggactttcaaaaaaaaaagatcaggctgaaactgcagtcagatttatgacagctgacagtttttcagaggtcgcacacagtgactctcctctctcaggatgacgaggacctgtgccttcaacaagcaaaatgctgctcacggttgtcctgcttgcagccagtcactgtgtaaagcctctctgatgtgcacttaagagtgggttgctttctcacaaagatggggttctgtgcagtcacaggtcacttccttgacaacacaatcatttctgatctttatcactgtaaccacgtcttctattccataggagtttcttttgattctctcagttgcggggggcatctcttaatcctggggtaaaaggagagattgccatacttagactcactgtgagtctccccggccatttcacgaggagaccacagtgctgccaccagtgcctaaacaggtggctggcattcgagacttcctcctgttccctgggtcagaggatagcggtttccatcataaaccaagatgatgagttcagcctttatccctcgtggttccgctagatgtaacttataggagttaacatttgaggactttgttctgcatcagatcttactatttgaatgtttactgttggattttgggcatcttattactgttactcaaaaacattgactctgcatcaagaaagaaacaagaaagcaataaaacaagaaataattcatgctcaca

SEQ ID NO: 189434 - DNA, 1567 bp, Homo sapiens
  Payload ID: 17408
  Gene Symbol: TBC1D1
  Gene Name: TBC1 (tre-2/USP6, BUB2, cdc16) domain family, member 1
  ENST ID: ENST00000402522
  CDS Start-End: 344-778
tgctcctggtgccgccaccgtccgccggtgcctgttgctgccgccgccgcgggacctgctgtgtcctcagctgggtggagaagaggcgggcgccgagccgaggggagccccctccccgtccccccgcggcgggaagagcgcagccagccgggtgcgatggactccccgcccgcccaggccgtccccaggatgcccccaagcacctgcgcgtcccggcccggccccgggctctgagcgcgccgcggcacaggtttctgcatatgaagtgtgtaaaatagattgcttgatccaaaacagaaaaacagtgataactgttttgctgagttcccagacccttcccaagatggaaccaataacattcacagcaaggaaacatctgctttctaacgaggtctcggtggattttggcctgcagctggtgggctccctgcctgtgcattccctgaccaccatgcccatgctgccctgggttgtggctgaggtgcgaagactcagcaggcagtccaccagaaaggaacctgtaaccaagcaagtccggctttgcgtttcaccctctggactgagatgtgaacctgagccagggagaagtcaacagtgggatcccctgatctattccagcatctttgagtgcaagcctcagcgtgttcacaaactgattcacaacagtcatgacccaagttactttgcttgtctgattaaggaagacgctgtccaccggcagagtatctgctatgtgttcaaagccgatgatcaaacaaaatgctcatcatcactgtaggggacctttgaaagagctgccggagaaggtgaggaagaaagccctgcctggaaagcaacagtgaaccaccagtgtcagcaacgtgaagcttgctgcaaggcctgcagtcatgatgaacccagcagcttctagttcatcccagtggccctgagactatttatcctgtgacttcacacgcgcttggaagttttgttgtgatcttcgctgagtctgtgcggaaatcacaggctagattttagattttttacttttcagcatgtgacttaaagttctgttgacttggggaaagggctgataatcttgtgctaaatcactgatggaatataaattaaaatctccatctctcagtcaatccaagtgtccatcaatggtagactggataaagaaaatgtggtacatacacaccatggaatactatgcagccataaaaagaaacgagatcacgtcctttctaggaacatggatggagctggaaaccattatcctcagcaaactaacaaaggaagagaaaaccaaacaccacatgttctcatttataagtgggagctgaacaatgagaacacgtggacacagggaggagaacaacacacactggggcctgtcacggggcggggtgaggggagggagagcattaggaaaaacagctaatacatgctaggcttgatatctaggcgatgggttggtaggtgcagcaaaccaccatggcacacatttacctatgtaacaaacctgcacatcctgcacatgtaccctgaaacttagaaataaaaatttttcaaaagggaaaaa

SEQ ID NO: 189435 - DNA, 1987 bp, Homo sapiens
  Payload ID: 17408
  Gene Symbol: TBC1D1
  Gene Name: TBC1 (tre-2/USP6, BUB2, cdc16) domain family, member 1
  ENST ID: ENST00000446803
  CDS Start-End: 191-1987
gccccgcgggcgcgacctctcggggcagtgacgaactgggtggagcccgccgccgccgccgccgccgccggggagagcgatgccccggccccgccgctccccaagcccgcccccggccgcccgcgggcccacgggccggcggcgggagtgagcgggagccggcgggcgaagagccgccgcccggcccgcgatgtcaccattgttcagctgggtggccaaggtgcctgagatcatcagctccatccgtcaggcggggaagatcgcccggcaggaggagctgcactgcccgtccgagttcgacgacacgttttccaagaagttcgaggtgctcttctgcggccgcgtgacggtggcgcacaagaaggctccgccggccctgatcgacgagtgcatcgagaagttcaatcacgtcagcggcagccgggggtccgagagcccccgccccaacccgccccatgccgcgcccacagggagccaggagcctgtgcgcaggcccatgcgcaagtccttctcccagcccggcctgcgctcgctggcctttaggaaggagctgcaggatgggggcctccgaagcagcggcttcttcagctccttcgaggagagcgacattgagaaccacctcattagcggacacaatattgtgcagcccacagatatcgaggaaaatcgaactatgctcttcacgattggccagtctgaagtttacctcatcagtcctgacaccaaaaaaatagcattggagaaaaattttaaggagatatccttttgctctcagggcatcagacacgtggaccactttgggtttatctgtcgggagtcttccggaggtggcggctttcattttgtctgttacgtgtttcagtgcacaaatgaggctctggttgatgaaattatgatgaccctgaaacaggccttcacggtggccgcagtgcagcagacagctaaggcgccagcccagctgtgtgagggctgccccctgcaaagcctgcacaagctctgtgagaggatagagggaatgaattcttccaaaacaaaactagaactgcaaaagcacctgacgacattaaccaatcaggagcaggcgactatttttgaagaggttcagaaattgagaccgagaaatgagcagcgagagaatgaattgattatttcttttctgagatgtttatatgaagagaaacagaaagaacacatccatattggggagatgaagcagacatcgcagatggcagcagagaatattggaagtgaattaccacccagtgccactcgatttaggctagatatgctgaaaaacaaagcaaagagatctttaacagagtctttagaaagtattttgtcccggggtaataaagccagaggcctgcaggaacactccatcagtgtggatctggatagctccctgtctagtacattaagtaacaccagcaaagagccatctgtgtgtgaaaaggaggccttgcccatctctgagagctcctttaagctcctcggctcctcggaggacctgtccagtgactcggagagtcatctcccagaagagccagctccgctgtcgccccagcaggccttcaggaggcgagcaaacaccctgagtcacttccccatcgaatgccaggaacctccacaacctgcccgggggtccccgggggtttcgcaaaggaaacttatgaggtatcactcagtgagcacagagacgcctcatgaacgaaaggactttgaatccaaagcaaaccatcttggtgattctggtgggactcctgtgaagacccggaggcattcctggaggcagcagatattcctccgagtagccaccccgcagaaggcgtgcgattcttccagcagatatgaagattattcagagctgggagagcttcccccacgatctcctttagaaccagtttgtgaagatgggccctttggccccccaccagaggaaaagaaaaggacatctcgtgagctccgagagctgtggcaaaaggctatt

SEQ ID NO: 189436 - DNA, 755 bp, Homo sapiens
  Payload ID: 17408
  Gene Symbol: TBC1D1
  Gene Name: TBC1 (tre-2/USP6, BUB2, cdc16) domain family, member 1
  ENST ID: ENST00000443855
  CDS Start-End: 1-755
aaagtattttgtcccggggtaataaagccagaggcctgcaggaacactccatcagtgtggatctggatagctccctgtctagtacattaagtaacaccagcaaagagccatctgtgtgtgaaaaggaggccttgcccatctctgagagctcctttaagctcctcggctcctcggaggacctgtccagtgactcggagagtcatctcccagaagagccagctccgctgtcgccccagcaggccttcaggaggcgagcaaacaccctgagtcacttccccatcgaatgccaggaacctccacaacctgcccgggggtccccgggggtttcgcaaaggaaacttatgaggtatcactcagtgagcacagagacgcctcatgaacgaaatgtggatccttcacctgtgggtgagtctaagcaccgcccaggtcagtcttcagctcctgctcctccacctcgtcttaacccctccgcctcctcgccaaacttttttaagtacctaaaacataattccagtggagaacaaagtgggaatgctgtgccaaagagggactttgaatccaaagcaaaccatcttggtgattctggtgggactcctgtgaagacccggaggcattcctggaggcagcagatattcctccgagtagccaccccgcagaaggcgtgcgattcttccagcagatatgaagattattcagagctgggagagcttcccccacgatctcctttagaaccagtttgtgaagatgggcccttt

SEQ ID NO: 189437 - DNA, 679 bp, Homo sapiens
  Payload ID: 17408
  Gene Symbol: TBC1D1
  Gene Name: TBC1 (tre-2/USP6, BUB2, cdc16) domain family, member 1
  ENST ID: ENST00000421339
  CDS Start-End: 1-679
tccctgtctagtacattaagtaacaccagcaaagagccatctgtgtgtgaaaaggaggccttgcccatctctgagagctcctttaagctcctcggctcctcggaggacctgtccagtgactcggagagtcatctcccagaagagccagctccgctgtcgccccagcaggccttcaggaggcgagcaaacaccctgagtcacttccccatcgaatgccaggaacctccacaacctgcccgggggtccccgggggtttcgcaaaggaaacttatgaggtatcactcagtgagcacagagacgcctcatgaacgaaaggactttgaatccaaagcaaaccatcttggtgattctggtgggactcctgtgaagacccggaggcattcctggaggcagcagatattcctccgagtagccaccccgcagaaggcgtgcgattcttccagcagatatgaagaacctcactgtggatcgccatcgttggcctgtactgaagattattcagagctgggagagcttcccccacgatctcctttagaaccagtttgtgaagatgggccctttggccccccaccagaggaaaagaaaaggacatctcgtgagctccgagagctgtggcaaaaggctattcttcaacagatactgctgcttagaatggagaaggaaaatcagaagctccaag

SEQ ID NO: 189438 - DNA, 2977 bp, Homo sapiens
  Payload ID: 17408
  Gene Symbol: TBC1D1
  Gene Name: TBC1 (tre-2/USP6, BUB2, cdc16) domain family, member 1
  ENST ID: ENST00000510573
  CDS Start-End: 1-2569
gtgcacaaatgaggctctggttgatgaaattatgatgaccctgaaacaggccttcacggtggccgcagtgcagcagacagctaaggcgccagcccagctgtgtgagggctgccccctgcaaagcctgcacaagctctgtgagaggatagagggaatgaattcttccaaaacaaaactagaactgcaaaagcacctgacgacattaaccaatcaggagcaggcgactatttttgaagaggttcagaaattgagaccgagaaatgagcagcgagagaatgaattgattatttcttttctgagatgtttatatgaagagaaacagaaagaacacatccatattggggagatgaagcagacatcgcagatggcagcagagaatattggaagtgaattaccacccagtgccactcgatttaggctagatatgctgaaaaacaaagcaaagagatctttaacagagtctttagaaagtattttgtcccggggtaataaagccagaggcctgcaggaacactccatcagtgtggatctggatagctccctgtctagtacattaagtaacaccagcaaagagccatctgtgtgtgaaaaggaggccttgcccatctctgagagctcctttaagctcctcggctcctcggaggacctgtccagtgactcggagagtcatctcccagaagagccagctccgctgtcgccccagcaggccttcaggaggcgagcaaacaccctgagtcacttccccatcgaatgccaggaacctccacaacctgcccgggggtccccgggggtttcgcaaaggaaacttatgaggtatcactcagtgagcacagagacgcctcatgaacgaaacatctcctaccgtaatgccctgcggaaaaaacttcattcttcttcctctgtgccaaattttctaaaatttctggctcctgtagatgaaaataacacctctgattttatgaacacaaaaagggactttgaatccaaagcaaaccatcttggtgattctggtgggactcctgtgaagacccggaggcattcctggaggcagcagatattcctccgagtagccaccccgcagaaggcgtgcgattcttccagcagatatgaagattattcagagctgggagagcttcccccacgatctcctttagaaccagtttgtgaagatgggccctttggccccccaccagaggaaaagaaaaggacatctcgtgagctccgagagctgtggcaaaaggctattcttcaacagatactgctgcttagaatggagaaggaaaatcagaagctccaagcctctgaaaatgatttgctgaacaagcgcctgaagctcgattatgaagaaattactccctgtcttaaagaagtaactacagtgtgggaaaagatgcttagcactccaggaagatcaaaaattaagtttgacatggaaaaaatgcactcggctgttgggcaaggtgtgccacgtcatcaccgaggtgaaatctggaaatttctagctgagcaattccaccttaaacaccagtttcccagcaaacagcagccaaaggatgtgccatacaaagaactcttaaagcagctgacttcccagcagcatgcgattcttattgaccttgggcgaacctttcctacacacccatacttctctgcccagcttggagcaggacagctatcgctttacaacattttgaaggcctactcacttctagaccaggaagtgggatattgccaaggtctcagctttgtagcaggcattttgcttcttcatatgagtgaggaagaggcgtttaaaatgctcaagtttctgatgtttgacatggggctgcggaaacagtatcggccagacatgattattttacagatccagatgtaccagctctcgaggttgcttcatgattaccacagagacctctacaatcacctggaggagcacgagatcggccccagcctctacgctgccccctggttcctcaccatgtttgcctcacagttcccgctgggattcgtagccagagtctttgatatgatttttcttcagggaacagaggtcatatttaaagtggctttaagtctgttgggaagccataagcccttgattctgcagcatgaaaacctagaaaccatagttgactttataaaaagcacgctacccaaccttggcttggtacagatggaaaagaccatcaatcaggtatttgaaatggacatcgctaaacagttacaagcttatgaagttgagtaccacgtccttcaagaagaacttatcgattcctctcctctcagtgacaaccaaagaatggataaattagagaaaaccaacagcagcttacgcaaacagaaccttgacctccttgaacagttgcaggtggcaaatggtaggatccaaagccttgaggccaccattgagaagctcctgagcagtgagagcaagctgaagcaggccatgcttaccttagaactggagcggtcggccctgctgcagacggtggaggagctgcggcggcggagcgcagagcccagcgaccgggagcctgagtgcacgcagcccgagcccacgggcgactgacagctctgcaggagagattgcaacaccatcccacactgtccaggccttaactgagagggacagaagacgctggaaggagagaaggaagcgggaagtgtgcttctcagggaggaaaccggcttgccagcaagtagattcttacgaactccaacttgcaattcagggggcatgtcccagtgttttttttgttgtttttagatactaaatcgtcccttctccagtcctgattactgtacacagtagctttagatggcgtggacgtgaataaatgcaacttatgttttcttgttggttcctttttgagtgtcactgtgtttgtaaagagcattcacaatacggtggaatttcaaaagctggaagagctcgagatcatgcctcaggcaaaggcgtgggtccatcgttcttccg

SEQ ID NO: 189439 - DNA, 4119 bp, Homo sapiens
  Payload ID: 17408
  Gene Symbol: TBC1D1
  Gene Name: TBC1 (tre-2/USP6, BUB2, cdc16) domain family, member 1
  Uniprot ID: Q86TI0
  ENST ID: ENST00000508802
  CDS Start-End: 356-3835
ctcttcggctgctgctcctggtgccgccaccgtccgccggtgcctgttgctgccgccgccgcgggacctgctgtgtcctcagctgggtggagaagaggcgggcgccgagccgaggggagccccctccccgtccccccgcggcgggaagagcgcagccagccgggtgcgatggactccccgcccgcccaggccgtccccaggatgcccccaagcacctgcgcgtcccggcccggccccgggctctgagcgcgccgcggcacaggtttctgcatatgaagtgtgtaaaatagattgcttgatccaaaacagaaaaacagtgataactgttttgctgagttcccagacccttcccaagatggaaccaataacattcacagcaaggaaacatctgctttctaacgaggtctcggtggattttggcctgcagctggtgggctccctgcctgtgcattccctgaccaccatgcccatgctgccctgggttgtggctgaggtgcgaagactcagcaggcagtccaccagaaaggaacctgtaaccaagcaagtccggctttgcgtttcaccctctggactgagatgtgaacctgagccagggagaagtcaacagtgggatcccctgatctattccagcatctttgagtgcaagcctcagcgtgttcacaaactgattcacaacagtcatgacccaagttactttgcttgtctgattaaggaagacgctgtccaccggcagagtatctgctatgtgttcaaagccgatgatcaaacaaaagtgcctgagatcatcagctccatccgtcaggcggggaagatcgcccggcaggaggagctgcactgcccgtccgagttcgacgacacgttttccaagaagttcgaggtgctcttctgcggccgcgtgacggtggcgcacaagaaggctccgccggccctgatcgacgagtgcatcgagaagttcaatcacgtcagcggcagccgggggtccgagagcccccgccccaacccgccccatgccgcgcccacagggagccaggagcctgtgcgcaggcccatgcgcaagtccttctcccagcccggcctgcgctcgctggcctttaggaaggagctgcaggatgggggcctccgaagcagcggcttcttcagctccttcgaggagagcgacattgagaaccacctcattagcggacacaatattgtgcagcccacagatatcgaggaaaatcgaactatgctcttcacgattggccagtctgaagtttacctcatcagtcctgacaccaaaaaaatagcattggagaaaaattttaaggagatatccttttgctctcagggcatcagacacgtggaccactttgggtttatctgtcgggagtcttccggaggtggcggctttcattttgtctgttacgtgtttcagtgcacaaatgaggctctggttgatgaaattatgatgaccctgaaacaggccttcacggtggccgcagtgcagcagacagctaaggcgccagcccagctgtgtgagggctgccccctgcaaagcctgcacaagctctgtgagaggatagagggaatgaattcttccaaaacaaaactagaactgcaaaagcacctgacgacattaaccaatcaggagcaggcgactatttttgaagaggttcagaaattgagaccgagaaatgagcagcgagagaatgaattgattatttcttttctgagatgtttatatgaagagaaacagaaagaacacatccatattggggagatgaagcagacatcgcagatggcagcagagaatattggaagtgaattaccacccagtgccactcgatttaggctagatatgctgaaaaacaaagcaaagagatctttaacagagtctttagaaagtattttgtcccggggtaataaagccagaggcctgcaggaacactccatcagtgtggatctggatagctccctgtctagtacattaagtaacaccagcaaagagccatctgtgtgtgaaaaggaggccttgcccatctctgagagctcctttaagctcctcggctcctcggaggacctgtccagtgactcggagagtcatctcccagaagagccagctccgctgtcgccccagcaggccttcaggaggcgagcaaacaccctgagtcacttccccatcgaatgccaggaacctccacaacctgcccgggggtccccgggggtttcgcaaaggaaacttatgaggtatcactcagtgagcacagagacgcctcatgaacgaaatgtggatccttcacctgtgggtgagtctaagcaccgcccaggtcagtcttcagctcctgctcctccacctcgtcttaacccctccgcctcctcgccaaacttttttaagtacctaaaacataattccagtggagaacaaagtgggaatgctgtgccaaagagcatctcctaccgtaatgccctgcggaaaaaacttcattcttcttcctctgtgccaaattttctaaaatttctggctcctgtagatgaaaataacacctctgattttatgaacacaaaaagggactttgaatccaaagcaaaccatcttggtgattctggtgggactcctgtgaagacccggaggcattcctggaggcagcagatattcctccgagtagccaccccgcagaaggcgtgcgattcttccagcagatatgaagattattcagagctgggagagcttcccccacgatctcctttagaaccagtttgtgaagatgggccctttggccccccaccagaggaaaagaaaaggacatctcgtgagctccgagagctgtggcaaaaggctattcttcaacagatactgctgcttagaatggagaaggaaaatcagaagctccaagcctctgaaaatgatttgctgaacaagcgcctgaagctcgattatgaagaaattactccctgtcttaaagaagtaactacagtgtgggaaaagatgcttagcactccaggaagatcaaaaattaagtttgacatggaaaaaatgcactcggctgttgggcaaggtgtgccacgtcatcaccgaggtgaaatctggaaatttctagctgagcaattccaccttaaacaccagtttcccagcaaacagcagccaaaggatgtgccatacaaagaactcttaaagcagctgacttcccagcagcatgcgattcttattgaccttgggcgaacctttcctacacacccatacttctctgcccagcttggagcaggacagctatcgctttacaacattttgaaggcctactcacttctagaccaggaagtgggatattgccaaggtctcagctttgtagcaggcattttgcttcttcatatgagtgaggaagaggcgtttaaaatgctcaagtttctgatgtttgacatggggctgcggaaacagtatcggccagacatgattattttacagatggaaaagaccatcaatcaggtatttgaaatggacatcgctaaacagttacaagcttatgaagttgagtaccacgtccttcaagaagaacttatcgattcctctcctctcagtgacaaccaaagaatggataaattagagaaaaccaacagcagcttacgcaaacagaaccttgacctccttgaacagttgcaggtggcaaatggtaggatccaaagccttgaggccaccattgagaagctcctgagcagtgagagcaagctgaagcaggccatgcttaccttagaactggagcggtcggccctgctgcagacggtggaggagctgcggcggcggagcgcagagcccagcgaccgggagcctgagtgcacgcagcccgagcccacgggcgactgacagctctgcaggagagattgcaacaccatcccacactgtccaggccttaactgagagggacagaagacgctggaaggagagaaggaagcgggaagtgtgcttctcagggaggaaaccggcttgccagcaagtagattcttacgaactccaacttgcaattcagggggcatgtcccagtgttttttttgttgtttttagatactaaatcgtcccttctccagtcctgattactgtacacagtagctttagatggcgtggacgtgaataaatgcaacttatgtttt

SEQ ID NO: 189440 - DNA, 530 bp, Homo sapiens
  Payload ID: 17408
  Gene Symbol: TBC1D1
  Gene Name: TBC1 (tre-2/USP6, BUB2, cdc16) domain family, member 1
  ENST ID: ENST00000513936
  CDS Start-End: 1-530
gaatgaattcttccaaaacaaaactagaactgcaaaagcacctgacgacattaaccaatcaggagcaggcgactatttttgaagaggttcagaaattgagaccgagaaatgagcagcgagagaatgaattgattatttcttttctgagatgtttatatgaagagaaacagaaagaacacatccatattggggagatgaagcaggagccatctgtgtgtgaaaaggaggccttgcccatctctgagagctcctttaagctcctcggctcctcggaggacctgtccagtgactcggagagtcatctcccagaagagccagctccgctgtcgccccagcaggccttcaggaggcgagcaaacaccctgagtcacttccccatcgaatgccaggaacctccacaacctgcccgggggtccccgggggtttcgcaaaggaaacttatgaggtatcactcagtgagcacagagacgcctcatgaacgaaaggactttgaatccaaagcaaaccatcttggtgattctggtgggact

SEQ ID NO: 189441 - DNA, 2383 bp, Homo sapiens
  Payload ID: 17408
  Gene Symbol: TBC1D1
  Gene Name: TBC1 (tre-2/USP6, BUB2, cdc16) domain family, member 1
  ENST ID: ENST00000615497
  CDS Start-End: 677-1975
cccaggtttctgcatatgaagtgtgtaaaatagattgcttgatccaaaacagaaaaacagtgataactgttttgctgagttcccagacccttcccaagatggaaccaataacattcacagcaaggaaacatctgctttctaacgaggtctcggtggattttggcctgcagctggtgggctccctgcctgtgcattccctgaccaccatgcccatgctgccctgggttgtggctgaggtgcgaagactcagcaggcagtccaccagaaaggaacctgtaaccaagcaagtccggctttgcgtttcaccctctggactgagatgtgaacctgagccagggagaagtcaacagtgggatcccctgatctattccagcatctttgagtgcaagcctcagcgtgttcacaaactgattctggtgggactcctgtgaagacccggaggcattcctggaggcagcagatattcctccgagtagccaccccgcagaaggcgtgcgattcttccagcagatatgaagattattcagagctgggagagcttcccccacgatctcctttagaaccagtttgtgaagatgggccctttggccccccaccagaggaaaagaaaaggacatctcgtgagctccgagagctgtggcaaaaggctattcttcaacagatactgctgcttagaatggagaaggaaaatcagaagctccaagcctctgaaaatgatttgctgaacaagcgcctgaagctcgattatgaagaaattactccctgtcttaaagaagtaactacagtgtgggaaaagatgcttagcactccaggaagatcaaaaattaagtttgacatggaaaaaatgcactcggctgttgggcaaggtgtgccacgtcatcaccgaggtgaaatctggaaatttctagctgagcaattccaccttaaacaccagtttcccagcaaacagcagccaaaggatgtgccatacaaagaactcttaaagcagctgacttcccagcagcatgcgattcttattgaccttgggcgaacctttcctacacacccatacttctctgcccagcttggagcaggacagctatcgctttacaacattttgaaggcctactcacttctagaccaggaagtgggatattgccaaggtctcagctttgtagcaggcattttgcttcttcatatgagtgaggaagaggcgtttaaaatgctcaagtttctgatgtttgacatggggctgcggaaacagtatcggccagacatgattattttacagatccagatgtaccagctctcgaggttgcttcatgattaccacagagacctctacaatcacctggaggagcacgagatcggccccagcctctacgctgccccctggttcctcaccatgtttgcctcacagttcccgctgggattcgtagccagagtctttgatatgatttttcttcagggaacagaggtcatatttaaagtggctttaagtctgttgggaagccataagcccttgattctgcagcatgaaaacctagaaaccatagttgactttataaaaagcacgctacccaaccttggcttggtacagatggaaaagaccatcaatcaggtatttgaaatggacatcgctaaacagttacaagcttatgaagttgagtaccacgtccttcaagaagaacttatcgattcctctcctctcagtgacaaccaaagaatggataaattagagaaaaccaacagcagcttacgcaaacagaaccttgacctccttgaacagttgcaggtggcaaatggtaggatccaaagccttgaggccaccattgagaagctcctgagcagtgagagcaagctgaagcaggccatgcttaccttagaactggagcggtcggccctgctgcagacggtggaggagctgcggcggcggagcgcagagcccagcgaccgggagcctgagtgcacgcagcccgagcccacgggcgactgacagctctgcaggagagattgcaacaccatcccacactgtccaggccttaactgagagggacagaagacgctggaaggagagaaggaagcgggaagtgtgcttctcagggaggaaaccggcttgccagcaagtagattcttacgaactccaacttgcaattcagggggcatgtcccagtgttttttttgttgtttttagatactaaatcgtcccttctccagtcctgattactgtacacagtagctttagatggcgtggacgtgaataaatgcaacttatgttttcttgttggttcctttttgagtgtcactgtgtttgtaaagagcattcacaatacggtggaatttcaaaagctggaagagctcgagatcatgcctcaggcaaaggcgtgggtccatcgttcttccg

SEQ ID NO: 189442 - DNA, 8101 bp, Homo sapiens
  Payload ID: 17409
  Gene Symbol: TBCK
  Gene Name: TBC1 domain containing kinase
  Uniprot ID: Q8TEA7
  ENST ID: ENST00000273980
  CDS Start-End: 449-3130
tcctcacttctcagaccgggcagccggtcagagacgctcctcacctcccagacggggtggcggcggggcagagacactcctcagttcccagacagggtcgcggccgggcagaggcgctcttcacatctcagacggggcgacggggcagagatgctccccacatcccagatgatgggcggctgggcagagacgctcctcacttcctagacaggatgacggccgggaagaggccagggctggtcctgctgcgaacggactacccattagcagcgcaggccaggtcctctctcctggaggcaagttagagaaggaagacccctacgatcgcaatcggcgatccccgagtgagtgacccgccacgacgtcactcacatgaagcggaggaccacgggttccgagacagccacagcaggaagcatattatcttagaagacctaggactccaaaaatgtttcccctgaaggacgctgaaatgggagcctttaccttctttgcctcggctctgccacatgatgtttgtggaagcaatggacttcctctcacaccaaattccatcaaaattttagggcgctttcaaatccttaaaaccatcacccatcccagactctgccagtatgtggatatttctaggggaaagcatgaacgactagtggtcgtggctgaacattgtgaacgtagtctggaagacttgcttcgagaaaggaaacctgtgagctgttcaacggttttgtgtatagcatttgaggttcttcagggcttgcagtatatgaacaaacatggtatagtacacagggcattgtctcctcataatatcctgttggaccgaaagggacatattaaattggctaaatttggactttatcacatgacagctcatggtgatgatgttgatttcccaatagggtatccctcgtacttggcccctgaggtaattgcacagggaattttcaaaaccactgatcacatgccaagtaaaaaaccattgccttctggccccaaatcagatgtatggtctcttggaatcattttatttgagctttgtgtgggaagaaaattatttcagagcttggatatttctgaaagactaaaatttttgcttactttggattgtgtagatgacactttaatagttctggctgaagagcatggttgtttggacattataaaggagcttcctgaaactgtgatagatcttttgaataagtgccttaccttccatccttctaagaggccaaccccagatcaattaatgaaggacaaagtattcagtgaggtatcacctttatataccccctttaccaaacctgccagtctgttttcatcttctctgagatgtgctgatttaactctgcctgaggatatcagtcagttgtgtaaagatataaataatgattacctggcagaaagatctattgaagaagtgtattacctttggtgtttggctggaggtgacttggagaaagagcttgtcaacaaggaaatcattcgatccaaaccacctatctgcacactccccaattttctctttgaggatggtgaaagctttggacaaggtcgagatagaagctcgcttttagatgataccactgtgacattgtcgttatgccagctaagaaatagattgaaagatgttggtggagaagcattttacccattacttgaagatgaccagtctaatttacctcattcaaacagcaataatgagttgtctgcagctgccacgctccctttaatcatcagagagaaggatacagagtaccaactaaatagaattattctcttcgacaggctgctaaaggcttatccatataaaaaaaaccaaatctggaaagaagcaagagttgacattcctcctcttatgagaggtttaacctgggctgctcttctgggagttgagggagctattcatgccaagtacgatgcaattgataaagacactccaattcctacagatagacaaattgaagtggatattcctcgctgtcatcagtacgatgaactgttatcatcaccagaaggtcatgcaaaatttaggcgtgtattaaaagcctgggtagtgtctcatcctgatcttgtgtattggcaaggtcttgactcactttgtgctccattcctatatctaaacttcaataatgaagccttggcttatgcatgtatgtctgcttttattcccaaatacctgtataacttcttcttaaaagacaactcacatgtaatacaagagtatctgactgtcttctctcagatgattgcatttcatgatccagagctgagtaatcatctcaatgagattggtttcattccagatctctatgccatcccttggtttcttaccatgtttactcatgtatttccactacacaaaattttccacctctgggataccttactacttgggaattcctctttcccattctgtattggagtagcaattcttcagcagctgcgggaccggcttttggctaatggctttaatgagtgtattcttctcttctccgatttaccagaaattgacattgaacgctgtgtgagagaatctatcaacctgttttgttggactcctaaaagtgctacttacagacagcatgctcaacctccaaagccatcttctgacagcagtggaggcagaagttcggcaccttatttctctgctgagtgtccagatcctccaaagacagatctgtcaagagaatccatcccattaaatgacctgaagtcagaagtatcaccacggatttcagcagaggacctgattgacttgtgtgagctcacagtgacaggccacttcaaaacacccagcaagaaaacaaagtccagtaaaccaaagctcctggtggttgacatccggaatagtgaagactttattcgtggtcacatttcaggaagcatcaacattccattcagtgctgccttcactgcagaaggggagcttacccagggcccttacactgctatgctccagaacttcaaagggaaggtcattgtcatcgtggggcatgtggcaaaacacacagctgagtttgcagctcaccttgtgaagatgaaatatccaagaatctgtattctagatggtggcattaataaaataaagccaacaggcctcctcaccatcccatctcctcaaatatgaagaaccaagagtgtgactgccaaaacttagtgtggcatcagcaccaacagcacagttcttcatatccacgccactctcagacaaaactagatgtccagattgttgcatttccgtaaagtttgtcacgagacattttttaaaatctcataacccacatgttcagttatccatgcaagaaacttgactctacatgtattgctgaaagaattttcttaacagtgaaatctgatcatatatttttaccacactgccacataaagcccaagaaattcagctgacaagacagatttagcattatcaagaaatcccatttgccctgaaaaagctgtcctccattgtactgaacagacagtcctgtcgattgtgttatttagaaacatacactgaatgtgggctgaaatcatcatctttccataatgaaaactgagaaactattcacaatgcattccttataaataaatgctacatttagtaactcatttcacccaaacaagggggatgtgtgtgtgtgtgtgtgtataggaagtggagtttatcccattgcagaaagtggtaatacttactcccagaaaaatgaaatttagaaaccatttatatttgatagaatatttggtcagttcctgtagcaaagacgaatggcttaaacaaattttctagtttctttatcacatgaaagtctgtacagtcagtccagggctagtctactggtttcctgatcattaagaactcattaccttctctcattgctttacaaacctcaatatgtggcatccatctcatggatgaaaatggctcctcagcttctaccatcacatctgctatctagaaggaagagaatgagggaaggagggaggggatgaagagaaaagaaggaacaaaagaaggagggaggaaagaagaaaagaaaggaaaagaagcgaagcacactccttccctttaaggtcataaaccagaagttgcgcacactacctctgcttacatatcattggccagaacttgggtgcatggccacacctagctttaaggaaaactggaaatagagtctttgggtggttgatcatttccccagctaaaaacattcttattactgtgtgggaagaagagagtacatattgaggtacagctaacaacctctgcctctgccacattgtttttaaaatgagtattatatttcattaaatctaagacatctcacaattttaggtaccacaaagaaaaaatgaagccaaatgaattgtgacactttgtcaattaaaagacacattccctgggaggccgaggtcaggagtttgagaccagcctggccaacatggggaaactttgtctctactaaaaatataaaaattagctggtcatagtggcacacgtctgcggtcccagctactcaggaggctgaggcaggagaatcacttgaacctgagaggcagaggttgcaatgagccatgatagggccactgtaccccagcctgggcaacagggctcaccctgccatctcaaaaaaaaaaaaaaaaagaaagatacattcccatttcagaaatctgaaaaaaaaaatgcctcatatatatgaaatatagcatatcctttaattatcttcaattttgttttaactaaaaagtgttcattcatctataacttacattccactccaatgttaagactgcctaggcagaacatttcaataagagcctcaattcagctttctgggccatggttttgttgttgctgctattgtttactttattttattttttctttgcatctactttttaaattgagatatacttaaccataaaattcatccttttaacatgtacagttcagtagtttttagtgtattcacaaagttgtgcaatcagtattatccagaatactttcattgtatgcaattgtctacctgatcagcaggtattccacattaacccctcctaaggtctttgataaatttttgtatatggagtgaggggtccaggttcattcttgcatatgagtatccagttgtcccaggacccctcctgttttgtttgttttattcaatttatttggtcattcaccaaatatgttttgaatacctactatgtatttctaagacactaatataatccatagttatatcatttgtgatccttacctagtttacaaggaaaaaaatgtgagaattaatgagaacaaatatataccaagatttcactaacattgtttttgggccattgtctaccctcttcagagaaatattaaatcctcctgtcctggcaattactattttcttccttcagtctttgatgacttacctgagttcataatcagaatgcaccattgatgatcattctgagtcttaactctgccttactgagaaagcagagaagagagggatggaggggcagtgatttgagttgaataaggtggtaggtagtaggagaggatgaagaccttgtgaagagagctatgtaagaagataatagtagcaaccctctgtcatgattttgcatttgatctttcttaaaacgacacatttaggcttattccaagaaattgaagttttttaaacatgaaaattataatatttaatattctcaacagtaaagtaagagcacactatcactgccatgtttatacacagggcatgttatttcatggtggatgatacgaacagttgacctcaacaactatttgttagattaaacgtatataacccaggatttatttgagttcctttttaatgtattattgattcctacacgatgactatcagcactgtttctggctttacctggaatgccataagtaccaccaccagcccacacagatatacatacacacacacacacacacacactcacattcataaacacacttattaactcttgataatctagcaacaacagtgtacctcctccagtcttctctggcttccccatgctgcactaagagccccaaatctactaaagcattccattcataatttactaataatagatttattacatcattttgcaatcgtttgtttacatttagtcccctattaaaatatgagctgcttaagatcaggagctataatttatacctcttgctaccttcagcaacccaccacattggatatgctcaattaatataaaattgaatctatcaattttagaatctatttgaagggagaaaaataaaaataacctgtggtaatttttttcaactgccaaacttatctggtacctgatagtatagaaataaattgaaatctcaattcatggagtgaaaaaaggatctctaaagtcccatccagctctaaaatctgataattctagaagttggagcagataacttccaaaataaggtaatttaatctagttgcatcctcttttcaaaatacagaaatgttagattcaaaaagcatattaaaaataactaatgcttaaccaagtttgaaagaaagaagttttttgatgtcagaaatgaaaaggacctgaaaggcacagcttttaggcccgtgggatacccagtatcaatataagccccaagaactcaggttttggaatacatataggaatagaagacatagctttggatcttatgggtgggagttctaattaagacctctttatgaagtgaccgtctcaaggaactccgctccatgaaatgacaagacataacttcccgccaaattagggaagctacagaggagattgtcattggcctggttattcttgatgaaggaagaaaaatctgttacagacagagttgttcagtggaaagtctggggtaagttcctgatttagaacaggctttagtgcactttaaaaggaaaacaatgaattatataaaacttttagaggacacagtggtgccagatttttgttggattcctgtgctttcctcctccaaatagttaccaaaaaatattcctttgggaattagtatcaaaaggattctatagcatctcaaaagaatcttattcactttgggaggccgaggcaggcagatcacaaggtcaggagatcgagaccatcctggctaacacggtgaaaccccatctctactaaaaatacaaaaaattagccaggcgtggtggtgggcgcctgtagtcccagctactcgggaggctgaggcaggagaatggcgtgaacccaggaggcagagcttgcagtgagccgagatcgctccactgcactccagcctgggagacagagtgagactccgtctcaaaaaagaaaaaaaaaaatcttatgcagtagtcttatttaataaaatccactacaaggagagaagactgctgccttgactatatagaaagggttggcagatatttcattctatcagttgtaactagtaatcccattgttatacatgctgacccaaaatatagctgttattaaccaaataatgcatttttcttgataaatgttgattaaatcagattggaagcaaaatggtaatatttatgatcaattttagtttggatgttcaatgtcaagaccaaaccctcttcacagctaccaacttcaattttatgtggaaaactaatggtgaagagtttcaaactttaactgacacttgacatttaacagggtatgtaattgctcacacacaacctttaggttttgtaatccagttttatctcatacaatattagaaacagtacacattgtaaatacctattttaaaagttagccatattttataaagtcacatgtatttatatcttttctgagtaattttcctgttaatgccttatgataggtgcttgtaacatgaaaactaaacttggatcttggcatattcagtgttctatagatagattgtgatctgtatagcttctacggtgactttcaggcctaatgtctccttttaagttgttattctttaatatcctttctcattcctttcagaggacctattattagtttgcattgtctgcagcatttcaataatactgttctattctaataatactgatctgttctaataaacagttctaaatac

SEQ ID NO: 189443 - DNA, 3312 bp, Homo sapiens
  Payload ID: 17409
  Gene Symbol: TBCK
  Gene Name: TBC1 domain containing kinase
  Uniprot ID: Q8TEA7
  ENST ID: ENST00000361687
  CDS Start-End: 330-2822
aggccaggctgaggggagggtagagggtgaaaagctcggatctgtgtttggggaaggccaggcttgcgctcctcgccgggttccgcgaaggttaaccttggctgacttggctcgcgagcaaagggcagcgtctgagctcccggcgttccaggagtggcctcttttgtaggagcacctgaaatgcagcgtctggtgcactaagccgtagcggcagcagcagccacagcgacagcgctggggccctgtgtagaagctccatcccccttgtctttgtgcttgcctgcgtccccagactcagagattatcttagaagacctaggactccaaaaatgtttcccctgaaggacgctgaaatgggagcctttaccttctttgcctcggctctgccacatgatgtttgtggaagcaatggacttcctctcacaccaaattccatcaaaattttagggcgctttcaaatccttaaaaccatcacccatcccagactctgccagtatgtggatatttctaggggaaagcatgaacgactagtggtcgtggctgaacattgtgaacgtagtctggaagacttgcttcgagaaaggaaacctgtgaggtatccctcgtacttggcccctgaggtaattgcacagggaattttcaaaaccactgatcacatgccaagtaaaaaaccattgccttctggccccaaatcagatgtatggtctcttggaatcattttatttgagctttgtgtgggaagaaaattatttcagagcttggatatttctgaaagactaaaatttttgcttactttggattgtgtagatgacactttaatagttctggctgaagagcatggttgtttggacattataaaggagcttcctgaaactgtgatagatcttttgaataagtgccttaccttccatccttctaagaggccaaccccagatcaattaatgaaggacaaagtattcagtgaggtatcacctttatataccccctttaccaaacctgccagtctgttttcatcttctctgagatgtgctgatttaactctgcctgaggatatcagtcagttgtgtaaagatataaataatgattacctggcagaaagatctattgaagaagtgtattacctttggtgtttggctggaggtgacttggagaaagagcttgtcaacaaggaaatcattcgatccaaaccacctatctgcacactccccaattttctctttgaggatggtgaaagctttggacaaggtcgagatagaagctcgcttttagatgataccactgtgacattgtcgttatgccagctaagaaatagattgaaagatgttggtggagaagcattttacccattacttgaagatgaccagtctaatttacctcattcaaacagcaataatgagttgtctgcagctgccacgctccctttaatcatcagagagaaggatacagagtaccaactaaatagaattattctcttcgacaggctgctaaaggcttatccatataaaaaaaaccaaatctggaaagaagcaagagttgacattcctcctcttatgagaggtttaacctgggctgctcttctgggagttgagggagctattcatgccaagtacgatgcaattgataaagacactccaattcctacagatagacaaattgaagtggatattcctcgctgtcatcagtacgatgaactgttatcatcaccagaaggtcatgcaaaatttaggcgtgtattaaaagcctgggtagtgtctcatcctgatcttgtgtattggcaaggtcttgactcactttgtgctccattcctatatctaaacttcaataatgaagccttggcttatgcatgtatgtctgcttttattcccaaatacctgtataacttcttcttaaaagacaactcacatgtaatacaagagtatctgactgtcttctctcagatgattgcatttcatgatccagagctgagtaatcatctcaatgagattggtttcattccagatctctatgccatcccttggtttcttaccatgtttactcatgtatttccactacacaaaattttccacctctgggataccttactacttgggaattcctctttcccattctgtattggagtagcaattcttcagcagctgcgggaccggcttttggctaatggctttaatgagtgtattcttctcttctccgatttaccagaaattgacattgaacgctgtgtgagagaatctatcaacctgttttgttggactcctaaaagtgctacttacagacagcatgctcaacctccaaagccatcttctgacagcagtggaggcagaagttcggcaccttatttctctgctgagtgtccagatcctccaaagacagatctgtcaagagaatccatcccattaaatgacctgaagtcagaagtatcaccacggatttcagcagaggacctgattgacttgtgtgagctcacagtgacaggccacttcaaaacacccagcaagaaaacaaagtccagtaaaccaaagctcctggtggttgacatccggaatagtgaagactttattcgtggtcacatttcaggaagcatcaacattccattcagtgctgccttcactgcagaaggggagcttacccagggcccttacactgctatgctccagaacttcaaagggaaggtcattgtcatcgtggggcatgtggcaaaacacacagctgagtttgcagctcaccttgtgaagatgaaatatccaagaatctgtattctagatggtggcattaataaaataaagccaacaggcctcctcaccatcccatctcctcaaatatgaagaaccaagagtgtgactgccaaaacttagtgtggcatcagcaccaacagcacagttcttcatatccacgccactctcagacaaaactagatgtccagattgttgcatttccgtaaagtttgtcacgagacattttttaaaatctcataacccacatgttcagttatccatgcaagaaacttgactctacatgtattgctgaaagaattttcttaacagtgaaatctgatcatatatttttaccacactgccacataaagcccaagaaattcagctgacaagacagatttagcattatcaagaaatcccatttgccctgaaaaagctgtcctccattgtactgaacagacagtcctgtcgattgtgttatttagaaacatacactgaatgtgggctgaaatcatcatctttccataatgaaaactgagaaactattcacaatgcattccttataaataaatgctacatttagtaactcatttcacccaaa

SEQ ID NO: 189444 - DNA, 3349 bp, Homo sapiens
  Payload ID: 17409
  Gene Symbol: TBCK
  Gene Name: TBC1 domain containing kinase
  Uniprot ID: Q8TEA7
  ENST ID: ENST00000394706
  CDS Start-End: 306-2870
gggtgaaaagctcggatctgtgtttggggaaggccaggcttgcgctcctcgccgggttccgcgaaggttaaccttggctgacttggctcgcgagcaaagggcagcgtctgagctcccggcgttccaggagtggcctcttttgtaggagcacctgaaatgcagcgtctggtgcactaagccgtagcggcagcagcagccacagcgacagcgctggggccctgtgtagaagctccatcccccttgtctttgtgcttgcctgcgtccccagactcagagattatcttagaagacctaggactccaaaaatgtttcccctgaaggacgctgaaatgggagcctttaccttctttgcctcggctctgccacatgatgtttgtggaagcaatggacttcctctcacaccaaattccatcaaaattttagggcgctttcaaatccttaaaaccatcacccatcccagactctgccagtatgtggatatttctaggggaaagcatgaacgactagtggtcgtggctgaacattgtgaacgtagtctggaagacttgcttcgagaaaggaaacctgtgagctgttcaacggttttgtgtatagcatttgaggttcttcagggcttgcagtatatgaacaaacatggtatagtacacagggcattgtctcctcataatatcctgttggaccgaaagggacatattaaattggctaaatttggactttatcacatgacagctcatggtgatgatgttgatttcccaatagggtatccctcgtacttggcccctgagggaagaaaattatttcagagcttggatatttctgaaagactaaaatttttgcttactttggattgtgtagatgacactttaatagttctggctgaagagcatggttgtttggacattataaaggagcttcctgaaactgtgatagatcttttgaataagtgccttaccttccatccttctaagaggccaaccccagatcaattaatgaaggacaaagtattcagtgaggtatcacctttatataccccctttaccaaacctgccagtctgttttcatcttctctgagatgtgctgatttaactctgcctgaggatatcagtcagttgtgtaaagatataaataatgattacctggcagaaagatctattgaagaagtgtattacctttggtgtttggctggaggtgacttggagaaagagcttgtcaacaaggaaatcattcgatccaaaccacctatctgcacactccccaattttctctttgaggatggtgaaagctttggacaaggtcgagatagaagctcgcttttagatgataccactgtgacattgtcgttatgccagctaagaaatagattgaaagatgttggtggagaagcattttacccattacttgaagatgaccagtctaatttacctcattcaaacagcaataatgagttgtctgcagctgccacgctccctttaatcatcagagagaaggatacagagtaccaactaaatagaattattctcttcgacaggctgctaaaggcttatccatataaaaaaaaccaaatctggaaagaagcaagagttgacattcctcctcttatgagaggtttaacctgggctgctcttctgggagttgagggagctattcatgccaagtacgatgcaattgataaagacactccaattcctacagatagacaaattgaagtggatattcctcgctgtcatcagtacgatgaactgttatcatcaccagaaggtcatgcaaaatttaggcgtgtattaaaagcctgggtagtgtctcatcctgatcttgtgtattggcaaggtcttgactcactttgtgctccattcctatatctaaacttcaataatgaagccttggcttatgcatgtatgtctgcttttattcccaaatacctgtataacttcttcttaaaagacaactcacatgtaatacaagagtatctgactgtcttctctcagatgattgcatttcatgatccagagctgagtaatcatctcaatgagattggtttcattccagatctctatgccatcccttggtttcttaccatgtttactcatgtatttccactacacaaaattttccacctctgggataccttactacttgggaattcctctttcccattctgtattggagtagcaattcttcagcagctgcgggaccggcttttggctaatggctttaatgagtgtattcttctcttctccgatttaccagaaattgacattgaacgctgtgtgagagaatctatcaacctgttttgttggactcctaaaagtgctacttacagacagcatgctcaacctccaaagccatcttctgacagcagtggaggcagaagttcggcaccttatttctctgctgagtgtccagatcctccaaagacagatctgtcaagagaatccatcccattaaatgacctgaagtcagaagtatcaccacggatttcagcagaggacctgattgacttgtgtgagctcacagtgacaggccacttcaaaacacccagcaagaaaacaaagtccagtaaaccaaagctcctggtggttgacatccggaatagtgaagactttattcgtggtcacatttcaggaagcatcaacattccattcagtgctgccttcactgcagaaggggagcttacccagggcccttacactgctatgctccagaacttcaaagggaaggtcattgtcatcgtggggcatgtggcaaaacacacagctgagtttgcagctcaccttgtgaagatgaaatatccaagaatctgtattctagatggtggcattaataaaataaagccaacaggcctcctcaccatcccatctcctcaaatatgaagaaccaagagtgtgactgccaaaacttagtgtggcatcagcaccaacagcacagttcttcatatccacgccactctcagacaaaactagatgtccagattgttgcatttccgtaaagtttgtcacgagacattttttaaaatctcataacccacatgttcagttatccatgcaagaaacttgactctacatgtattgctgaaagaattttcttaacagtgaaatctgatcatatatttttaccacactgccacataaagcccaagaaattcagctgacaagacagatttagcattatcaagaaatcccatttgccctgaaaaagctgtcctccattgtactgaacagacagtcctgtcgattgtgttatttagaaacatacactgaatgtgggctgaaatcatcatctttccataatgaaaactgagaaactattcacaatgcattccttataaataaatgctacatttagtaactca

SEQ ID NO: 189445 - DNA, 3047 bp, Homo sapiens
  Payload ID: 17409
  Gene Symbol: TBCK
  Gene Name: TBC1 domain containing kinase
  Uniprot ID: Q8TEA7
  ENST ID: ENST00000394708
  CDS Start-End: 366-3047
agcgttgggtcgcggtggctgtgagggcggaagaaaaggccaggctgaggggagggtagagggtgaaaagctcggatctgtgtttggggaaggccaggcttgcgctcctcgccgggttccgcgaaggttaaccttggctgacttggctcgcgagcaaagggcagcgtctgagctcccggcgttccaggagtggcctcttttgtaggagcacctgaaatgcagcgtctggtgcactaagccgtagcggcagcagcagccacagcgacagcgctggggccctgtgtagaagctccatcccccttgtctttgtgcttgcctgcgtccccagactcagagattatcttagaagacctaggactccaaaaatgtttcccctgaaggacgctgaaatgggagcctttaccttctttgcctcggctctgccacatgatgtttgtggaagcaatggacttcctctcacaccaaattccatcaaaattttagggcgctttcaaatccttaaaaccatcacccatcccagactctgccagtatgtggatatttctaggggaaagcatgaacgactagtggtcgtggctgaacattgtgaacgtagtctggaagacttgcttcgagaaaggaaacctgtgagctgttcaacggttttgtgtatagcatttgaggttcttcagggcttgcagtatatgaacaaacatggtatagtacacagggcattgtctcctcataatatcctgttggaccgaaagggacatattaaattggctaaatttggactttatcacatgacagctcatggtgatgatgttgatttcccaatagggtatccctcgtacttggcccctgaggtaattgcacagggaattttcaaaaccactgatcacatgccaagtaaaaaaccattgccttctggccccaaatcagatgtatggtctcttggaatcattttatttgagctttgtgtgggaagaaaattatttcagagcttggatatttctgaaagactaaaatttttgcttactttggattgtgtagatgacactttaatagttctggctgaagagcatggttgtttggacattataaaggagcttcctgaaactgtgatagatcttttgaataagtgccttaccttccatccttctaagaggccaaccccagatcaattaatgaaggacaaagtattcagtgaggtatcacctttatataccccctttaccaaacctgccagtctgttttcatcttctctgagatgtgctgatttaactctgcctgaggatatcagtcagttgtgtaaagatataaataatgattacctggcagaaagatctattgaagaagtgtattacctttggtgtttggctggaggtgacttggagaaagagcttgtcaacaaggaaatcattcgatccaaaccacctatctgcacactccccaattttctctttgaggatggtgaaagctttggacaaggtcgagatagaagctcgcttttagatgataccactgtgacattgtcgttatgccagctaagaaatagattgaaagatgttggtggagaagcattttacccattacttgaagatgaccagtctaatttacctcattcaaacagcaataatgagttgtctgcagctgccacgctccctttaatcatcagagagaaggatacagagtaccaactaaatagaattattctcttcgacaggctgctaaaggcttatccatataaaaaaaaccaaatctggaaagaagcaagagttgacattcctcctcttatgagaggtttaacctgggctgctcttctgggagttgagggagctattcatgccaagtacgatgcaattgataaagacactccaattcctacagatagacaaattgaagtggatattcctcgctgtcatcagtacgatgaactgttatcatcaccagaaggtcatgcaaaatttaggcgtgtattaaaagcctgggtagtgtctcatcctgatcttgtgtattggcaaggtcttgactcactttgtgctccattcctatatctaaacttcaataatgaagccttggcttatgcatgtatgtctgcttttattcccaaatacctgtataacttcttcttaaaagacaactcacatgtaatacaagagtatctgactgtcttctctcagatgattgcatttcatgatccagagctgagtaatcatctcaatgagattggtttcattccagatctctatgccatcccttggtttcttaccatgtttactcatgtatttccactacacaaaattttccacctctgggataccttactacttgggaattcctctttcccattctgtattggagtagcaattcttcagcagctgcgggaccggcttttggctaatggctttaatgagtgtattcttctcttctccgatttaccagaaattgacattgaacgctgtgtgagagaatctatcaacctgttttgttggactcctaaaagtgctacttacagacagcatgctcaacctccaaagccatcttctgacagcagtggaggcagaagttcggcaccttatttctctgctgagtgtccagatcctccaaagacagatctgtcaagagaatccatcccattaaatgacctgaagtcagaagtatcaccacggatttcagcagaggacctgattgacttgtgtgagctcacagtgacaggccacttcaaaacacccagcaagaaaacaaagtccagtaaaccaaagctcctggtggttgacatccggaatagtgaagactttattcgtggtcacatttcaggaagcatcaacattccattcagtgctgccttcactgcagaaggggagcttacccagggcccttacactgctatgctccagaacttcaaagggaaggtcattgtcatcgtggggcatgtggcaaaacacacagctgagtttgcagctcaccttgtgaagatgaaatatccaagaatctgtattctagatggtggcattaataaaataaagccaacaggcctcctcaccatcccatctcctcaaatatga

SEQ ID NO: 189446 - DNA, 3362 bp, Homo sapiens
  Payload ID: 17409
  Gene Symbol: TBCK
  Gene Name: TBC1 domain containing kinase
  Uniprot ID: Q8TEA7
  ENST ID: ENST00000432496
  CDS Start-End: 187-2868
attagcagcgcaggccaggtcctctctcctggaggcaagttagagaaggaagacccctacgatcgcaatcggcgatccccgagtgagtgacccgccacgacgtcactcacatgaagcggaggaccacgggttccgagacagccacagcaggaagcatattatcttagaagacctaggactccaaaaatgtttcccctgaaggacgctgaaatgggagcctttaccttctttgcctcggctctgccacatgatgtttgtggaagcaatggacttcctctcacaccaaattccatcaaaattttagggcgctttcaaatccttaaaaccatcacccatcccagactctgccagtatgtggatatttctaggggaaagcatgaacgactagtggtcgtggctgaacattgtgaacgtagtctggaagacttgcttcgagaaaggaaacctgtgagctgttcaacggttttgtgtatagcatttgaggttcttcagggcttgcagtatatgaacaaacatggtatagtacacagggcattgtctcctcataatatcctgttggaccgaaagggacatattaaattggctaaatttggactttatcacatgacagctcatggtgatgatgttgatttcccaatagggtatccctcgtacttggcccctgaggtaattgcacagggaattttcaaaaccactgatcacatgccaagtaaaaaaccattgccttctggccccaaatcagatgtatggtctcttggaatcattttatttgagctttgtgtgggaagaaaattatttcagagcttggatatttctgaaagactaaaatttttgcttactttggattgtgtagatgacactttaatagttctggctgaagagcatggttgtttggacattataaaggagcttcctgaaactgtgatagatcttttgaataagtgccttaccttccatccttctaagaggccaaccccagatcaattaatgaaggacaaagtattcagtgaggtatcacctttatataccccctttaccaaacctgccagtctgttttcatcttctctgagatgtgctgatttaactctgcctgaggatatcagtcagttgtgtaaagatataaataatgattacctggcagaaagatctattgaagaagtgtattacctttggtgtttggctggaggtgacttggagaaagagcttgtcaacaaggaaatcattcgatccaaaccacctatctgcacactccccaattttctctttgaggatggtgaaagctttggacaaggtcgagatagaagctcgcttttagatgataccactgtgacattgtcgttatgccagctaagaaatagattgaaagatgttggtggagaagcattttacccattacttgaagatgaccagtctaatttacctcattcaaacagcaataatgagttgtctgcagctgccacgctccctttaatcatcagagagaaggatacagagtaccaactaaatagaattattctcttcgacaggctgctaaaggcttatccatataaaaaaaaccaaatctggaaagaagcaagagttgacattcctcctcttatgagaggtttaacctgggctgctcttctgggagttgagggagctattcatgccaagtacgatgcaattgataaagacactccaattcctacagatagacaaattgaagtggatattcctcgctgtcatcagtacgatgaactgttatcatcaccagaaggtcatgcaaaatttaggcgtgtattaaaagcctgggtagtgtctcatcctgatcttgtgtattggcaaggtcttgactcactttgtgctccattcctatatctaaacttcaataatgaagccttggcttatgcatgtatgtctgcttttattcccaaatacctgtataacttcttcttaaaagacaactcacatgtaatacaagagtatctgactgtcttctctcagatgattgcatttcatgatccagagctgagtaatcatctcaatgagattggtttcattccagatctctatgccatcccttggtttcttaccatgtttactcatgtatttccactacacaaaattttccacctctgggataccttactacttgggaattcctctttcccattctgtattggagtagcaattcttcagcagctgcgggaccggcttttggctaatggctttaatgagtgtattcttctcttctccgatttaccagaaattgacattgaacgctgtgtgagagaatctatcaacctgttttgttggactcctaaaagtgctacttacagacagcatgctcaacctccaaagccatcttctgacagcagtggaggcagaagttcggcaccttatttctctgctgagtgtccagatcctccaaagacagatctgtcaagagaatccatcccattaaatgacctgaagtcagaagtatcaccacggatttcagcagaggacctgattgacttgtgtgagctcacagtgacaggccacttcaaaacacccagcaagaaaacaaagtccagtaaaccaaagctcctggtggttgacatccggaatagtgaagactttattcgtggtcacatttcaggaagcatcaacattccattcagtgctgccttcactgcagaaggggagcttacccagggcccttacactgctatgctccagaacttcaaagggaaggtcattgtcatcgtggggcatgtggcaaaacacacagctgagtttgcagctcaccttgtgaagatgaaatatccaagaatctgtattctagatggtggcattaataaaataaagccaacaggcctcctcaccatcccatctcctcaaatatgaagaaccaagagtgtgactgccaaaacttagtgtggcatcagcaccaacagcacagttcttcatatccacgccactctcagacaaaactagatgtccagattgttgcatttccgtaaagtttgtcacgagacattttttaaaatctcataacccacatgttcagttatccatgcaagaaacttgactctacatgtattgctgaaagaattttcttaacagtgaaatctgatcatatatttttaccacactgccacataaagcccaagaaattcagctgacaagacagatttagcattatcaagaaatcccatttgccctgaaaaagctgtcctccattgtactgaacagacagtcctgtcgattgtgttatttagaaacatacactgaatgtgggctgaaatcatcatctttccataatgaaaactgagaaactattcacaatgcattccttataaataaatgctacatttagtaactcatttcacccaaacaag

SEQ ID NO: 189447 - DNA, 848 bp, Homo sapiens
  Payload ID: 17409
  Gene Symbol: TBCK
  Gene Name: TBC1 domain containing kinase
  ENST ID: ENST00000509532
  CDS Start-End: 370-848
agcgttgggtcgcggtggctgtgagggcggaagaaaaggccaggctgaggggagggtagagggtgaaaagctcggatctgtgtttggggaaggccaggcttgcgctcctcgccgggttccgcgaaggttaaccttggctgacttggctcgcgagcaaagggcagcgtctgagctcccggcgttccaggagtggcctcttttgtaggagcacctgaaatgcagcgtctggtgcactaagccgtagcggcagcagcagccacagcgacagcgctggggccctgtgtagaagctccatcccccttgtctttgtgcttgcctgcgtccccagactcagaggcagattatcttagaagacctaggactccaaaaatgtttcccctgaaggacgctgaaatgggagcctttaccttctttgcctcggctctgccacatgatgtttgtggaagcaatggacttcctctcacaccaaattccatcaaaattttagggcgctttcaaatccttaaaaccatcacccatcccagactctgccagtatgtggatatttctaggggaaagcatgaacgactagtggtcgtggctgaacattgtgaacgtagtctggaagacttgcttcgagaaaggaaacctgtgagctgttcaacggttttgtgtatagcatttgaggttcttcagggcttgcagtatatgaacaaacatggtatagtacacagggcattgtctcctcataatatcctgttggaccgaaagggacatattaaattggctaaatttggactttatcacatgacagctcatggtgatgatgttgatttcccaatagggtatccctcgtacttggcccctga

SEQ ID NO: 189448 - DNA, 3566 bp, Homo sapiens
  Payload ID: 17409
  Gene Symbol: TBCK
  Gene Name: TBC1 domain containing kinase
  ENST ID: ENST00000467183
  CDS Start-End: 309-770
agagggtgaaaagctcggatctgtgtttggggaaggccaggcttgcgctcctcgccgggttccgcgaaggttaaccttggctgacttggctcgcgagcaaagggcagcgtctgagctcccggcgttccaggagtggcctcttttgtaggagcacctgaaatgcagcgtctggtgcactaagccgtagcggcagcagcagccacagcgacagcgctggggccctgtgtagaagctccatcccccttgtctttgtgcttgcctgcgtccccagactcagagattatcttagaagacctaggactccaaaaatgtttcccctgaaggacgctgaaatgggagcctttaccttctttgcctcggctctgccacatgatgtttgtggaagcaatggacttcctctcacaccaaattccatcaaaattttagggcgctttcaaatccttaaaaccatcacccatcccagactctgccagtatgtggatatttctaggggaaagcatgaacgactagtggtcgtggctgaacattgtgaacgtagtctggaagacttgcttcgagaaaggaaacctgtgagctgttcaacggttttgtgtatagcatttgaggttcttcagggcttgcagtatatgaacaaacatggtatagtacacagggcattgtctcctcataatatcctgttggaccgaaagggacatattaaattggctaaatttggactttatcacatgacagctcatggtgatgatgttgatttcccaataggtatgtgaaagagaagatacttggcaagatagttttaaaatgtatgtagagaagaacaaacacctacaaagagcctgcattttcccaaagagaaactaaaaggtatccctcgtacttggcccctgaggtaattgcacagggaattttcaaaaccactgatcacatgccaagtaaaaaaccattgccttctggccccaaatcagatgtatggtctcttggaatcattttatttgagctttgtgtgggaagaaaattatttcagagcttggatatttctgaaagactaaaatttttgcttactttggattgtgtagatgacactttaatagttctggctgaagagcatggttgtttggacattataaaggagcttcctgaaactgtgatagatcttttgaataagtgccttaccttccatccttctaagaggccaaccccagatcaattaatgaaggacaaagtattcagtgaggtatcacctttatataccccctttaccaaacctgccagtctgttttcatcttctctgagatgtgctgatttaactctgcctgaggatatcagtcagttgtgtaaagatataaataatgattacctggcagaaagatctattgaagaagtgtattacctttggtgtttggctggaggtgacttggagaaagagcttgtcaacaaggaaatcattcgatccaaaccacctatctgcacactccccaattttctctttgaggatggtgaaagctttggacaaggtcgagatagaagctcgcttttagatgataccactgtgacattgtcgttatgccagctaagaaatagattgaaagatgttggtggagaagcattttacccattacttgaagatgaccagtctaatttacctcattcaaacagcaataatgagttgtctgcagctgccacgctccctttaatcatcagagagaaggatacagagtaccaactaaatagaattattctcttcgacaggctgctaaaggcttatccatataaaaaaaaccaaatctggaaagaagcaagagttgacattcctcctcttatgagaggtttaacctgggctgctcttctgggagttgagggagctattcatgccaagtacgatgcaattgataaagacactccaattcctacagatagacaaattgaagtggatattcctcgctgtcatcagtacgatgaactgttatcatcaccagaaggtcatgcaaaatttaggcgtgtattaaaagcctgggtagtgtctcatcctgatcttgtgtattggcaaggtcttgactcactttgtgctccattcctatatctaaacttcaataatgaagccttggcttatgcatgtatgtctgcttttattcccaaatacctgtataacttcttcttaaaagacaactcacatgtaatacaagagtatctgactgtcttctctcagatgattgcatttcatgatccagagctgagtaatcatctcaatgagattggtttcattccagatctctatgccatcccttggtttcttaccatgtttactcatgtatttccactacacaaaattttccacctctgggataccttactacttgggaattcctctttcccattctgtattggagtagcaattcttcagcagctgcgggaccggcttttggctaatggctttaatgagtgtattcttctcttctccgatttaccagaaattgacattgaacgctgtgtgagagaatctatcaacctgttttgttggactcctaaaagtgctacttacagacagcatgctcaacctccaaagccatcttctgacagcagtggaggcagaagttcggcaccttatttctctgctgagtgtccagatcctccaaagacagatctgtcaagagaatccatcccattaaatgacctgaagtcagaagtatcaccacggatttcagcagaggacctgattgacttgtgtgagctcacagtgacaggccacttcaaaacacccagcaagaaaacaaagtccagtaaaccaaagctcctggtggttgacatccggaatagtgaagactttattcgtggtcacatttcaggaagcatcaacattccattcagtgctgccttcactgcagaaggggagcttacccagggcccttacactgctatgctccagaacttcaaagggaaggtcattgtcatcgtggggcatgtggcaaaacacacagctgagtttgcagctcaccttgtgaagatgaaatatccaagaatctgtattctagatggtggcattaataaaataaagccaacaggcctcctcaccatcccatctcctcaaatatgaagaaccaagagtgtgactgccaaaacttagtgtggcatcagcaccaacagcacagttcttcatatccacgccactctcagacaaaactagatgtccagattgttgcatttccgtaaagtttgtcacgagacattttttaaaatctcataacccacatgttcagttatccatgcaagaaacttgactctacatgtattgctgaaagaattttcttaacagtgaaatctgatcatatatttttaccacactgccacataaagcccaagaaattcagctgacaagacagatttagcattatcaagaaatcccatttgccctgaaaaagctgtcctccattgtactgaacagacagtcctgtcgattgtgttatttagaaacatacactgaatgtgggctgaaatcatcatctttccataatgaaaactgagaaactattcacaatgcattccttataaataaatgctacatttagtaa

SEQ ID NO: 189449 - DNA, 897 bp, Homo sapiens
  Payload ID: 17409
  Gene Symbol: TBCK
  Gene Name: TBC1 domain containing kinase
  ENST ID: ENST00000508666
  CDS Start-End: 1-419
caaccccagatcaattaatgaaggacaaagtattcagtgaggtatcacctttatataccccctttaccaaacctgccagtctgttttcatcttctctgagatgtgctgatttaactctgcctgaggatatcagtcagttgtgtaaagatataaataatgattacctggcagaaagatctattgaagaagtgtattacctttggtgtttggctggaggtgacttggagaaagagcttgtcaacaaggaaatcattcgatccaaaccacctatctgcacactccccaattttctctttgaggatggtgaaagctttggacaaggtcgagatagaagctcgcttttagatgataccactgtgacattgtcgttatgccagctaagaaatgagcagacattctgccttcaagttggaagttgaacagcagagcagcagagattgaaagatgttggtggagaagcattttacccattacttgaagatgaccagtctaatttacctcattcaaacagcaataatgagttgtctgcagctgccacgctccctttaatcatcagagagaaggatacagagtaccaactaaatagaattattctcttcgacaggctgctaaaggcttatccatataaaaaaaaccaaatctggaaagaagcaagagttgacattcctcctcttatgagaggtttaacctgggctgctcttctgggagttgagggagctattcatgccaagtacgatgcaattgataaagacactccaattcctacagatagacaaattgaagtggatattcctcgctgtcatcagtacgatgaactgttatcatcaccagaaggtcatgcaaaatttaggcgtgtattaaaagcctgggtagtgtctcatcctgatcttgtgtatt

SEQ ID NO: 189450 - DNA, 865 bp, Homo sapiens
  Payload ID: 17409
  Gene Symbol: TBCK
  Gene Name: TBC1 domain containing kinase
  ENST ID: ENST00000503832
  CDS Start-End: 1-256
gtatccctcgtacttggcccctgaggtaattgcacagggaattttcaaaaccactgatcacatgccaagtaaaaaaccattgccttctggccccaaatcagatgtatggtctcttggaatcattttatttgagctttgtgtgatgagaaaagtgaaacttcaggtggtattaagtagtttgccaaatttatataactatttgatggtggaagagtccaatttggcacacaatcattgctcaactcataaatgctgaagggaagaaaattatttcagagcttggatatttctgaaagactaaaatttttgcttactttggattgtgtagatgacactttaatagttctggctgaagagcatggttgtttggacattataaaggagcttcctgaaactgtgatagatcttttgaataagtgccttaccttccatccttctaagaggttgatattatttagagattgggattacattgagatcctttacgcataagcaattggtttttttcttgttttaatataatggattaaagataatgtacatatggagtagtatataattgacatcagtatcataactgtgaatgatgtaagctttcattttttgtgaattaatgaaaaagtaattaaagttaaactacggtcagaaaactgacatacactaaagaagttactagttcattttcaagcttttaaatagaatattaactaaactatggaatgtaggtattcctagacccaataataacatcagtgaaatgagaataaaagtttgttgtcaatatgtattatagcaatgaacttggatcagtggtgtgataaactaacaattgttgacaataaaaaaggatttcttagaagtttca

SEQ ID NO: 189451 - DNA, 579 bp, Homo sapiens
  Payload ID: 17409
  Gene Symbol: TBCK
  Gene Name: TBC1 domain containing kinase
  ENST ID: ENST00000507696
  CDS Start-End: 376-579
agaaaaggccaggctgaggggagggtagagggtgaaaagctcggatctgtgtttggggaaggccaggcttgcgctcctcgccgggttccgcgaaggttaaccttggctgacttggctcgcgagcaaagggcagcgtctgagctcccggcgttccaggagtggcctcttttgtaggagcacctgaaatgcagcgtctggtgcactaagccgtagcggcagcagcagccacagcgacagcgctggggccctgtgtagaagctccatcccccttgtctttgtgcttgcctgcgtccccagactcagaggctactactttacgcaactttggggcaccatttattttggaattatcttagaagacctaggactccaaaaatgtttcccctgaaggacgctgaaatgggagcctttaccttctttgcctcggctctgccacatgatgtttgtggaagcaatggacttcctctcacaccaaattccatcaaaattttagggcgctttcaaatccttaaaaccatcacccatcccagactctgccagtatgtggatatttctaggggaaagcatgaacgactagtg

SEQ ID NO: 189452 - DNA, 601 bp, Homo sapiens
  Payload ID: 17409
  Gene Symbol: TBCK
  Gene Name: TBC1 domain containing kinase
  ENST ID: ENST00000503516
  CDS Start-End: 433-601
gagacgagttcttgattttcagtttgttcagcatttttcttgttagaggaagaatgatgccttctaagctgtttatattttgtataagaaagtggaagtcctagcctttttatttttaaccattcatagccaaagctgaaataggagcagacattctgccttcaagttggaagttgaacagcagagcagcagagattgaaagatgttggtggagaagcattttacccattacttgaagatgaccagtctaatttacctcattcaaacagcaataatgagttgtctgcagctgccacgctccctttaatcatcagagagaaggatacagagtaccaactaaatagaattattctcttcgacaggctgctaaaggcttatccatataaaaaaaaccaaatctggaaagaagcaagagttgacattcctcctcttatgagaggtttaacctgggctgctcttctgggagttgagggagctattcatgccaagtacgatgcaattgataaagacactccaattcctacagatagacaaattgaagtggatattcctcgctgtcatcagtacgatgaactgttatcatcaccagaaggtcatgcaa

SEQ ID NO: 189453 - DNA, 600 bp, Homo sapiens
  Payload ID: 17409
  Gene Symbol: TBCK
  Gene Name: TBC1 domain containing kinase
  ENST ID: ENST00000509862
  CDS Start-End: 286-600
agtgtccatagcaactagtgtagttctcagtttgttcagcttctttagggaagaaccttatctttttctttttttcatggagtgtaaataactgccaatgttgtggggctggtggcagaattgacgcttctaattattcaacacttcacccttctgatttcaaaccctctgactgctgtttaacattgttcccgccttctctgagtctgaagcctctgaatctgaagggaccaaacaaacctcttgactattacagattatcttagaagacctaggactccaaaaatgtttcccctgaaggacgctgaaatgggagcctttaccttctttgcctcggctctgccacatgatgtttgtggaagcaatggacttcctctcacaccaaattccatcaaaattttagggcgctttcaaatccttaaaaccatcacccatcccagactctgccagtatgtggatatttctaggggaaagcatgaacgactagtggtcgtggctgaacattgtgaacgtagtctggaagacttgcttcgagaaaggaaacctgtgagctgttcaacggttttgtgtatagcatttgaggttcttcagggcttgcag

SEQ ID NO: 189454 - DNA, 282 bp, Homo sapiens
  Payload ID: 17409
  Gene Symbol: TBCK
  Gene Name: TBC1 domain containing kinase
  ENST ID: ENST00000505574
  CDS Start-End: 1-73
attatttcagagcttggatatttctgaaagactaaaatttttgcttactttgggccaaccccagatcaattaatgaaggacaaagtattcagtgaggtatcacctttatataccccctttaccaaacctgccagtctgttttcatcttctctgagatgtgctgatttaactctgcctgaggatatcagtcagttgtgtaaagatataaataatgattacctggcagaaagatctattgaagaagtgtattacctttggtgtttggctggaggtgacttggag

SEQ ID NO: 189455 - DNA, 2077 bp, Homo sapiens
  Payload ID: 17410
  Gene Symbol: TBC1D10A
  Gene Name: TBC1 domain family, member 10A
  Uniprot ID: Q9BXI6
  ENST ID: ENST00000215790
  CDS Start-End: 166-1692
ggggtccgcggcgcccattgggcgtggggggagagctccggggtgggcctggagccccgccccccggccttgcggcggccaataggcgccgcgcgtgggcggggcgtcggcggcagcagggcggctgaggtggccgctggagctcaggcggcgggcgcggctgggatggcgaagagcaacggagagaatgggccgcgcgcgcccgcggccggggaaagcctgtcgggaacccgggagagcctggcccagggccccgacgccgcaaccaccgacgaactcagctctctcgggtctgactcggaggccaacggcttcgccgagcgccgcatcgacaagttcggcttcatcgtgggctcgcagggcgccgagggcgcgctggaggaagtacccctggaggtgctgaggcagagggagtccaagtggctggacatgctcaacaactgggacaaatggatggccaagaagcacaaaaagattcgtctgcggtgccaaaagggcatcccgccttctctgcggggccgtgcttggcagtacctgtcaggaggcaaggtgaagttacagcagaaccctggaaagtttgacgagctggacatgtcccctggggaccccaagtggctggacgtgattgagcgtgacctgcaccggcagttcccattccatgagatgtttgtgtcccgggggggccacggccagcaggacctattccgtgtgctgaaggcctacacgctgtaccggcccgaggagggctactgccaggcccaggcgcccattgccgctgtcttgctcatgcatatgcctgctgagcaagccttctggtgcctggtacagatctgtgagaagtacctgcccggctactacagcgagaaactggaggcgatccagctggacggggagatccttttctcgctgttgcagaaggtgtcgccggtggcccacaagcacctcagccgtcagaagatcgacccgctcctctatatgacagaatggttcatgtgcgccttctcccgaaccttgccctggagctctgtgctgcgtgtctgggacatgttcttctgtgaaggggtcaagatcatcttccgggtggggctggtgctgctgaagcacgcgctgggctcccctgagaaggtcaaagcctgccagggccagtacgagaccatcgagcgactgcggagcctcagccccaagatcatgcaggaggcctttctggtccaggaggtggtggagttgcccgtgacagagcgccagattgagcgcgaacacctcattcagctgcggcgctggcaggagacccggggtgagctgcagtgccgctccccgcccaggctgcatggtgccaaggctatcttggatgcagaacctggtccccggcctgccctacaaccttcaccatccatccgcctgcccctagatgcccccctccctggctccaaagccaagcccaagccacccaagcaggcccagaaggagcagcggaaacagatgaaggggagagggcagctggagaagcccccagccccaaatcaagccatggtggtggccgctgcaggagatgcatgtcccccacagcatgtgcccccgaaggactcagcccccaaggactcagcccctcaggatttggctccccaggtctcagcccaccaccgctcccaggagagcttgacgtcccaagagagtgaggacacctacttgtaaccctggcagctaaggcctccagggcggggtctccatataactacacggttcatgaactgacattccacatcctgcccaccctctgagggccaagctgcctggccactgggctgggctggagtctggctggtccaacacagattctgcctggtccaacacagattctgcctgagcctccttatttattttctttacagtggcactcaggctggcccagccagggcaggcagaagctagggcctggggggtggggcctccttcagccccctcctcctgggggatgctccccagggttagggtgctggtgtgaggggaaagggtggggtgttctttgtgtaaaatagaaacatggttttgtacagaaataaacagccttgtatagaga

SEQ ID NO: 189456 - DNA, 578 bp, Homo sapiens
  Payload ID: 17410
  Gene Symbol: TBC1D10A
  Gene Name: TBC1 domain family, member 10A
  ENST ID: ENST00000393906
  CDS Start-End: 116-578
gtgtcctgttcctgagaacctcctctgagctgcctccgactctgtgctcctttctgagaggctggaggaagtacccctggaggtgctgaggcagagggagtccaagtggctggacatgctcaacaactgggacaaatggatggccaagaagcacaaaaagattcgtctgcggtgccaaaagggcatcccgccttctctgcggggccgtgcttggcagtacctgtcaggaggcaaggtgaagttacagcagaaccctggaaagtttgacgagctggacatgtcccctggggaccccaagtggctggacgtgattgagcgtgacctgcaccggcagttcccattccatgagatgtttgtgtcccgggggggccacggccagcaggacctattccgtgtgctgaaggcctacacgctgtaccggcccgaggagggctactgccaggcccaggcgcccattgccgctgtcttgctcatgcatatgcctgctgagcaagccttctggtgcctggtacagatctgtgagaagtacctgcccggctactacagcgagaaactggaggcgatccagctggacgggg

SEQ ID NO: 189457 - DNA, 1950 bp, Homo sapiens
  Payload ID: 17410
  Gene Symbol: TBC1D10A
  Gene Name: TBC1 domain family, member 10A
  Uniprot ID: Q9BXI6
  ENST ID: ENST00000403477
  CDS Start-End: 21-1568
aggcggcgggcgcggctgggatggcgaagagcaacggagagaatgggccgcgcgcgcccgcggccggggaaagcctgtcgggaacccgggagagcctggcccagggccccgacgccgcaaccaccgacgaactcagctctctcgggtctgactcggaggccaacggcttcgccgagcgccgcatcgacaagttcggcttcatcgtgggctcgcagggcgccgagggcgcgccctgccctctgctccacaggctggaggaagtacccctggaggtgctgaggcagagggagtccaagtggctggacatgctcaacaactgggacaaatggatggccaagaagcacaaaaagattcgtctgcggtgccaaaagggcatcccgccttctctgcggggccgtgcttggcagtacctgtcaggaggcaaggtgaagttacagcagaaccctggaaagtttgacgagctggacatgtcccctggggaccccaagtggctggacgtgattgagcgtgacctgcaccggcagttcccattccatgagatgtttgtgtcccgggggggccacggccagcaggacctattccgtgtgctgaaggcctacacgctgtaccggcccgaggagggctactgccaggcccaggcgcccattgccgctgtcttgctcatgcatatgcctgctgagcaagccttctggtgcctggtacagatctgtgagaagtacctgcccggctactacagcgagaaactggaggcgatccagctggacggggagatccttttctcgctgttgcagaaggtgtcgccggtggcccacaagcacctcagccgtcagaagatcgacccgctcctctatatgacagaatggttcatgtgcgccttctcccgaaccttgccctggagctctgtgctgcgtgtctgggacatgttcttctgtgaaggggtcaagatcatcttccgggtggggctggtgctgctgaagcacgcgctgggctcccctgagaaggtcaaagcctgccagggccagtacgagaccatcgagcgactgcggagcctcagccccaagatcatgcaggaggcctttctggtccaggaggtggtggagttgcccgtgacagagcgccagattgagcgcgaacacctcattcagctgcggcgctggcaggagacccggggtgagctgcagtgccgctccccgcccaggctgcatggtgccaaggctatcttggatgcagaacctggtccccggcctgccctacaaccttcaccatccatccgcctgcccctagatgcccccctccctggctccaaagccaagcccaagccacccaagcaggcccagaaggagcagcggaaacagatgaaggggagagggcagctggagaagcccccagccccaaatcaagccatggtggtggccgctgcaggagatgcatgtcccccacagcatgtgcccccgaaggactcagcccccaaggactcagcccctcaggatttggctccccaggtctcagcccaccaccgctcccaggagagcttgacgtcccaagagagtgaggacacctacttgtaaccctggcagctaaggcctccagggcggggtctccatataactacacggttcatgaactgacattccacatcctgcccaccctctgagggccaagctgcctggccactgggctgggctggagtctggctggtccaacacagattctgcctggtccaacacagattctgcctgagcctccttatttattttctttacagtggcactcaggctggcccagccagggcaggcagaagctagggcctggggggtggggcctccttcagccccctcctcctgggggatgctccccagggttagggtgctggtgtgaggggaaagggtggggtgttctttgtgtaaaatagaaacatggttttgtacagaaataaacagccttgtatag

SEQ ID NO: 189458 - DNA, 1833 bp, Homo sapiens
  Payload ID: 17410
  Gene Symbol: TBC1D10A
  Gene Name: TBC1 domain family, member 10A
  ENST ID: ENST00000403362
  CDS Start-End: 204-1466
cccggaaggcggacgttgcagtgagccgagatcgcgccattgcactccagcctgggcaacaagcgcaaaactccgtctcaaaaaaataaaataaaaaggggagaatgatgttatagtagggttattacaaaaggtacatgtgataaaggctggaggaagtacccctggaggtgctgaggcagagggagtccaagtggctggacatgctcaacaactgggacaaatggatggccaagaagcacaaaaagattcgtctgcggtgccaaaagggcatcccgccttctctgcggggccgtgcttggcagtacctgtcaggaggcaaggtgaagttacagcagaaccctggaaagtttgacgagctggacatgtcccctggggaccccaagtggctggacgtgattgagcgtgacctgcaccggcagttcccattccatgagatgtttgtgtcccgggggggccacggccagcaggacctattccgtgtgctgaaggcctacacgctgtaccggcccgaggagggctactgccaggcccaggcgcccattgccgctgtcttgctcatgcatatgcctgctgagcaagccttctggtgcctggtacagatctgtgagaagtacctgcccggctactacagcgagaaactggaggcgatccagctggacggggagatccttttctcgctgttgcagaaggtgtcgccggtggcccacaagcacctcagccgtcagaagatcgacccgctcctctatatgacagaatggttcatgtgcgccttctcccgaaccttgccctggagctctgtgctgcgtgtctgggacatgttcttctgtgaaggggtcaagatcatcttccgggtggggctggtgctgctgaagcacgcgctgggctcccctgagaaggtcaaagcctgccagggccagtacgagaccatcgagcgactgcggagcctcagccccaagatcatgcaggaggcctttctggtccaggaggtggtggagttgcccgtgacagagcgccagattgagcgcgaacacctcattcagctgcggcgctggcaggagacccggggtgagctgcagtgccgctccccgcccaggctgcatggtgccaaggctatcttggatgcagaacctggtccccggcctgccctacaaccttcaccatccatccgcctgcccctagatgcccccctccctggctccaaagccaagcccaagccacccaagcaggcccagaaggagcagcggaaacagatgaaggggagagggcagctggagaagcccccagccccaaatcaagccatggtggtggccgctgcaggagatgcatgtcccccacagcatgtgcccccgaaggactcagcccccaaggactcagcccctcaggatttggctccccaggtctcagcccaccaccgctcccaggagagcttgacgtcccaagagagtgaggacacctacttgtaaccctggcagctaaggcctccagggcggggtctccatataactacacggttcatgaactgacattccacatcctgcccaccctctgagggccaagctgcctggccactgggctgggctggagtctggctggtccaacacagattctgcctggtccaacacagattctgcctgagcctccttatttattttctttacagtggcactcaggctggcccagccagggcaggcagaagctagggcctggggggtggggcctccttcagccccctcctcctgggggatgctccccagggttagggtgctggtgtgaggggaaagggtggggtgttctttgtgtaaaatagaaacatggttttgtacagaaata

SEQ ID NO: 189459 - DNA, 861 bp, Homo sapiens
  Payload ID: 17410
  Gene Symbol: TBC1D10A
  Gene Name: TBC1 domain family, member 10A
  ENST ID: ENST00000437122
  CDS Start-End: 67-354
cggggcgtcggcggcagcagggcggctgaggtggccgctggagctcaggcggcgggcgcggctgggatggcgaagagcaacggagagaatgggccgcgcgcgcccgcggccggggaaagcctgtcgggaacccgggagagcctggcccagggccccgacgccgcaaccaccgacgaactcagctctctcgggtctgactcggaggccaacggcttcgccgagcgccgcatcgacaagttcggcttcatcgtgggctcgcagggcgccgagggcgcattcgtctgcggtgccaaaagggcatcccgccttctctgcggggccgtgcttggcagtacctgtcaggaggcaaggtgaagttacagcagaaccctggaaagtttgacgagctggacatgtcccctggggaccccaagtggctggacgtgattgagcgtgacctgcaccggcagttcccattccatgagatgtttgtgtcccgggggggccacggccagcaggacctattccgtgtgctgaaggcctacacgctgtaccggcccgaggagggctactgccaggcccaggcgcccattgccgctgtcttgctcatgcatatgcctgctgagcaagccttctggtgcctggtacagatctgtgagaagtacctgcccggctactacagcgagaaactggaggcgatccagctggacggggagatccttttctcgctgttgcagaaggtgtcgccggtggcccacaagcacctcagccgtcagaagatcgacccgctcctctatatgacagaatggttcatgtgcgccttctcccgaaccttgccctggagctctgtgctgcgtgtctgggacatgttcttctgtgaag

SEQ ID NO: 189460 - DNA, 2021 bp, Homo sapiens
  Payload ID: 17410
  Gene Symbol: TBC1D10A
  Gene Name: TBC1 domain family, member 10A
  ENST ID: ENST00000433426
  CDS Start-End: 170-1060
ggcatggaagacggcataaagaggagctggattgcaggcagtgagacctgttgggagaatcaaggatggcctaaaagggctgtggtgagacctggaagaggtctggagcagtgaggataaagaggctggcaaatcattagtgcttggttcatgactgccatgtgggctgatggagaggctggaggaagtacccctggaggtgctgaggcagagggagtccaagtggctggacatgctcaacaactgggacaaatggatggccaagaagcacaaaaagattcgtctgcggtgccaaaagggcatcccgccttctctgcggggccgtgcttggcagtacctgtcaggaggcaaggtgaagttacagcagaaccctggaaagtttgacgagctggacatgtcccctggggaccccaagtggctggacgtgattgagcgtgacctgcaccggcagttcccattccatgagatgtttgtgtcccgggggggccacggccagcaggacctattccgtgtgctgaaggcctacacgctgtaccggcccgaggagggctactgccaggcccaggcgcccattgccgctgtcttgctcatgcatatgcctgctgagcaagccttctggtgcctggtacagatctgtgagaagtacctgcccggctactacagcgagaaactggaggcgatccagctggacggggagatccttttctcgctgttgcagaaggtgtcgccggtggcccacaagcacctcagccgtcagaagatcgacccgctcctctatatgacagaatggttcatgtgcgccttctcccgaaccttgccctggagctctgtgctgcgtgtctgggacatgttcttctgtgaaggggtcaagatcatcttccgggtggggctggtgctgctgaagcacgcgctgggctcccctgagaaggtcaaagcctgccagggccagtacgagaccatcgagcgactgcggagcctcagccccaagatcatgcaggaggcctttctggtccaggaggggcaattaggtggaacatgcgtgaccagcttttacacatgaggaaatggaggctcacagaggcagaatcactaagcaactccccttaaagtcacccacccaggtggagctggaatttgagcctaagcagccaggctgccctgggcagcggtgggtgacaggtggtggagttgcccgtgacagagcgccagattgagcgcgaacacctcattcagctgcggcgctggcaggagacccggggtgagctgcagtgccgctccccgcccaggctgcatggtgccaaggctatcttggatgcagaacctggtccccggcctgccctacaaccttcaccatccatccgcctgcccctagatgcccccctccctggctccaaagccaagcccaagccacccaagcaggcccagaaggagcagcggaaacagatgaaggggagagggcagctggagaagcccccagccccaaatcaagccatggtggtggccgctgcaggagatgcatgtcccccacagcatgtgcccccgaaggactcagcccccaaggactcagcccctcaggatttggctccccaggtctcagcccaccaccgctcccaggagagcttgacgtcccaagagagtgaggacacctacttgtaaccctggcagctaaggcctccagggcggggtctccatataactacacggttcatgaactgacattccacatcctgcccaccctctgagggccaagctgcctggccactgggctgggctggagtctggctggtccaacacagattctgcctggtccaacacagattctgcctgagcctccttatttattttctttacagtggcactcaggctggcccagccagggcaggcagaagctagggcctggggggtggggcctccttcagccccctcctcctgggggatgctccccagggttagggtgctggtgtgaggggaaagggtggggtgttctttgtgtaaaatagaaacatggttttgtacagaaa

SEQ ID NO: 189461 - DNA, 3350 bp, Homo sapiens
  Payload ID: 17411
  Gene Symbol: TBC1D10B
  Gene Name: TBC1 domain family, member 10B
  Uniprot ID: Q4KMP7
  ENST ID: ENST00000409939
  CDS Start-End: 82-2508
ggctggcctcgccgggaggcccgaggggcggcgccttctgcggcctccccggcggggggatgtgaggggcggcccgcggccatggagacgggcacggcgcccctggtggccccgccgcgccgtcatggcgcccccgcggccccctcgccgccgccccggggttcccgggccgggcccgtcgtggtggtggctccgggacctccagtgactacggccacttcggcccccgtcaccctggtggcccccggggaggcgcggcccgcctgggtcccggggtcggccgagacctctgctccggccccggccccagccccggccccagccccggctgtcacgggcagcacggtggtggtgctgaccctggaggcctcgcccgaagccccaaagccgcagctcccctccggcccggaatccccagagcccgcggcagtggctggagttgagacatcgagggctctggccgcaggggcagactcgccgaagacagaggaggctcgaccctcacccgccccaggaccagggacccccaccgggacccctaccaggaccccttccagaacggctcctggtgccctgaccgccaaacccccgcttgcccccaagccgggaaccacagtggcctcaggagtgactgcacggagtgcatcaggacaagtgacaggtgggcatggagctgccgcagcaacatcagcatcagcaggacaggctcctgaggacccctcaggccctggcacaggcccctctgggacttgtgaggctccggtagctgtcgtgaccgtgaccccagctccggagcctgctgaaaactctcaagacctgggctccacgtccagcctgggacctggcatctctgggcctcgagggcaggccccggacacgctgagttacttggactccgtgagcctcatgtctgggaccttggagtccttggcggatgatgtgagctccatgggctcagattcagagataaacgggctggccctgcgcaagacggacaagtatggcttccttgggggcagccagtactcgggcagcctagagagctccattcccgtggacgtggctcggcagcgggagctcaaatggctggacatgttcagtaactgggataagtggctgtcacggcgattccagaaggtgaagctgcgctgccggaaggggatcccctcctctctcagagccaaagcctggcagtacctgtctaatagcaaggaacttctggagcagaacccaggaaagtttgaggagctggaacgggctcctggggaccccaagtggctggatgtgattgagaaggacctgcaccgccagttccctttccacgagatgtttgctgctcgaggggggcatgggcaacaggacctgtaccgaatcctgaaggcctacaccatctaccggcctgacgagggttactgccaggcccaggcccccgtggctgcggtcctgctcatgcacatgcctgcggagcaagccttttggtgcctggtgcagatctgcgacaagtacctcccaggttactacagtgcagggctggaggccattcagctggacggggagatcttttttgcactcctgcgccgggcctccccgctggcgcatcgccacctgcggcggcagcgcattgaccctgtgctctacatgacggagtggttcatgtgcatcttcgcccgcaccctgccctgggcgtcggtgctgcgtgtctgggacatgtttttctgtgaaggcgttaagatcatcttccgggtggccctggtcctgctgcgccacacgctgggctcagtggagaagctgcgctcctgccaaggcatgtatgagaccatggagcagctgcgtaacctgccccagcagtgcatgcaggaagacttcctggtgcatgaggtgaccaatctgccggtgacagaagcactgattgagcgggagaatgcagcccagctcaagaagtggcgggaaacgcggggggagctgcagtatcggccctcacggcgactgcatgggtcccgggccatccacgaggagcgccggcggcaacagccacccctgggcccctcctccagcctcctcagcctccctggcctcaagagccgaggctcccgggcagctggaggggccccgtccccgccgccccccgtccgcagagccagtgctgggcctgccccagggcctgtggtcactgctgagggactgcatccatcccttccctcacccactggcaatagcacccccttgggttccagcaaggagacccggaagcaggagaaggagcggcagaaacaggagaaggagcggcagaaacaggagaaggagcgggagaaggagcggcagaagcaggagaaagagcgagagaagcaggaaaaggagcgagagaagcaggagaaggagcggcagaagcaggagaagaaggctcaaggccggaagctttcgctgcgtcgaaaggcagatgggcccccaggcccccatgatggtggggacaggccctcagccgaggcccggcaggacgcttacttctgacctctgccctggggctggactgcatggcccccctctttccctcagccaagaacaggcctggcccaaggtgccaccccctagcaccttgtcaggctgtcccttgctggggaaagtggcttggttccccatctcctcgccagctgctgatccctacacgggcaggacagatgggcagctgcaaatgagtctggagcctctcatctcccatgaggctcagctggggtctctgtcgctcctgccccagttccctctgggtcccctcctaggtgctgtcctgaatggcccgttgtcatcccaggggtgactcctggtgatgggagtcagcagtttcagattcttacactccatagctccccttaccatgaggtggagctggcttccttttccctgtcttcagccctccctgtctcccccacttcctggccagggctctcattctggacctgtgttgtaattgtgtacagaggatggcgttggcctggggtgggggtgctcgctttgtcttctgtcctttggttctccttccataatgctcctgtacccagtttatttaaggggacatgcactggaataggaaatgtcccccatctcccttcctgcaccctgctgtgctccctccaaacccaccttgctctgtgttctcaggcccccctgcttttgtctcaccaggacccatacctttcaccttgttcccttccacccctccagttagtccctatctgggtaagggtcttcccttgagctccagggggtggaacccaatgtttacattctcttctgtctctgcccccaccccatgcagcgctttgaggaattggaaaagaacctgctgttgtacctgg

SEQ ID NO: 189462 - DNA, 1031 bp, Homo sapiens
  Payload ID: 17411
  Gene Symbol: TBC1D10B
  Gene Name: TBC1 domain family, member 10B
  ENST ID: ENST00000490703
  CDS Start-End: 1-555
gtgaagctgcgctgccggaaggggatcccctcctctctcagagccaaagcctggcagtacctgtctaatagcaaggaacttctggagcagaacccaggaaagtttgaggagctggaacgggctcctggggaccccaagtggctggatgtgattgagaaggacctgcaccgccagttccctttccacgagatgtttgctgctcgaggggggcatgggcaacaggacctgtaccgaatcctgaaggcctacaccatctaccggcctgacgagggttactgccaggcccaggcccccgtggctgcggtcctgctcatgcacatgcctgcggagcaagccttttggtgcctggtgcagatctgcgacaagtacctcccaggttactacagtgcagggctggcgttaagatcatcttccgggtggccctggtcctgctgcgccacacgctgggctcagtggagaagctgcgctcctgccaaggcatgtatgagaccatggagcagctgcgtaacctgccccagcagtgcatgcaggaagacttcctggtgcatgaggtgaccaatctgccggtgacagaagcactgattgagcgggagaatgcagcccagctcaagaagtggcgggaaacgcggggggagctgcagtatcggccctcacggcgactgcatgggtcccgggccatccacgaggagcgccggcggcaacagccacccctgggcccctcctccagcctcctcagcctccctggcctcaagagccgaggctcccgggcagctggaggggccccgtccccgccgccccccgtccgcagagccagtgctgggcctgccccagggcctgtggtcactgctgagggactgcatccatcccttccctcacccactggcaatagcacccccttgggttccagcaaggagacccggaagcaggagaaggagcggcagaaacaggagaaggagcggcagaaacaggagaaggagcgggagaaggagcggcagaagcaggagaaagagcgagagaagcaggaaaaggag

SEQ ID NO: 189463 - DNA, 1497 bp, Homo sapiens
  Payload ID: 17412
  Gene Symbol: TBC1D10C
  Gene Name: TBC1 domain family, member 10C
  Uniprot ID: Q8IV04
  ENST ID: ENST00000312390
  CDS Start-End: 17-949
gaaggccccgggcaccatggcccaggccctgggggaggacctggtgcagcctcccgagctgcaggatgactccagctccttggggtccgactcagagctcagcgggcctggcccatatcgccaggccgaccgctatggattcattgggggcagctcagcagagccagggccgggccacccacctgcagacctcatccgccaacgggagatgaagtgggtggagatgacctcgcactgggagaaaaccatgtcccggcggtacaagaaggtaaagatgcagtgccggaaaggcatcccgtctgccctgcgcgcccgatgctggcccctgttgtgtggggcccatgtgtgccagaagaacagccctggcacctatcaggagctggcagaggcccctggagacccacagtggatggagaccattggcagggacctgcaccgtcaattccctctgcacgagatgtttgtgtcgcctcagggccacggcaggggctcctgcaggtgctcaaggcctacaccctgtatcgaccggagcagggctactgccaggcccaggggcccgtggctgctgtgctgctcatgcacctgcccccagaggaggccttctggtgcctggtgcagatctgtgaggtctacctccctgggtactacgggccccacatggtgccagagtactgttccgtgtggggctgacactggtgcgcctggcgctgggcactgcagagcagcgaggggcctgccctggcctcctggagacactgggagcccttcgagccatcccccccgcgcagctgcaggaggaggccttcatgtcacaggtgcacagcgtggtgctgtcagagcgggacctgcagcgggagatcaaggcccagctggcccagctgcccgattccgcgccgggacccccgccccggccacaggtccgcctcgccggggcccaagccatctttgaggcccagcagctggcaggagtgcgacgaggcgccaagcctgaggtgcctcggattgtggtgcagcccccggaggagcccagaccaccgcggcggaaaccccagacccgcggcaagactttccatgggctcctgactcgggcccggggcccccccatcgaggggccccccaggccccaacgaggctccacctccttcctggacacccgcttctgagaggaccatggacttagtgtcccccagtctcaattgcctgatggctgatgccggcccggcaaataggcaccgcactttactcttgggactcggggacttggcttccttcctggcaaggaccaggcagtggggaaggaggaggtcctccgtggtacatactgggtcaggcactagcatggaggagggtcacagagtggggcacgtgaggacccatggaaccgtcctggtgcccaggccctcacaagtaccaaagccagcaccaaaggagtcagggaaggggttggctgagtcaagggaccccagagggcaccaggaataaaatcttcttgaacag

SEQ ID NO: 189464 - DNA, 1520 bp, Homo sapiens
  Payload ID: 17412
  Gene Symbol: TBC1D10C
  Gene Name: TBC1 domain family, member 10C
  Uniprot ID: Q8IV04
  ENST ID: ENST00000526387
  CDS Start-End: 39-971
ggaggaggaggaagtgagaggaggaggccccgggcaccatggcccaggccctgggggaggacctggtgcagcctcccgagctgcaggatgactccagctccttggggtccgactcagagctcagcgggcctggcccatatcgccaggccgaccgctatggattcattgggggcagctcagcagagccagggccgggccacccacctgcagacctcatccgccaacgggagatgaagtgggtggagatgacctcgcactgggagaaaaccatgtcccggcggtacaagaaggtaaagatgcagtgccggaaaggcatcccgtctgccctgcgcgcccgatgctggcccctgttgtgtggggcccatgtgtgccagaagaacagccctggcacctatcaggagctggcagaggcccctggagacccacagtggatggagaccattggcagggacctgcaccgtcaattccctctgcacgagatgtttgtgtcgcctcagggccacggcaggggctcctgcaggtgctcaaggcctacaccctgtatcgaccggagcagggctactgccaggcccaggggcccgtggctgctgtgctgctcatgcacctgcccccagaggaggccttctggtgcctggtgcagatctgtgaggtctacctccctgggtactacgggccccacatggtgccagagtactgttccgtgtggggctgacactggtgcgcctggcgctgggcactgcagagcagcgaggggcctgccctggcctcctggagacactgggagcccttcgagccatcccccccgcgcagctgcaggaggaggccttcatgtcacaggtgcacagcgtggtgctgtcagagcgggacctgcagcgggagatcaaggcccagctggcccagctgcccgattccgcgccgggacccccgccccggccacaggtccgcctcgccggggcccaagccatctttgaggcccagcagctggcaggagtgcgacgaggcgccaagcctgaggtgcctcggattgtggtgcagcccccggaggagcccagaccaccgcggcggaaaccccagacccgcggcaagactttccatgggctcctgactcgggcccggggcccccccatcgaggggccccccaggccccaacgaggctccacctccttcctggacacccgcttctgagaggaccatggacttagtgtcccccagtctcaattgcctgatggctgatgccggcccggcaaataggcaccgcactttactcttgggactcggggacttggcttccttcctggcaaggaccaggcagtggggaaggaggaggtcctccgtggtacatactgggtcaggcactagcatggaggagggtcacagagtggggcacgtgaggacccatggaaccgtcctggtgcccaggccctcacaagtaccaaagccagcaccaaaggagtcagggaaggggttggctgagtcaagggaccccagagggcaccaggaataaaatcttcttgaacaga

SEQ ID NO: 189465 - DNA, 1796 bp, Homo sapiens
  Payload ID: 17412
  Gene Symbol: TBC1D10C
  Gene Name: TBC1 domain family, member 10C
  ENST ID: ENST00000529635
  CDS Start-End: 75-734
ggctggccgggagtggcccctcacactggttctccccactttctctgcctgtggcatcgaaggccccgggcaccatggcccaggccctgggggaggacctggtgcagcctcccgagctgcaggatgactccagctccttggggtccgactcagagctcagcgggcctggcccatatcgccaggccgaccgctatggattcattgggggcagctcagcagagccagggccgggccacccacctgcagacctcatccgccaacgggagatgaagtgggtggagatgacctcgcactgggagaaaaccatgtcccggcggtacaagaaggtaaagatgcagtgccggaaaggcatcccgtctgccctgcgcgcccgatgctggcccctgttgtgtggggcccatgtgtgccagaagaacagccctggcacctatcaggagctggcagaggcccctggagacccacagtggatggagaccattggcagggacctgcaccgtcaattccctctgcacgagatgtttgtgtcgcctcagggccacgggcagcaggggctcctgcaggtgctcaaggcctacaccctgtatcgaccggagcagggctactgccaggcccaggggcccgtggctgctgtgctgctcatgcacctgcccccagaggaggccttctggtgcctggtgcagatctgtgaggtctacctccctgggtactacgggccccacatggtgagaggctgacatgggggctggaggaaggaggggcaggggcccggaggctgtgcggctggacgccgaggtgttcatggccctgctgcggcggctgcttccgcacgtgcacaagcacctgcagcaggtgggcgtcggacccctgctgtacctgcccgagtggttcctgtgcctcttcgcccgctccctgcccttccccacagtgctgcgtgtctgggatgccttcctcagtgagggtgccagagtactgttccgtgtggggctgacactggtgcgcctggcgctgggcactgcagagcagcgaggggcctgccctggcctcctggagacactgggagcccttcgagccatcccccccgcgcagctgcaggaggaggccttcatgtcacaggtgcacagcgtggtgctgtcagagcgggacctgcagcgggagatcaaggcccagctggcccagctgcccgattccgcgccgggacccccgccccggccacaggtccgcctcgccggggcccaagccatctttgaggcccagcagctggcaggagtgcgacgaggcgccaagcctgaggtgcctcggattgtggtgcagcccccggaggagcccagaccaccgcggcggaaaccccagacccgcggcaagactttccatgggctcctgactcgggcccggggcccccccatcgaggggccccccaggccccaacgaggctccacctccttcctggacacccgcttctgagaggaccatggacttagtgtcccccagtctcaattgcctgatggctgatgccggcccggcaaataggcaccgcactttactcttgggactcggggacttggcttccttcctggcaaggaccaggcagtggggaaggaggaggtcctccgtggtacatactgggtcaggcactagcatggaggagggtcacagagtggggcacgtgaggacccatggaaccgtcctggtgcccaggccctcacaagtaccaaagccagcaccaaaggagtcagggaaggggttggctgagtcaagggaccccagagggcaccaggaataaaatcttcttgaacaga

SEQ ID NO: 189466 - DNA, 1659 bp, Homo sapiens
  Payload ID: 17412
  Gene Symbol: TBC1D10C
  Gene Name: TBC1 domain family, member 10C
  Uniprot ID: Q8IV04
  ENST ID: ENST00000542590
  CDS Start-End: 15-1355
aggccccgggcaccatggcccaggccctgggggaggacctggtgcagcctcccgagctgcaggatgactccagctccttggggtccgactcagagctcagcgggcctggcccatatcgccaggccgaccgctatggattcattgggggcagctcagcagagccagggccgggccacccacctgcagacctcatccgccaacgggagatgaagtgggtggagatgacctcgcactgggagaaaaccatgtcccggcggtacaagaaggtaaagatgcagtgccggaaaggcatcccgtctgccctgcgcgcccgatgctggcccctgttgtgtggggcccatgtgtgccagaagaacagccctggcacctatcaggagctggcagaggcccctggagacccacagtggatggagaccattggcagggacctgcaccgtcaattccctctgcacgagatgtttgtgtcgcctcagggccacgggcagcaggggctcctgcaggtgctcaaggcctacaccctgtatcgaccggagcagggctactgccaggcccaggggcccgtggctgctgtgctgctcatgcacctgcccccagaggaggccttctggtgcctggtgcagatctgtgaggtctacctccctgggtactacgggccccacatggaggctgtgcggctggacgccgaggtgttcatggccctgctgcggcggctgcttccgcacgtgcacaagcacctgcagcaggtgggcgtcggacccctgctgtacctgcccgagtggttcctgtgcctcttcgcccgctccctgcccttccccacagtgctgcgtgtctgggatgccttcctcagtgagggtgccagagtactgttccgtgtggggctgacactggtgcgcctggcgctgggcactgcagagcagcgaggggcctgccctggcctcctggagacactgggagcccttcgagccatcccccccgcgcagctgcaggaggaggccttcatgtcacaggtgcacagcgtggtgctgtcagagcgggacctgcagcgggagatcaaggcccagctggcccagctgcccgattccgcgccgggacccccgccccggccacaggtccgcctcgccggggcccaagccatctttgaggcccagcagctggcaggagtgcgacgaggcgccaagcctgaggtgcctcggattgtggtgcagcccccggaggagcccagaccaccgcggcggaaaccccagacccgcggcaagactttccatgggctcctgactcgggcccggggcccccccatcgaggggccccccaggccccaacgaggctccacctccttcctggacacccgcttctgagaggaccatggacttagtgtcccccagtctcaattgcctgatggctgatgccggcccggcaaataggcaccgcactttactcttgggactcggggacttggcttccttcctggcaaggaccaggcagtggggaaggaggaggtcctccgtggtacatactgggtcaggcactagcatggaggagggtcacagagtggggcacgtgaggacccatggaaccgtcctggtgcccaggccctcacaagtaccaaagccagcaccaaaggagtcagggaaggggttggctgagtcaagggaccccaga

SEQ ID NO: 189467 - DNA, 5272 bp, Homo sapiens
  Payload ID: 17413
  Gene Symbol: TBC1D12
  Gene Name: TBC1 domain family, member 12
  Uniprot ID: O60347
  ENST ID: ENST00000225235
  CDS Start-End: 111-2438
gaacgttgcggcggctgtcgccgcggccccagcacccagagctgttctctggccaagcctgcgcctgtagtccttctttgcctcctggggcggccgccacccacccccagatggtgggtccggaggatgccggagcctgctcgggaagaaaccccaagttgctcccggtgcctgcgccggaccccgtgggccaggacaggaaggtaatccgggccacgggcggctttggcggaggcgtcggcgctgtggagccgccggaggaggctgacgaggaggaggaggctgacgaggaggaggagacgccgcctcggcagctccttcagcgttacctcgcggcggccggggagcagctggagccggggctctgctactgtccgctccccgctggccaggccggcgccccgccgccctcggcagccccacgatcggacgcctgcctgctgggctcgggctccaaacaccgcggcgcggaggtggctgatggccgcgcgccgcggcacgaaggcatgaccaacggcgactcgggttttctgccgggccgggactgtcgcgatctggaagaggctcgcgggctggcgcgcgccggcggccgggagtcgcgccgccgccgcccctacggccgccttcgcctggaggggcctggcgacgaggacgcggacggcgcgggaagcccgtccgattgggcctctccgcttgaggacccgctgcggagctgctgcctggtggccgcggacgcccaggagcccgagggcgcgggcagcgactcgggggacagccccgccagcagctgcagcagtagcgaggactcagagcagcggggagtcggcgccgggggtcccgaggagggcgcgccccctgccacctcggccgagaggactaatgggggtgcggagccgcgcctgggcttttctgacattcacttcaactctcgcaacacgttccaggtgagccgcggtcagagcgcccgcgatcacctgcccccggcggggccgccggtgcccttgcccgccgcggagcagggtcctgcgggggcttcggcccgggctcgacggagtggcggcttcgcggacttcttcaccagaaacctttttccaaaaaggacaaaggaactcaaatcagttgtccatagtgctcctggttggaaattatttggtaaagtccctcctagagagaatcttcagaaaacatccaaaatcattcagcaggaatatgaagcacgaacggggaggacctgtaaaccaccacctcagtcttcaagacgcaagaattttgaatttgagccgctttctaccactgccttgattcttgaggatcgaccatcaaatcttcctgccaaatctgtggaagaagctttacgtcaccgacaagaatacgatgagatggtggctgaggctaaaaaacgagaaattaaggaagcacataaaagaaaaagaatcatgaaagaacgatttaagcaggaagaaaatattgcaagtgcaatggtaatttggatcaatgaaatactgcccaattgggaagtaatgcgtagtacaagaagagttcgagaattgtggtggcagggattgccccctagtgtccgtgggaaagtttggagtctagctgtaggaaatgaactaaatatcactcctgaactttatgaaatcttcctctcaagagcaaaagaacggtggaaaagtttcagtgaaacaagttcagagaatgatacagaaggtgtatctgttgctgatcgagaggccagtctggaattaattaagttggacatatcccgtacatttccatctctctacatctttcagaagggtggtccatatcatgatgtcttgcatagtattttaggggcatacacatgctacaggcctgatgttggttatgtccaagggatgtccttcattgcagcagtactcattctcaatttggaagaggcagatgcctttatcgcatttgccaatctcctgaataagccatgccagttggccttttttcgtgtggatcacagcatgatgttgaaatattttgcaacatttgaagtattctttgaagaaaatctttccaaattatttcttcacttcaaatcttacagtcttacaccagatatatacttgatagactggatcttcacactatatagcaaatcactaccacttgatctggcctgtcgagtctgggatgtattttgcagagatggggaagaatttttatttaggactggattaggaatcctccgattatatgaagatattctcctgcagatggactttattcatatagcacagtttctaactaaattgccagaagatatcacatcggaaaagctgttcagttgtattgcagccattcagatgcagaatagcaccaaaaaatggactcaggtctttgcatctgtaatgaaggatattaaagaaggagacaagaacagtagtcctgctttgaaaagctagtcttcaaaattgacagactaactgacatagaaaaagtggtttttggataaaggttttttgtttcctatgtaaaaggcgtggaagaaaatgttggagatacctaaaagaatcaagaggtggaaaactgctgattttacattttatggctgaagtaaatgaaataagtaacttattgacagtattaataaactattattttgtaggtagagtcatttttcaaaggaaaaagtttaagtggtgagtttatattccacaatttggagtaaacaaaatgcaataaatttttaaaatagctttgaagatacttcaaatttttacatcttttcttttgtaacagttaccacaaagatattctggaggctagagtaggattgttaaatactactgttaacctccaaagtactatagtacagacattgtttccagttctgaccttttgaagatattatagaccagtaatgaacagatttggttgtaaattatttaagtcactgaagatgtcatttatcttcattcacaagttggggcaaattcgagttacctaggaactggaaatgttggtgggagattgtttattgtttgtttagatgtttttccatagtatggtgtccatttgttttttaagggaaattttttgtcttccttaaggaattcctatcactcagagaattttagccattctggttctagtctaacaaattattcatctaataatttgacattaagaaaactataaataactggtagaaggaaagtgctttgcacttcagtggattgaagacttgactttgagagtaagtccaaaaacatatatgatgtttctcagtgataagagtaaaaagtaatgaatcctgagagttcttaaacagcatgctacttggcaagacttcatattttttagttacaattcttccactgtttaactccagtttgaaatttgaaatctaatatgtagctaaatctgtgacttgtaaaactctatgcataatttttcctaatcagtggaaataagaataaaagaaaaaggtaaagttaattttttttctaagtctacatcctatctcttgattcagttgcctgaagaagctgggtaaggagattagtcttgttattgattcttttatgtgtcagtgccatcttaatctcttcacatggtacactaaatgctgcctataacccatcctcatcttctttactcatcattgctttcttcaaggaaggtcttgatactgccctcgtctacctcactatccgctagtctagatagtgactctttggaaaattggtagcctctgaatgagttatccaacttctgcttcctcacattggccactttgcataggttcgggaacttagcaggttttaaatcatcatgcccatggaggtgaaatactttgaggaatgggaacatctcttcactgtgtttttggatcagccttctctcaaccgccaagaaatgcatgatttccctgccaactctaggaagtagtgctgcatgattgaatcattatttgatgaattctttcattgtaacatagggagtcattttcaaaaaggtagatatgaacttaaattaaattgacttatgaatgctttgcctgtgggcccaacagtgtcatgaccctccaattgaaacatagcatgaattatttttatgtcgagttcttgaactgctaatcaggtgtgtgtttccttgaagtccagagcaggatccaggtcagatgaaggaggtggtatgcctggcttaactgctgaaaatagagcattgaaactcttcacaatgtgctgcattgggtttctgcttggctttctcactgaaaagtaaattggggaaaatgctgcttttactattttgcattttatagcaacattaacagtcttttcccagtcaggtgctgtccagggaacatgtttcccttgggaggtctgaacagagtgacctggcttgatgtatttcctgagctctagtaccatatcatagaattagttaaatgtagtcaacagcaatgtcagaacaattgacattgtctttccaagagtgaatgcattggctttcggaactgctactagagacatacatgaggcagcgaacacatctttaggtgggggcaaggctatatctgattgacagagatctctgatctctaatgacatattgctattgtcctattatgtttaaatttgaacctaaatcacttgagtgttatgagtgatggctatataacatgctgtttggttagatttacagtgtgtttttatgttgcagtttagtttgaaacaacacttaagcacactatttctgttagtgtatatagttttcaaactaacaagcctgcgatccttgttagtgtagtgactgcctctttaggagtatggggccctagggtgtccatatatttttaccccatgggtcattctagtctaaggactactagtagaaccctcaaaaggtaattgctattatagggacttacttattggagactggtaatataataaaatattgaaggagtggccatggtcttagcaggttttagaatgaccttttaactccagtaactacttccttggtattggtatccttgatagagggaatataacatctggcagtaatctcattcaggttatactacctgactaaatttaatcatactttcatgtatttgtttcctcagttggacctaagttactgtatttgtttttcttatttttttattattgtacagtttctttacctttcaagtataaatgtgtatataaaatgtaaatacaaagaattcactaaaaaccactcataacaattactgtgtaaataaaactggtaagcagagtaa

SEQ ID NO: 189468 - DNA, 3378 bp, Homo sapiens
  Payload ID: 17414
  Gene Symbol: TBC1D13
  Gene Name: TBC1 domain family, member 13
  Uniprot ID: Q9NVG8
  ENST ID: ENST00000223865
  CDS Start-End: 6-833
acaccatgtcaagtctgcacaagagccgaattgcagatttccaggatgtcctgaaggagccctcaattgcattggaaaagctgcgggaactcagctttagtggcatcccctgtgagggcggactgcggtgcctctgctggaagattctcttgaactaccttcccttggagagagcctcatggacctccatcctggccaagcagagggagctgtatgcccagttcctgagggaaatgatcatccagcctggcattgccaaggccaacatgggtgtgtccagggaggatgtgacttttgaggaccatccactcaaccccaaccctgacagccggtggaacacgtacttcaaggacaacgaggtgctgctgcagatcgacaaagatgtccggaggttgtgcccagacatttccttcttccagagggccactgactacccttgcctcctcatcctggacccccagaatgagtttgaaacccttcgtaagagagtggaacagacaacactgaaatctcagacggtggcccggaaccggagtggggtcacaaatcaagagcagaacatcaagcctcagttctttgccttccgctggctgacactgctgctgtcccaggagttcttgctgcctgacgtcatccgcatctgggactccctcttcgccgatgacaaccgctttgacttcctcctcctcgtctgctgcgccatgctcatgctgatccgggagcagttgctggaaggggacttcactgtgaatatgcggctgctgcaggactaccccatcacagatgtctgccagatcctgcagaaagccaaggagctccaagactcaaagtagcccggcggcaagaggcccatgttccggagagaagcctcccgaccctgtgccctggctcccgggacacatagaaacctgtaggaacccagcctgaggggaagccacaggatcggcccgagacccaggccatgcccactggggacacactgtgccgtgctccttctgccgccacgcccagctccccacctgccctgcactctgccctctttgcccaggatactgaggagggctggagctcgggaagttgtccttcctgggccagggccgtttctggcactgggaggctggcaggggcccctccctgcctcggctctgccgccccagcctcagttcctgcttctggtcttctcctgggctccactcaggggaggtgcttggccaatgggccagaaaccgcttctgagcggggcacttcggctgctccacagggaaggcgacactgaaagctgagtcctgccgtctgtctcacccacagatgtctgtagtcggtcggtgtgaatgtgggcccaagtccccaggcatcttctccgtgtgtgtgtgtgtgtgtgtgtgtgtgtgtgtgtgtgtgtgtgtgtgttagggagtgagggtctctcaggcctccaggtctcccagcccctccttctctgtctctacctctctgcctgtctccttccacctccttcccagagtgggactgtgtcttgcttcatgattcctctctccattactctccctgcccttctctgttggggtgccttatcctgagccacctcctctccccgcttgcctctgctcccctgaacctgggagacagatgaggagactggctcagcaaggcccctggaggtcaagcttggcctttgcctcctgttcccatcccccagccctggctcctaggtcctcccaactgggagggagtcctccgtgcctcacttagagggttctgaacccgttccctacacagaaatcttggaaaccaaatgctgctgagtaaggatgaagctttgagcctcctgcccctgctttctgcccagggagggagaaggaagagggggagctggtttttctggaggttcccccagaggccctcctgtccgaaaagaaaaggaccttgattctgagcccagggtcggaacccattgcttcagaagagttgtcattccctcggcttccaggtcccaacccagggttgggttgagtgagtcccacaaagggcaagtggggcccgaggaagcctctctggggccaggggtagctgagcttaaaggccctgggtcctgccagttccaggagggccatgtctgtgcctctgtgtacccctccacccgctgcgggctgagggaggtgcagggccttctctgacccctgcctgagctgttcccagggctggagcaggtgtaccctgagcaggggcagctggccactcccagttctcaccaagtcacctccctccttgtacaaggtttgcgtccggaagccgggtgccatagtgaggaccctcgtcctccagactggctggcaggagtcaggccccagcagccctcctgcccccaaagctttccgagtctggtgggcaggacttctcgctgcccttccaagcccggctttgggccaggaaaggcttccccaggtggctcttctaccaggcttttcctttgatgccgcctggatttccgcacctgcctgtctcctctcccagagcacagtatttgggagactttgactatttattcagactcctggctatgtattgcacattggcaagtgctctggggatgaggcatgggtataggaagggagaaaggagttggagacaagatcctcttcattttccaagatcaaagtcagcctcttctccccatgcttctaggaactgcctggttttcgagcaggtcctggctgagcgggctctgagttctgtactggaattgagtgtaaagatgggaagagaactgggctgactccaggacctccaggatgaggcagaggcatgatgcttcctgctcacctgggccaccctctctccaggacttgtcagctggtggttcagccccttctccaaccccttcataagcttgggccactgcctgggacccagcagacactgcccaggactctttagtgcactcactcttgtctgccccctaccttccctcctggaaccacactacttgaatcaccattactttgcctcgctggcagagttgggtcaagtgccctctccttgaccttgagatgaaggtcaagagcacagggaccaggccttggttaggctgagctcccagcaggacaccgcctgcagaaaggacctgccctgataatgtcccttccccagattctcaagcagatgcccaagggaggtccccacagagccagagtgcctgaggcttcctgcttgagaacctgccccctggatcttggacacttacagattgagctgtatgaattcagcgggtctcactccagagggtcagaacgtttgctttagttttttcatctgttttgttccttgagtcagtgctgttgatgacgagttgtcttgaataaatcatgtgttctttgc

SEQ ID NO: 189469 - DNA, 3906 bp, Homo sapiens
  Payload ID: 17414
  Gene Symbol: TBC1D13
  Gene Name: TBC1 domain family, member 13
  Uniprot ID: Q9NVG8
  ENST ID: ENST00000372648
  CDS Start-End: 151-1353
ggcggtggaacgcgcaggctagtggctgtgtttcccgccggaggcttttgcgcagagccccgcgtccctggggggcggcggcggcggcggcagcgcaggcggcagaggcgcaggcggcggaggcggctggggggtccggaagtcaacaccatgtcaagtctgcacaagagccgaattgcagatttccaggatgtcctgaaggagccctcaattgcattggaaaagctgcgggaactcagctttagtggcatcccctgtgagggcggactgcggtgcctctgctggaagattctcttgaactaccttcccttggagagagcctcatggacctccatcctggccaagcagagggagctgtatgcccagttcctgagggaaatgatcatccagcctggcattgccaaggccaacatgggtgtgtccagggaggatgtgacttttgaggaccatccactcaaccccaaccctgacagccggtggaacacgtacttcaaggacaacgaggtgctgctgcagatcgacaaagatgtccggaggttgtgcccagacatttccttcttccagagggccactgactacccttgcctcctcatcctggacccccagaatgagtttgaaacccttcgtaagagagtggaacagacaacactgaaatctcagacggtggcccggaaccggagtggggtcacaaatatgagctccccacacaagaactctgtgccatcatccctaaatgagtatgaggtgctgcccaatggctgtgaggcccactgggaggtggtggagcggatcctgttcatctacgccaagctcaaccctggcatcgcttatgtgcaaggcatgaatgaaatcgtggggcccctctactacacctttgccaccgaccccaatagtgagtggaaagagcacgccgaggcagacacctttttctgcttcaccaacctcatggccgagatccgggacaactttatcaagagcctggatgactcgcagtgtggcatcacctacaagatggagaaggtttactccaccttgaaagataaggatgtggagctctacctgaaactgcaagagcagaacatcaagcctcagttctttgccttccgctggctgacactgctgctgtcccaggagttcttgctgcctgacgtcatccgcatctgggactccctcttcgccgatgacaaccgctttgacttcctcctcctcgtctgctgcgccatgctcatgctgatccgggagcagttgctggaaggggacttcactgtgaatatgcggctgctgcaggactaccccatcacagatgtctgccagatcctgcagaaagccaaggagctccaagactcaaagtagcccggcggcaagaggcccatgttccggagagaagcctcccgaccctgtgccctggctcccgggacacatagaaacctgtaggaacccagcctgaggggaagccacaggatcggcccgagacccaggccatgcccactggggacacactgtgccgtgctccttctgccgccacgcccagctccccacctgccctgcactctgccctctttgcccaggatactgaggagggctggagctcgggaagttgtccttcctgggccagggccgtttctggcactgggaggctggcaggggcccctccctgcctcggctctgccgccccagcctcagttcctgcttctggtcttctcctgggctccactcaggggaggtgcttggccaatgggccagaaaccgcttctgagcggggcacttcggctgctccacagggaaggcgacactgaaagctgagtcctgccgtctgtctcacccacagatgtctgtagtcggtcggtgtgaatgtgggcccaagtccccaggcatcttctccgtgtgtgtgtgtgtgtgtgtgtgtgtgtgtgtgtgtgtgtgtgtgtgttagggagtgagggtctctcaggcctccaggtctcccagcccctccttctctgtctctacctctctgcctgtctccttccacctccttcccagagtgggactgtgtcttgcttcatgattcctctctccattactctccctgcccttctctgttggggtgccttatcctgagccacctcctctccccgcttgcctctgctcccctgaacctgggagacagatgaggagactggctcagcaaggcccctggaggtcaagcttggcctttgcctcctgttcccatcccccagccctggctcctaggtcctcccaactgggagggagtcctccgtgcctcacttagagggttctgaacccgttccctacacagaaatcttggaaaccaaatgctgctgagtaaggatgaagctttgagcctcctgcccctgctttctgcccagggagggagaaggaagagggggagctggtttttctggaggttcccccagaggccctcctgtccgaaaagaaaaggaccttgattctgagcccagggtcggaacccattgcttcagaagagttgtcattccctcggcttccaggtcccaacccagggttgggttgagtgagtcccacaaagggcaagtggggcccgaggaagcctctctggggccaggggtagctgagcttaaaggccctgggtcctgccagttccaggagggccatgtctgtgcctctgtgtacccctccacccgctgcgggctgagggaggtgcagggccttctctgacccctgcctgagctgttcccagggctggagcaggtgtaccctgagcaggggcagctggccactcccagttctcaccaagtcacctccctccttgtacaaggtttgcgtccggaagccgggtgccatagtgaggaccctcgtcctccagactggctggcaggagtcaggccccagcagccctcctgcccccaaagctttccgagtctggtgggcaggacttctcgctgcccttccaagcccggctttgggccaggaaaggcttccccaggtggctcttctaccaggcttttcctttgatgccgcctggatttccgcacctgcctgtctcctctcccagagcacagtatttgggagactttgactatttattcagactcctggctatgtattgcacattggcaagtgctctggggatgaggcatgggtataggaagggagaaaggagttggagacaagatcctcttcattttccaagatcaaagtcagcctcttctccccatgcttctaggaactgcctggttttcgagcaggtcctggctgagcgggctctgagttctgtactggaattgagtgtaaagatgggaagagaactgggctgactccaggacctccaggatgaggcagaggcatgatgcttcctgctcacctgggccaccctctctccaggacttgtcagctggtggttcagccccttctccaaccccttcataagcttgggccactgcctgggacccagcagacactgcccaggactctttagtgcactcactcttgtctgccccctaccttccctcctggaaccacactacttgaatcaccattactttgcctcgctggcagagttgggtcaagtgccctctccttgaccttgagatgaaggtcaagagcacagggaccaggccttggttaggctgagctcccagcaggacaccgcctgcagaaaggacctgccctgataatgtcccttccccagattctcaagcagatgcccaagggaggtccccacagagccagagtgcctgaggcttcctgcttgagaacctgccccctggatcttggacacttacagattgagctgtatgaattcagcgggtctcactccagagggtcagaacgtttgctttagttttttcatctgttttgttccttgagtcagtgctgttgatgacgagttgtcttgaataaatcatgtgttctttgcaatgggca

SEQ ID NO: 189470 - DNA, 4201 bp, Homo sapiens
  Payload ID: 17415
  Gene Symbol: TBC1D14
  Gene Name: TBC1 domain family, member 14
  ENST ID: ENST00000410031
  CDS Start-End: 82-1479
ctctggcgtgccaggaatgcggcacggggagagtccgtgcttctgcagccggcccctcggagctgcgaggtcacagtagacatgatggccatctcccctgcgctcctgttcatggacaggaacttgcttgctagaaaacaaagtgcaaggcttgacaaacacaatgacttgggatggaagttatttgggaaagcgccactccgagagaatgcccagaaggattcaaagagaatacagaaggaatatgaagacaaggctggaagacctagcaagccaccctctccaaagcagaatgtgaggaagaatcttgactttgaaccactttccaccaccgcactcatcctcgaggacagaccagcaaatctcccagcaaaaccagctgaagaagctcagaagcacagacagcagtatgaagaaatggtggttcaggccaaaaagcgagagctgaaagaagcccagcgaaggaagaagcagctggaagaaagatgcagagtcgaggaaagcattggaaacgctgtgctcacctggaataatgagatcttacctaactgggaaacaatgtggtgctctagaaaagttcgagatttatggtggcagggaatccctccaagtgtgagaggcaaagtctggagcttagccattggcaacgagttaaatatcacccacgagctctttgacatctgtcttgcccgagccaaggagaggtggcggtcccttagcacaggaggctctgaagtggagaacgaagatgctggtttttcagcagcagacagagaagccagtctggagcttattaaactggacatttctagaacatttcctaatctctgcattttccagcaaggtggtccatatcatgacatgttgcacagtattttgggcgcttatacttgttaccggccagatgtgggttatgtccagggcatgtccttcatagcagcagtgttgatcttgaacttagatactgcagatgcctttattgccttttctaaccttctgaataaaccctgtcaaatggcgttttttagagtggaccatggccttatgttgacttattttgctgcatttgaagtattctttgaagaaaatttgccgaaattatttgcgcatttcaagaagaacaacctaactccagatatctacctaattgattggatctttaccttatatagtaaatctctgcccctcgacctggcctgtcgtatctgggacgtgttctgtcgcgatggggaagagttcctgttccgcacggccctgggcatcctgaagctgttcgaggacatcctgaccaagatggacttcattcacatggcccagttcctgacccggctgcccgaggacctgcccgccgaggagctgtttgcctccatcgccacgatccagatgcagagccgaaacaagaagtgggctcaggtactgactgcattgcagaaagacagccgggaaatggagaagggaagtccgtccctccgacactgaggctgcagcgggaattcgcactcggcaccaatcagagccccatgccgcggcccctctgttgtttcagactgacacccgggcagccgagaagaacagacgctctttaagtttgattcctaacactggagttggccttaaacaaaacaaacacaaaaacttttaaagaattaaaccaaggcttagccttaagcagctcagtggaaggatgagctgctgcggaccacagccagccactgcatctgctgcacagttgaacgatgggcagtggctcacccccactcctttatttcagcaaaagctaattaaattgtaatgtttctatgtcaactactgggaagtatgttacagtcttagccaggatgcatgagagatgttatttgggagacttgagatgctttggctgatatttacatgttttcgataagaaagggatcgctgattgagttattgagatagtttttccagagctggaggtcacgtttctaaaactcacctacgaaagatagcattaaaggaacaggggctctctgaggatggccactgatgtgtgtttgtggatacctgggcatcgacccagcctgcaggtgagctctgggccatgttgccttgacacagtcacagtgtagaggctgcaggtgcacacgtgggctccagtgggactgcgctctgggagactgctccctggcatcggtcctgcggaggtggaaagttcgagaggaggagctatttgcgaggaagccctgtggcaatagagataggcttaaaagcggagagaacacagagtggaatcagccccctgtaagtaaaagggtagagaaagagatgtgtggctgggccctctcccacctgcctgttcagtggaggccagggcagcagcccagaacagcacatgtgggggaggtggccccttgtgccagcagtggctcctctctgcctttgagccctgcacagctggacccatcctaagtgccagtgagtccctcacacatttgactttagaacgtgtgcttcatgacccgttgtacagacggaggagcgagcaacacacgtctaacagcctagacaatctcgtcagatgctcatactggaccatcagcctccccattttagctgactttcccagggtcgttggcaaattttttgttctgtcttttccttgactaattgtagaactttgtgtgaggactttggttatccaaaatcacagaaatgaaccgttttgcagctgcgcagtctaaagggcaggccagtgtctggaagcagggcccacgtggcggtccgctggcaggctggtcctggggagcattctgcggacccggtcacgggcttggttagtcatgcgtacatgtgtgccttggggtgctctgcactccacggcccttctcagccacacttcccaccccagggggtgcccccaggctgatctcatttctgatgttgagggctgtttggctctgtctgtatagcttgtaacaggagccttgggctaggggctggggaaggaaagccgagctggcattcgttctctggactttttatgcctgccatacccgctaatgctcctcgaggtgcaggagcaggttgctgagccagtggctgccccgtgccctccttcccagcactatcatgtgtcacgtttcccggactctgcccctacatctcagctgaatctccagggaggctgcagagcatcgtggagaccactttctgcctcggcctttaaatgctgactcacctcctctcggaggaggcgtcctgtcttcacgggggggtcccggtggcctccagacgtagccatttcctgacatcaagatgttgaatgtaatctggtctgagctgggcctgtgggaggggccgcctgaggcctgtgcgctgttgtcctcgcagatgtacttatttttgttcatgttacgggcgttccgttccttaaagatgtatatattttcttactgtacataaagatgttccttaagtcgtacagaaggtggcgcggcaaagggcctcgtgcagtgtgttcagattgcccctggggatcttctgtgtcttcagcgcccagccctgcgtgttcctggtgaagcagtttcacatcagtctctccagatagcactacgatgtattccgcttctgaacaggatcccatgccagtgtggaacaccttcccaatcttagttcagaagtggcttgtatgacctgttcaggggtcacatgaggtctcgccagtttcctgggtcctcttcagaggccagaaagttctaagttctgagtccccggccagggtcccttaacacctcggcacagaggctgttggcaagtgtagaggctgcctctgtgtgtggtttaagtaaactggaaatgagacattgacgtgctgctcctccagaggtctgcacactccacttcacatgccgttgactctcacagtctaagacttcagggccgggacctttgtccagcctgcacagtagagtgaggctgcctctcccgccaggcattgggatcccatttagaaacggcattcacttcagaaggtactttttaactgctcagtttttgactattttaaatagtttgctgaaaactcctgataacacttgctacatatcatgttttaattgcttgtacagttaacctttaattttatttagtaaagtgtatcaaagtaggacttttttgaattgtaaataggtggttttattaaataaaagtcaatgtaaaattgtta

SEQ ID NO: 189471 - DNA, 4925 bp, Homo sapiens
  Payload ID: 17415
  Gene Symbol: TBC1D14
  Gene Name: TBC1 domain family, member 14
  Uniprot ID: Q9P2M4
  ENST ID: ENST00000409757
  CDS Start-End: 125-2206
tgcctaccgcgtgcccggcgtcctcgtcgcgcgagttgccggtcccgcggggcctgggctgcgggcccacgggtcccggggatggcgtcggagccgcgctaactccgtttctccttggaccaagatgactgatggaaaactctccacctctacaaatggcgtagccttcatgggtattctggatggtcgaccaggaaacccccttcagaacctgcaacacgtcaatctcaaggcgccccgactcctctccgcgcctgagtacgggcccaagctgaaactcagggctttagaagaccggcacagcctccagtccgtggactcggggattcctaccctggagatcgggaacccggagcctgtaccctgcagcgcggtccacgtgaggaggaagcagtccgactccgacctcatccccgagcgggccttccagagcgcctgcgcgctgccatcctgtgcgccaccagctcctagcagcaccgagcgggaacagagcgtgcgcaaatcctccacgtttcccaggacaggctatgactcggtaaagctctatagcccgacctccaaagccctgacccgcagcgatgatgtctccgtctgcagcgtgtccagtcttgggacagagctgtccaccacgctgtccgtcagcaatgaggacatcttggaccttgtggtcacgagcagctccagtgccattgtgaccctggagaatgacgatgacccacagtttaccaacgtcaccttgagctctatcaaggaaacccgtggcttacaccagcaggactgtgttcatgaagctgaggaggggagtaaattgaaaatattggggccatttagtaacttctttgcaaggaacttgcttgctagaaaacaaagtgcaaggcttgacaaacacaatgacttgggatggaagttatttgggaaagcgccactccgagagaatgcccagaaggattcaaagagaatacagaaggaatatgaagacaaggctggaagacctagcaagccaccctctccaaagcagaatgtgaggaagaatcttgactttgaaccactttccaccaccgcactcatcctcgaggacagaccagcaaatctcccagcaaaaccagctgaagaagctcagaagcacagacagcagtatgaagaaatggtggttcaggccaaaaagcgagagctgaaagaagcccagcgaaggaagaagcagctggaagaaagatgcagagtcgaggaaagcattggaaacgctgtgctcacctggaataatgagatcttacctaactgggaaacaatgtggtgctctagaaaagttcgagatttatggtggcagggaatccctccaagtgtgagaggcaaagtctggagcttagccattggcaacgagttaaatatcacccacgagctctttgacatctgtcttgcccgagccaaggagaggtggcggtcccttagcacaggaggctctgaagtggagaacgaagatgctggtttttcagcagcagacagagaagccagtctggagcttattaaactggacatttctagaacatttcctaatctctgcattttccagcaaggtggtccatatcatgacatgttgcacagtattttgggcgcttatacttgttaccggccagatgtgggttatgtccagggcatgtccttcatagcagcagtgttgatcttgaacttagatactgcagatgcctttattgccttttctaaccttctgaataaaccctgtcaaatggcgttttttagagtggaccatggccttatgttgacttattttgctgcatttgaagtattctttgaagaaaatttgccgaaattatttgcgcatttcaagaagaacaacctaactccagatatctacctaattgattggatctttaccttatatagtaaatctctgcccctcgacctggcctgtcgtatctgggacgtgttctgtcgcgatggggaagagttcctgttccgcacggccctgggcatcctgaagctgttcgaggacatcctgaccaagatggacttcattcacatggcccagttcctgacccggctgcccgaggacctgcccgccgaggagctgtttgcctccatcgccacgatccagatgcagagccgaaacaagaagtgggctcaggtactgactgcattgcagaaagacagccgggaaatggagaagggaagtccgtccctccgacactgaggctgcagcgggaattcgcactcggcaccaatcagagccccatgccgcggcccctctgttgtttcagactgacacccgggcagccgagaagaacagacgctctttaagtttgattcctaacactggagttggccttaaacaaaacaaacacaaaaacttttaaagaattaaaccaaggcttagccttaagcagctcagtggaaggatgagctgctgcggaccacagccagccactgcatctgctgcacagttgaacgatgggcagtggctcacccccactcctttatttcagcaaaagctaattaaattgtaatgtttctatgtcaactactgggaagtatgttacagtcttagccaggatgcatgagagatgttatttgggagacttgagatgctttggctgatatttacatgttttcgataagaaagggatcgctgattgagttattgagatagtttttccagagctggaggtcacgtttctaaaactcacctacgaaagatagcattaaaggaacaggggctctctgaggatggccactgatgtgtgtttgtggatacctgggcatcgacccagcctgcaggtgagctctgggccatgttgccttgacacagtcacagtgtagaggctgcaggtgcacacgtgggctccagtgggactgcgctctgggagactgctccctggcatcggtcctgcggaggtggaaagttcgagaggaggagctatttgcgaggaagccctgtggcaatagagataggcttaaaagcggagagaacacagagtggaatcagccccctgtaagtaaaagggtagagaaagagatgtgtggctgggccctctcccacctgcctgttcagtggaggccagggcagcagcccagaacagcacatgtgggggaggtggccccttgtgccagcagtggctcctctctgcctttgagccctgcacagctggacccatcctaagtgccagtgagtccctcacacatttgactttagaacgtgtgcttcatgacccgttgtacagacggaggagcgagcaacacacgtctaacagcctagacaatctcgtcagatgctcatactggaccatcagcctccccattttagctgactttcccagggtcgttggcaaattttttgttctgtcttttccttgactaattgtagaactttgtgtgaggactttggttatccaaaatcacagaaatgaaccgttttgcagctgcgcagtctaaagggcaggccagtgtctggaagcagggcccacgtggcggtccgctggcaggctggtcctggggagcattctgcggacccggtcacgggcttggttagtcatgcgtacatgtgtgccttggggtgctctgcactccacggcccttctcagccacacttcccaccccagggggtgcccccaggctgatctcatttctgatgttgagggctgtttggctctgtctgtatagcttgtaacaggagccttgggctaggggctggggaaggaaagccgagctggcattcgttctctggactttttatgcctgccatacccgctaatgctcctcgaggtgcaggagcaggttgctgagccagtggctgccccgtgccctccttcccagcactatcatgtgtcacgtttcccggactctgcccctacatctcagctgaatctccagggaggctgcagagcatcgtggagaccactttctgcctcggcctttaaatgctgactcacctcctctcggaggaggcgtcctgtcttcacgggggggtcccggtggcctccagacgtagccatttcctgacatcaagatgttgaatgtaatctggtctgagctgggcctgtgggaggggccgcctgaggcctgtgcgctgttgtcctcgcagatgtacttatttttgttcatgttacgggcgttccgttccttaaagatgtatatattttcttactgtacataaagatgttccttaagtcgtacagaaggtggcgcggcaaagggcctcgtgcagtgtgttcagattgcccctggggatcttctgtgtcttcagcgcccagccctgcgtgttcctggtgaagcagtttcacatcagtctctccagatagcactacgatgtattccgcttctgaacaggatcccatgccagtgtggaacaccttcccaatcttagttcagaagtggcttgtatgacctgttcaggggtcacatgaggtctcgccagtttcctgggtcctcttcagaggccagaaagttctaagttctgagtccccggccagggtcccttaacacctcggcacagaggctgttggcaagtgtagaggctgcctctgtgtgtggtttaagtaaactggaaatgagacattgacgtgctgctcctccagaggtctgcacactccacttcacatgccgttgactctcacagtctaagacttcagggccgggacctttgtccagcctgcacagtagagtgaggctgcctctcccgccaggcattgggatcccatttagaaacggcattcacttcagaaggtactttttaactgctcagtttttgactattttaaatagtttgctgaaaactcctgataacacttgctacatatcatgttttaattgcttgtacagttaacctttaattttatttagtaaagtgtatcaaagtaggacttttttgaattgtaaataggtggttttattaaataaaagtcaatgtaaaattg

SEQ ID NO: 189472 - DNA, 4149 bp, Homo sapiens
  Payload ID: 17415
  Gene Symbol: TBC1D14
  Gene Name: TBC1 domain family, member 14
  Uniprot ID: Q9P2M4
  ENST ID: ENST00000451522
  CDS Start-End: 186-1427
cagcgcggatcgcctcgctgtgtctgcgcgcgattgagcggcctgccgccccgccccgccccgcgagtctgaggagccgccgcgtccgcccgcccgcccgcggtccgggagggagggagggaggccggccctccgctcgctgggcatggagcctccggccgcgcgcctctaaggccccggcgttcatggaatatgaagacaaggctggaagacctagcaagccaccctctccaaagcagaatgtgaggaagaatcttgactttgaaccactttccaccaccgcactcatcctcgaggacagaccagcaaatctcccagcaaaaccagctgaagaagctcagaagcacagacagcagtatgaagaaatggtggttcaggccaaaaagcgagagctgaaagaagcccagcgaaggaagaagcagctggaagaaagatgcagagtcgaggaaagcattggaaacgctgtgctcacctggaataatgagatcttacctaactgggaaacaatgtggtgctctagaaaagttcgagatttatggtggcagggaatccctccaagtgtgagaggcaaagtctggagcttagccattggcaacgagttaaatatcacccacgagctctttgacatctgtcttgcccgagccaaggagaggtggcggtcccttagcacaggaggctctgaagtggagaacgaagatgctggtttttcagcagcagacagagaagccagtctggagcttattaaactggacatttctagaacatttcctaatctctgcattttccagcaaggtggtccatatcatgacatgttgcacagtattttgggcgcttatacttgttaccggccagatgtgggttatgtccagggcatgtccttcatagcagcagtgttgatcttgaacttagatactgcagatgcctttattgccttttctaaccttctgaataaaccctgtcaaatggcgttttttagagtggaccatggccttatgttgacttattttgctgcatttgaagtattctttgaagaaaatttgccgaaattatttgcgcatttcaagaagaacaacctaactccagatatctacctaattgattggatctttaccttatatagtaaatctctgcccctcgacctggcctgtcgtatctgggacgtgttctgtcgcgatggggaagagttcctgttccgcacggccctgggcatcctgaagctgttcgaggacatcctgaccaagatggacttcattcacatggcccagttcctgacccggctgcccgaggacctgcccgccgaggagctgtttgcctccatcgccacgatccagatgcagagccgaaacaagaagtgggctcaggtactgactgcattgcagaaagacagccgggaaatggagaagggaagtccgtccctccgacactgaggctgcagcgggaattcgcactcggcaccaatcagagccccatgccgcggcccctctgttgtttcagactgacacccgggcagccgagaagaacagacgctctttaagtttgattcctaacactggagttggccttaaacaaaacaaacacaaaaacttttaaagaattaaaccaaggcttagccttaagcagctcagtggaaggatgagctgctgcggaccacagccagccactgcatctgctgcacagttgaacgatgggcagtggctcacccccactcctttatttcagcaaaagctaattaaattgtaatgtttctatgtcaactactgggaagtatgttacagtcttagccaggatgcatgagagatgttatttgggagacttgagatgctttggctgatatttacatgttttcgataagaaagggatcgctgattgagttattgagatagtttttccagagctggaggtcacgtttctaaaactcacctacgaaagatagcattaaaggaacaggggctctctgaggatggccactgatgtgtgtttgtggatacctgggcatcgacccagcctgcaggtgagctctgggccatgttgccttgacacagtcacagtgtagaggctgcaggtgcacacgtgggctccagtgggactgcgctctgggagactgctccctggcatcggtcctgcggaggtggaaagttcgagaggaggagctatttgcgaggaagccctgtggcaatagagataggcttaaaagcggagagaacacagagtggaatcagccccctgtaagtaaaagggtagagaaagagatgtgtggctgggccctctcccacctgcctgttcagtggaggccagggcagcagcccagaacagcacatgtgggggaggtggccccttgtgccagcagtggctcctctctgcctttgagccctgcacagctggacccatcctaagtgccagtgagtccctcacacatttgactttagaacgtgtgcttcatgacccgttgtacagacggaggagcgagcaacacacgtctaacagcctagacaatctcgtcagatgctcatactggaccatcagcctccccattttagctgactttcccagggtcgttggcaaattttttgttctgtcttttccttgactaattgtagaactttgtgtgaggactttggttatccaaaatcacagaaatgaaccgttttgcagctgcgcagtctaaagggcaggccagtgtctggaagcagggcccacgtggcggtccgctggcaggctggtcctggggagcattctgcggacccggtcacgggcttggttagtcatgcgtacatgtgtgccttggggtgctctgcactccacggcccttctcagccacacttcccaccccagggggtgcccccaggctgatctcatttctgatgttgagggctgtttggctctgtctgtatagcttgtaacaggagccttgggctaggggctggggaaggaaagccgagctggcattcgttctctggactttttatgcctgccatacccgctaatgctcctcgaggtgcaggagcaggttgctgagccagtggctgccccgtgccctccttcccagcactatcatgtgtcacgtttcccggactctgcccctacatctcagctgaatctccagggaggctgcagagcatcgtggagaccactttctgcctcggcctttaaatgctgactcacctcctctcggaggaggcgtcctgtcttcacgggggggtcccggtggcctccagacgtagccatttcctgacatcaagatgttgaatgtaatctggtctgagctgggcctgtgggaggggccgcctgaggcctgtgcgctgttgtcctcgcagatgtacttatttttgttcatgttacgggcgttccgttccttaaagatgtatatattttcttactgtacataaagatgttccttaagtcgtacagaaggtggcgcggcaaagggcctcgtgcagtgtgttcagattgcccctggggatcttctgtgtcttcagcgcccagccctgcgtgttcctggtgaagcagtttcacatcagtctctccagatagcactacgatgtattccgcttctgaacaggatcccatgccagtgtggaacaccttcccaatcttagttcagaagtggcttgtatgacctgttcaggggtcacatgaggtctcgccagtttcctgggtcctcttcagaggccagaaagttctaagttctgagtccccggccagggtcccttaacacctcggcacagaggctgttggcaagtgtagaggctgcctctgtgtgtggtttaagtaaactggaaatgagacattgacgtgctgctcctccagaggtctgcacactccacttcacatgccgttgactctcacagtctaagacttcagggccgggacctttgtccagcctgcacagtagagtgaggctgcctctcccgccaggcattgggatcccatttagaaacggcattcacttcagaaggtactttttaactgctcagtttttgactattttaaatagtttgctgaaaactcctgataacacttgctacatatcatgttttaattgcttgtacagttaacctttaattttatttagtaaagtgtatcaaagtaggacttttttgaattgtaaataggtggttttattaaataaaagtcaatgtaaaattgtta

SEQ ID NO: 189473 - DNA, 602 bp, Homo sapiens
  Payload ID: 17415
  Gene Symbol: TBC1D14
  Gene Name: TBC1 domain family, member 14
  ENST ID: ENST00000439515
  CDS Start-End: 1-602
ttacctaactgggaaacaatgtggtgctctagaaaagttcgagatttatggtggcagggaatccctccaagtgtgagaggcaaagtctggagcttagccattggcaacgagttaaatatcacccacgagctctttgacatctgtcttgcccgagccaaggagaggtggcggtcccttagcacaggaggctctgaagtggagaacgaagatgctggtttttcagcagcagacagagaagccagtctggagcttattaaactggacatttctagaacatttcctaatctctgcattttccagcaagttctcatctttgtggatttccgtgtgggtcttcagaaatcttttcagaagaggaaagagagggaatctacaaagctccagcagctttggtcctggtgtctgggtggtccatatcatgacatgttgcacagtattttgggcgcttatacttgttaccggccagatgtgggttatgtccagggcatgtccttcatagcagcagtgttgatcttgaacttagatactgcagatgcctttattgccttttctaaccttctgaataaaccctgtcaaatggcgttttttagagtggaccatgg

SEQ ID NO: 189474 - DNA, 4887 bp, Homo sapiens
  Payload ID: 17415
  Gene Symbol: TBC1D14
  Gene Name: TBC1 domain family, member 14
  Uniprot ID: Q9P2M4
  ENST ID: ENST00000448507
  CDS Start-End: 80-2161
gagccccttccccctcccggccgcttcccacttccaagatggctgcgggtggagccgaccagtttctccttggaccaagatgactgatggaaaactctccacctctacaaatggcgtagccttcatgggtattctggatggtcgaccaggaaacccccttcagaacctgcaacacgtcaatctcaaggcgccccgactcctctccgcgcctgagtacgggcccaagctgaaactcagggctttagaagaccggcacagcctccagtccgtggactcggggattcctaccctggagatcgggaacccggagcctgtaccctgcagcgcggtccacgtgaggaggaagcagtccgactccgacctcatccccgagcgggccttccagagcgcctgcgcgctgccatcctgtgcgccaccagctcctagcagcaccgagcgggaacagagcgtgcgcaaatcctccacgtttcccaggacaggctatgactcggtaaagctctatagcccgacctccaaagccctgacccgcagcgatgatgtctccgtctgcagcgtgtccagtcttgggacagagctgtccaccacgctgtccgtcagcaatgaggacatcttggaccttgtggtcacgagcagctccagtgccattgtgaccctggagaatgacgatgacccacagtttaccaacgtcaccttgagctctatcaaggaaacccgtggcttacaccagcaggactgtgttcatgaagctgaggaggggagtaaattgaaaatattggggccatttagtaacttctttgcaaggaacttgcttgctagaaaacaaagtgcaaggcttgacaaacacaatgacttgggatggaagttatttgggaaagcgccactccgagagaatgcccagaaggattcaaagagaatacagaaggaatatgaagacaaggctggaagacctagcaagccaccctctccaaagcagaatgtgaggaagaatcttgactttgaaccactttccaccaccgcactcatcctcgaggacagaccagcaaatctcccagcaaaaccagctgaagaagctcagaagcacagacagcagtatgaagaaatggtggttcaggccaaaaagcgagagctgaaagaagcccagcgaaggaagaagcagctggaagaaagatgcagagtcgaggaaagcattggaaacgctgtgctcacctggaataatgagatcttacctaactgggaaacaatgtggtgctctagaaaagttcgagatttatggtggcagggaatccctccaagtgtgagaggcaaagtctggagcttagccattggcaacgagttaaatatcacccacgagctctttgacatctgtcttgcccgagccaaggagaggtggcggtcccttagcacaggaggctctgaagtggagaacgaagatgctggtttttcagcagcagacagagaagccagtctggagcttattaaactggacatttctagaacatttcctaatctctgcattttccagcaaggtggtccatatcatgacatgttgcacagtattttgggcgcttatacttgttaccggccagatgtgggttatgtccagggcatgtccttcatagcagcagtgttgatcttgaacttagatactgcagatgcctttattgccttttctaaccttctgaataaaccctgtcaaatggcgttttttagagtggaccatggccttatgttgacttattttgctgcatttgaagtattctttgaagaaaatttgccgaaattatttgcgcatttcaagaagaacaacctaactccagatatctacctaattgattggatctttaccttatatagtaaatctctgcccctcgacctggcctgtcgtatctgggacgtgttctgtcgcgatggggaagagttcctgttccgcacggccctgggcatcctgaagctgttcgaggacatcctgaccaagatggacttcattcacatggcccagttcctgacccggctgcccgaggacctgcccgccgaggagctgtttgcctccatcgccacgatccagatgcagagccgaaacaagaagtgggctcaggtactgactgcattgcagaaagacagccgggaaatggagaagggaagtccgtccctccgacactgaggctgcagcgggaattcgcactcggcaccaatcagagccccatgccgcggcccctctgttgtttcagactgacacccgggcagccgagaagaacagacgctctttaagtttgattcctaacactggagttggccttaaacaaaacaaacacaaaaacttttaaagaattaaaccaaggcttagccttaagcagctcagtggaaggatgagctgctgcggaccacagccagccactgcatctgctgcacagttgaacgatgggcagtggctcacccccactcctttatttcagcaaaagctaattaaattgtaatgtttctatgtcaactactgggaagtatgttacagtcttagccaggatgcatgagagatgttatttgggagacttgagatgctttggctgatatttacatgttttcgataagaaagggatcgctgattgagttattgagatagtttttccagagctggaggtcacgtttctaaaactcacctacgaaagatagcattaaaggaacaggggctctctgaggatggccactgatgtgtgtttgtggatacctgggcatcgacccagcctgcaggtgagctctgggccatgttgccttgacacagtcacagtgtagaggctgcaggtgcacacgtgggctccagtgggactgcgctctgggagactgctccctggcatcggtcctgcggaggtggaaagttcgagaggaggagctatttgcgaggaagccctgtggcaatagagataggcttaaaagcggagagaacacagagtggaatcagccccctgtaagtaaaagggtagagaaagagatgtgtggctgggccctctcccacctgcctgttcagtggaggccagggcagcagcccagaacagcacatgtgggggaggtggccccttgtgccagcagtggctcctctctgcctttgagccctgcacagctggacccatcctaagtgccagtgagtccctcacacatttgactttagaacgtgtgcttcatgacccgttgtacagacggaggagcgagcaacacacgtctaacagcctagacaatctcgtcagatgctcatactggaccatcagcctccccattttagctgactttcccagggtcgttggcaaattttttgttctgtcttttccttgactaattgtagaactttgtgtgaggactttggttatccaaaatcacagaaatgaaccgttttgcagctgcgcagtctaaagggcaggccagtgtctggaagcagggcccacgtggcggtccgctggcaggctggtcctggggagcattctgcggacccggtcacgggcttggttagtcatgcgtacatgtgtgccttggggtgctctgcactccacggcccttctcagccacacttcccaccccagggggtgcccccaggctgatctcatttctgatgttgagggctgtttggctctgtctgtatagcttgtaacaggagccttgggctaggggctggggaaggaaagccgagctggcattcgttctctggactttttatgcctgccatacccgctaatgctcctcgaggtgcaggagcaggttgctgagccagtggctgccccgtgccctccttcccagcactatcatgtgtcacgtttcccggactctgcccctacatctcagctgaatctccagggaggctgcagagcatcgtggagaccactttctgcctcggcctttaaatgctgactcacctcctctcggaggaggcgtcctgtcttcacgggggggtcccggtggcctccagacgtagccatttcctgacatcaagatgttgaatgtaatctggtctgagctgggcctgtgggaggggccgcctgaggcctgtgcgctgttgtcctcgcagatgtacttatttttgttcatgttacgggcgttccgttccttaaagatgtatatattttcttactgtacataaagatgttccttaagtcgtacagaaggtggcgcggcaaagggcctcgtgcagtgtgttcagattgcccctggggatcttctgtgtcttcagcgcccagccctgcgtgttcctggtgaagcagtttcacatcagtctctccagatagcactacgatgtattccgcttctgaacaggatcccatgccagtgtggaacaccttcccaatcttagttcagaagtggcttgtatgacctgttcaggggtcacatgaggtctcgccagtttcctgggtcctcttcagaggccagaaagttctaagttctgagtccccggccagggtcccttaacacctcggcacagaggctgttggcaagtgtagaggctgcctctgtgtgtggtttaagtaaactggaaatgagacattgacgtgctgctcctccagaggtctgcacactccacttcacatgccgttgactctcacagtctaagacttcagggccgggacctttgtccagcctgcacagtagagtgaggctgcctctcccgccaggcattgggatcccatttagaaacggcattcacttcagaaggtactttttaactgctcagtttttgactattttaaatagtttgctgaaaactcctgataacacttgctacatatcatgttttaattgcttgtacagttaacctttaattttatttagtaaagtgtatcaaagtaggacttttttgaattgtaaataggtggttttattaaataaaagtcaatgtaaaattgttactta

SEQ ID NO: 189475 - DNA, 4021 bp, Homo sapiens
  Payload ID: 17415
  Gene Symbol: TBC1D14
  Gene Name: TBC1 domain family, member 14
  ENST ID: ENST00000446947
  CDS Start-End: 235-1296
atctgtcctcaacagccgaagcttgctgtgcatgctgctgatgcgctctcctccctggaatatgaagacaaggctggaagacctagcaagccaccctctccaaagcagaatgtgaggaagaatcttgactttgaaccactttccaccaccgcactcatcctcgaggacagaccagcaaatctcccagcaaaaccagctgaagaagctcagaagcacagacagcagtatgaagaaatggtggttcaggccaaaaagcgagagctgaaagaagcccagcgaaggaagaagcagctggaagaaagatgcagagtcgaggaaagcattggaaacgctgtgctcacctggaataatgagatcttacctaactgggaaacaatgtggtgctctagaaaagttcgagatttatggtggcagggaatccctccaagtgtgagaggcaaagtctggagcttagccattggcaacgagttaaatatcacccacgagctctttgacatctgtcttgcccgagccaaggagaggtggcggtcccttagcacaggaggctctgaagtggagaacgaagatgctggtttttcagcagcagacagagaagccagtctggagcttattaaactggacatttctagaacatttcctaatctctgcattttccagcaaggtggtccatatcatgacatgttgcacagtattttgggcgcttatacttgttaccggccagatgtgggttatgtccagggcatgtccttcatagcagcagtgttgatcttgaacttagatactgcagatgcctttattgccttttctaaccttctgaataaaccctgtcaaatggcgttttttagagtggaccatggccttatgttgacttattttgctgcatttgaagtattctttgaagaaaatttgccgaaattatttgcgcatttcaagaagaacaacctaactccagatatctacctaattgattggatctttaccttatatagtaaatctctgcccctcgacctggcctgtcgtatctgggacgtgttctgtcgcgatggggaagagttcctgttccgcacggccctgggcatcctgaagctgttcgaggacatcctgaccaagatggacttcattcacatggcccagttcctgacccggctgcccgaggacctgcccgccgaggagctgtttgcctccatcgccacgatccagatgcagagccgaaacaagaagtgggctcaggtactgactgcattgcagaaagacagccgggaaatggagaagggaagtccgtccctccgacactgaggctgcagcgggaattcgcactcggcaccaatcagagccccatgccgcggcccctctgttgtttcagactgacacccgggcagccgagaagaacagacgctctttaagtttgattcctaacactggagttggccttaaacaaaacaaacacaaaaacttttaaagaattaaaccaaggcttagccttaagcagctcagtggaaggatgagctgctgcggaccacagccagccactgcatctgctgcacagttgaacgatgggcagtggctcacccccactcctttatttcagcaaaagctaattaaattgtaatgtttctatgtcaactactgggaagtatgttacagtcttagccaggatgcatgagagatgttatttgggagacttgagatgctttggctgatatttacatgttttcgataagaaagggatcgctgattgagttattgagatagtttttccagagctggaggtcacgtttctaaaactcacctacgaaagatagcattaaaggaacaggggctctctgaggatggccactgatgtgtgtttgtggatacctgggcatcgacccagcctgcaggtgagctctgggccatgttgccttgacacagtcacagtgtagaggctgcaggtgcacacgtgggctccagtgggactgcgctctgggagactgctccctggcatcggtcctgcggaggtggaaagttcgagaggaggagctatttgcgaggaagccctgtggcaatagagataggcttaaaagcggagagaacacagagtggaatcagccccctgtaagtaaaagggtagagaaagagatgtgtggctgggccctctcccacctgcctgttcagtggaggccagggcagcagcccagaacagcacatgtgggggaggtggccccttgtgccagcagtggctcctctctgcctttgagccctgcacagctggacccatcctaagtgccagtgagtccctcacacatttgactttagaacgtgtgcttcatgacccgttgtacagacggaggagcgagcaacacacgtctaacagcctagacaatctcgtcagatgctcatactggaccatcagcctccccattttagctgactttcccagggtcgttggcaaattttttgttctgtcttttccttgactaattgtagaactttgtgtgaggactttggttatccaaaatcacagaaatgaaccgttttgcagctgcgcagtctaaagggcaggccagtgtctggaagcagggcccacgtggcggtccgctggcaggctggtcctggggagcattctgcggacccggtcacgggcttggttagtcatgcgtacatgtgtgccttggggtgctctgcactccacggcccttctcagccacacttcccaccccagggggtgcccccaggctgatctcatttctgatgttgagggctgtttggctctgtctgtatagcttgtaacaggagccttgggctaggggctggggaaggaaagccgagctggcattcgttctctggactttttatgcctgccatacccgctaatgctcctcgaggtgcaggagcaggttgctgagccagtggctgccccgtgccctccttcccagcactatcatgtgtcacgtttcccggactctgcccctacatctcagctgaatctccagggaggctgcagagcatcgtggagaccactttctgcctcggcctttaaatgctgactcacctcctctcggaggaggcgtcctgtcttcacgggggggtcccggtggcctccagacgtagccatttcctgacatcaagatgttgaatgtaatctggtctgagctgggcctgtgggaggggccgcctgaggcctgtgcgctgttgtcctcgcagatgtacttatttttgttcatgttacgggcgttccgttccttaaagatgtatatattttcttactgtacataaagatgttccttaagtcgtacagaaggtggcgcggcaaagggcctcgtgcagtgtgttcagattgcccctggggatcttctgtgtcttcagcgcccagccctgcgtgttcctggtgaagcagtttcacatcagtctctccagatagcactacgatgtattccgcttctgaacaggatcccatgccagtgtggaacaccttcccaatcttagttcagaagtggcttgtatgacctgttcaggggtcacatgaggtctcgccagtttcctgggtcctcttcagaggccagaaagttctaagttctgagtccccggccagggtcccttaacacctcggcacagaggctgttggcaagtgtagaggctgcctctgtgtgtggtttaagtaaactggaaatgagacattgacgtgctgctcctccagaggtctgcacactccacttcacatgccgttgactctcacagtctaagacttcagggccgggacctttgtccagcctgcacagtagagtgaggctgcctctcccgccaggcattgggatcccatttagaaacggcattcacttcagaaggtactttttaactgctcagtttttgactattttaaatagtttgctgaaaactcctgataacacttgctacatatcatgttttaattgcttgtacagttaacctttaattttatttagtaaagtgtatcaaagtaggacttttttgaattgtaaataggtggttttattaaataaaagtcaatgtaaaattgttactt

SEQ ID NO: 189476 - DNA, 541 bp, Homo sapiens
  Payload ID: 17415
  Gene Symbol: TBC1D14
  Gene Name: TBC1 domain family, member 14
  ENST ID: ENST00000427736
  CDS Start-End: 372-541
gaaaagttttcctactccgacgcgaggctcccggcctgagaagaggcgcctcggtgcgccagaccccgaccccggagcccccttccacctcggaccctcagtccccaggcagcggaccctcctccttggagcccctgaccccgctttcatctctgacccctctacccctggagcccctgacccgcgaaaccccctttcatctcggagccctgacctccttggacctccacccacgcgaaccgtctgtccctgggctagggaatctctctgcctccgccttggagcctcccattaccgggccgcgaagaccctggcccggggactgtctcggggccggggtagctgccttgaggatttctccttggaccaagatgactgatggaaaactctccacctctacaaatggcgtagccttcatgggtattctggatggtcgaccaggaaacccccttcagaacctgcaacacgtcaatctcaaggcgccccgactcctctccgcgcctgagtacgggcccaagctgaaactcagggctttagaaga

SEQ ID NO: 189477 - DNA, 663 bp, Homo sapiens
  Payload ID: 17415
  Gene Symbol: TBC1D14
  Gene Name: TBC1 domain family, member 14
  ENST ID: ENST00000444368
  CDS Start-End: 282-663
atagattaagagactgaggctggctgggaggacgccacggcgccgctcccaagaccaccgcggcggggcctgagctccggtgtcacgcaaagcttcccttccgcggcggggcccgggccgtctcccgcacaccggccggggcaggggagccccatcgatgcgctccgccgctcggctccctacgcctgagccctgcccgctcgagccccttccccctcccggccgcttcccacttccaagatggctgcgggtggagccgaccagtttctccttggaccaagatgactgatggaaaactctccacctctacaaatggcgtagccttcatgggtattctggatggtcgaccaggaaacccccttcagaacctgcaacacgtcaatctcaaggcgccccgactcctctccgcgcctgagtacgggcccaagctgaaactcagggctttagaagaccggcacagcctccagtccgtggactcggggattcctaccctggagatcgggaacccggagcctgtaccctgcagcgcggtccacgtgaggaggaagcagtccgactccgacctcatccccgagcgggccttccagagcgcctgcgcgctgccatcctgtgcgccaccagctcctagcagcaccgagcgggaacagagcgtgcgcaaatcct

SEQ ID NO: 189478 - DNA, 2159 bp, Homo sapiens
  Payload ID: 17416
  Gene Symbol: TBC1D15
  Gene Name: TBC1 domain family, member 15
  Uniprot ID: Q8TC07
  ENST ID: ENST00000319106
  CDS Start-End: 92-2140
attaccaggcacgcgcaggaaacatggcggcggcgggtgttgtgagcgggaaggtttttggtttcttcttgattcaatcttgataagtagtatgtgtccaggactttatccatactccagtttgttggagtatggtaggagtatgattatatatgaacaagaaggagtatatattcactcatcttgtggaaagaccaatgaccaagacggcttgatttcaggaatattacgtgttttagaaaaggatgccgaagtaatagtggactggagaccattggatgatgcattagattcctctagtattctctatgctagaaaggactccagttcagttgtagaatggactcaggccccaaaagaaagaggtcatcgaggatcagaacatctgaacagttacgaagcagaatgggacatggttaatacagtttcatttaaaaggaaaccacataccaatggagatgctccaagtcatagaaatgggaaaagcaaatggtcattcctgttcagtttgacagacctgaaatcaatcaagcaaaacaaagagggtatgggctggtcctatttggtattctgtctaaaggatgacgtcgttctccctgctctacactttcatcaaggagatagcaaactactgattgaatctcttgaaaaatatgtggtattgtgtgaatctccacaggataaaagaacacttcttgtgaattgtcagaataagagtctttcacagtcttttgaaaatcttcttgatgagccagcatatggtttaatacaaaaaattaaaaaggacccttatacggcaactatgataggattttccaaagtcacaaactacatttttgacagtttgagaggcagcgatccctctacacatcaacgaccaccttcagaaatggcagattttcttagtgatgctattccaggtctaaagataaatcaacaagaagaaccaggatttgaagtcatcacaagaattgatttgggggaacgccctgttgttcaaaggagagaaccggtatcactggaagaatggactaagaacattgattctgaaggaagaattttaaatgtagataatatgaagcagatgatatttagagggggacttagtcatgcattgagaaagcaagcatggaaatttcttctgggttattttccctgggacagtaccaaggaggaaagaacccaattacaaaagcaaaaaactgatgaatacttcagaatgaaactgcagtggaaatccatcagccaggaacaagagaaaagaaattcgaggttaagagattatagaagtcttatcgaaaaagatgttaacagaacagatcgaacaaacaagttttatgaaggccaagataatccagggttgattttacttcatgacattttgatgacctactgtatgtatgattttgatttaggatatgttcaaggaatgagtgatttactttcccctcttttatatgtgatggaaaatgaagtggatgccttttggtgctttgcctcttacatggaccaaatgcatcagaattttgaagaacaaatgcaaggcatgaagacccagctaattcagctgagtaccttacttcgattgttagacagtggattttgcagttacttagaatctcaggactctggatacctttatttttgcttcaggtggcttttaatcagattcaaaagggaatttagttttctagatattcttcgattatgggaggtaatgtggaccgaactaccatgtacaaatttccatcttcttctctgttgtgctattctggaatcagaaaagcagcaaataatggaaaagcattatggcttcaatgaaatacttaagcatatcaatgaattgtccatgaaaattgatgtggaagatatactctgcaaggcagaagcaatttctctacagatggtaaaatgcaaggaattgccacaagcagtctgtgagatccttgggcttcaaggcagtgaagttacaacaccagattcagacgttggtgaagacgaaaatgttgtcatgactccttgtcctacatctgcatttcaaagtaatgccttgcctacactctctgccagtggagccagaaatgacagcccaacacagataccagtgtcctcagatgtctgcagattaacacctgcatgatcactgttcttgctttttt

SEQ ID NO: 189479 - DNA, 566 bp, Homo sapiens
  Payload ID: 17416
  Gene Symbol: TBC1D15
  Gene Name: TBC1 domain family, member 15
  ENST ID: ENST00000498482
  CDS Start-End: 24-173
attaccaggcacgcgcaggaaacatggcggcggcgggtgttgtgagcgggaaggcgacattatcagcaagatattcaagaattttaacagatgattcgcttggtgacaggtggtgctacttcctcaaatctttgatctgttcttccctttctttttctcaagattatatatgaacaagaaggagtatatattcactcatcttgtggaaagaccaatgaccaagacggcttgatttcaggaatattacgtgttttagaaaaggatgccgaagtaatagtggactggagaccattggatgatgcattagattcctctagtattctctatgctagaaaggactccagttcagttgtagaatggactcaggccccaaaagaaagaggtcatcgaggatcagaacatctgaacagttacgaagcagaatgggacatggttaatacagtttcatttaaaaggaaaccacataccaatggagatgctccaagtcatagaaatgggaaaagcaaatggtcattcctgttcagtttgacagacctgaaatcaatcaagcaaaacaaagagggtat

SEQ ID NO: 189480 - DNA, 1223 bp, Homo sapiens
  Payload ID: 17416
  Gene Symbol: TBC1D15
  Gene Name: TBC1 domain family, member 15
  ENST ID: ENST00000491063
  CDS Start-End: 390-1223
attaccaggcacgcgcaggaaacatggcggcggcgggtgttgtgagcgggaagattcgcttggtgacaggtggtgctacttcctcaaatctttgatctgttcttccctttctttttctcaagattatatatgaacaagaaggagtatatattcactcatcttgtggaaagaccaatgaccaagacggcttgatttcaggaatattacgtgttttagaaaaggatgccgaagtaatagtggactggagaccattggatgatgcattagattcctctagtattctctatgctagaaaggactccagttcagttgtagaatggactcaggccccaaaagaaagaggtcatcgaggatcagaacatctgaacagttacgaagcagaatgggacatggttaatacagtttcatttaaaaggaaaccacataccaatggagatgctccaagtcatagaaatgggaaaagcaaatggtcattcctgttcagtttgacagacctgaaatcaatcaagcaaaacaaagagggtatgggctggtcctatttggtattctgtctaaaggatgacgtcgttctccctgctctacactttcatcaaggagatagcaaactactgattgaatctcttgaaaaatatgtggtattgtgtgaatctccacaggataaaagaacacttcttgtgaattgtcagaataagagtctttcacagtcttttgaaaatcttcttgatgagccagcatatggtttaatacaaaaaattaaaaaggacccttatacggcaactatgataggattttccaaagtcacaaactacatttttgacagtttgagaggcagcgatccctctacacatcaacgaccaccttcagaaatggcagattttcttagtgatgctattccaggtctaaagataaatcaacaagaagaaccaggatttgaagtcatcacaagaattgatttgggggaacgccctgttgttcaaaggagagaaccggtatcactggaagaatggactaagaacattgattctgaaggaagaattttaaatgtagataatatgaagcagatgatatttagagggggacttagtcatgcattgagaaagcaagcatggaaatttcttctgggttattttccctgggacagtaccaaggaggaaagaacccaattacaaaagcaaaaaactgatgaatacttcagaatgaaactgcagtggaaatccatcagc

SEQ ID NO: 189481 - DNA, 1995 bp, Homo sapiens
  Payload ID: 17416
  Gene Symbol: TBC1D15
  Gene Name: TBC1 domain family, member 15
  ENST ID: ENST00000462788
  CDS Start-End: 24-398
attaccaggcacgcgcaggaaacatggcggcggcgggtgttgtgagcgggaagattatatatgaacaagaaggagtatatattcactcatcttgtggaaagaccaatgaccaagacggcttgatttcaggaatattacgtgttttagaaaaggatgccgaagtaatagtggactggagaccattggatgatgcattagattcctctagtattctctatgctagaaaggactccagttcagttgtagaatggactcaggccccaaaagaaagaggtcatcgaggatcagaacatctgaacagttacgaagcagaatgggacatggttaatacagtttcatttaaaaggaaaccacataccaatggagatctccacaggataaaagaacacttcttgtgaattgtcagaataagagtctttcacagtcttttgaaaatcttcttgatgagccagcatatggtttaatacaaaaaattaaaaaggacccttatacggcaactatgataggattttccaaagtcacaaactacatttttgacagtttgagaggcagcgatccctctacacatcaacgaccaccttcagaaatggcagattttcttagtgatgctattccaggtctaaagataaatcaacaagaagaaccaggatttgaagtcatcacaagaattgatttgggggaacgccctgttgttcaaaggagagaaccggtatcactggaagaatggactaagaacattgattctgaaggaagaattttaaatgtagataatatgaagcagatgatatttagagggggacttagtcatgcattgagaaagcaagcatggaaatttcttctgggttattttccctgggacagtaccaaggaggaaagaacccaattacaaaagcaaaaaactgatgaatacttcagaatgaaactgcagtggaaatccatcagccaggaacaagagaaaagaaattcgaggttaagagattatagaagtcttatcgaaaaagatgttaacagaacagatcgaacaaacaagttttatgaaggccaagataatccagggttgattttacttcatgacattttgatgacctactgtatgtatgattttgatttaggatatgttcaaggaatgagtgatttactttcccctcttttatatgtgatggaaaatgaagtggatgccttttggtgctttgcctcttacatggaccaaatgcatcagaattttgaagaacaaatgcaaggcatgaagacccagctaattcagctgagtaccttacttcgattgttagacagtggattttgcagttacttagaatctcaggactctggatacctttatttttgcttcaggtggcttttaatcagattcaaaagggaatttagttttctagatattcttcgattatgggaggtaatgtggaccgaactaccatgtacaaatttccatcttcttctctgttgtgctattctggaatcagaaaagcagcaaataatggaaaagcattatggcttcaatgaaatacttaagcatatcaatgaattgtccatgaaaattgatgtggaagatatactctgcaaggcagaagcaatttctctacagatggtaaaatgcaaggaattgccacaagcagtctgtgagatccttgggcttcaaggcagtgaagttacaacaccagattcagacgttggtgaagacgaaaatgttgtcatgactccttgtcctacatctgcatttcaaagtaatgccttgcctacactctctgccagtggagccagaaatgacagcccaacacagataccagtgtcctcagatgtctgcagattaacacctgcatgatcactgttcttgcttttttgggaagagacactttgttgcaaccctttttcaagtacttgaaagttgaaaatttgaaatcttggtattgatcatgctttaaggtttatgtaaagaaagtgtactgatgttcttacattaaagctttacaaagatttaaa

SEQ ID NO: 189482 - DNA, 640 bp, Homo sapiens
  Payload ID: 17416
  Gene Symbol: TBC1D15
  Gene Name: TBC1 domain family, member 15
  ENST ID: ENST00000472611
  CDS Start-End: 24-281
attaccaggcacgcgcaggaaacatggcggcggcgggtgttgtgagcgggaagattatatatgaacaagaaggagtatatattcactcatcttgtggaaagaccaatgaccaagacggcttgatttcaggaatattacgtgttttagaaaaggatgccgaagtaatagtggactggagaccattggatgatgcattagattcctctagtattctctatgctagaaagatgctccaagtcatagaaatgggaaaagcaaatggtcattcctgttcagtttgacagacctgaaatcaatcaagcaaaacaaagagggtatgggctggtcctatttggtattctgtctaaaggatgacgtcgttctccctgctctacactttcatcaaggagatagcaaactactgattgaatctcttgaaaaatatgtggtattgtgtgaatctccacaggataaaagaacacttcttgtgaattgtcagaataagagtctttcacagtcttttgaaaatcttcttgatgagccagcatatggtttaatacaaaaaattaaaaaggacccttatacggcaactatgataggattttccaaagtcacaaactacatttttgacagtttgagaggcagcgatccctctacacat

SEQ ID NO: 189483 - DNA, 363 bp, Homo sapiens
  Payload ID: 17416
  Gene Symbol: TBC1D15
  Gene Name: TBC1 domain family, member 15
  ENST ID: ENST00000468049
  CDS Start-End: 20-238
ccaggcacgcgcaggaaacatggcggcggcgggtgttgtgagcgggaagattatatatgaacaagaaggagtatatattcactcatcttgtggaaagaccaatgaccaagacggcttgatttcaggaatattacgtgttttagaaaaggatgccgaagtaatagtggactggagaccattggatgatgcattagattcctctagtattctctatgctagaaagatctccacaggataaaagaacacttcttgtgaattgtcagaataagagtctttcacagtcttttgaaaatcttcttgatgagccagcatatggtttaatacaaaaaattaaaaaggacccttatacggcaactatgatag

SEQ ID NO: 189484 - DNA, 2489 bp, Homo sapiens
  Payload ID: 17416
  Gene Symbol: TBC1D15
  Gene Name: TBC1 domain family, member 15
  Uniprot ID: Q8TC07
  ENST ID: ENST00000485960
  CDS Start-End: 24-2048
attaccaggcacgcgcaggaaacatggcggcggcgggtgttgtgagcgggaagattatatatgaacaagaaggagtatatattcactcatcttgtggaaagaccaatgaccaagacggcttgatttcaggaatattacgtgttttagaaaaggatgccgaagtaatagtggactggagaccattggatgatgcattagattcctctagtattctctatgctagaaaggactccagttcagttgtagaatggactcaggccccaaaagaaagaggtcatcgaggatcagaacatctgaacagttacgaagcagaatgggacatggttaatacagtttcatttaaaaggaaaccacataccaatggagatgctccaagtcatagaaatgggaaaagcaaatggtcattcctgttcagtttgacagacctgaaatcaatcaagcaaaacaaagagggtatgggctggtcctatttggtattctgtctaaaggatgacgtcgttctccctgctctacactttcatcaaggagatagcaaactactgattgaatctcttgaaaaatatgtggtattgtgtgaatctccacaggataaaagaacacttcttgtgaattgtcagaataagagtctttcacagtcttttgaaaatcttcttgatgagccagcatatggtttaatacaaaaaattaaaaaggacccttatacggcaactatgataggattttccaaagtcacaaactacatttttgacagtttgagaggcagcgatccctctacacatcaacgaccaccttcagaaatggcagattttcttagtgatgctattccaggtctaaagataaatcaacaagaagaaccaggatttgaagtcatcacaagaattgatttgggggaacgccctgttgttcaaaggagagaaccggtatcactggaagaatggactaagaacattgattctgaaggaagaattttaaatgtagataatatgaagcagatgatatttagagggggacttagtcatgcattgagaaagcaagcatggaaatttcttctgggttattttccctgggacagtaccaaggaggaaagaacccaattacaaaagcaaaaaactgatgaatacttcagaatgaaactgcagtggaaatccatcagccaggaacaagagaaaagaaattcgaggttaagagattatagaagtcttatcgaaaaagatgttaacagaacagatcgaacaaacaagttttatgaaggccaagataatccagggttgattttacttcatgacattttgatgacctactgtatgtatgattttgatttaggatatgttcaaggaatgagtgatttactttcccctcttttatatgtgatggaaaatgaagtggatgccttttggtgctttgcctcttacatggaccaaatgcatcagaattttgaagaacaaatgcaaggcatgaagacccagctaattcagctgagtaccttacttcgattgttagacagtggattttgcagttacttagaatctcaggactctggatacctttatttttgcttcaggtggcttttaatcagattcaaaagggaatttagttttctagatattcttcgattatgggaggtaatgtggaccgaactaccatgtacaaatttccatcttcttctctgttgtgctattctggaatcagaaaagcagcaaataatggaaaagcattatggcttcaatgaaatacttaagcatatcaatgaattgtccatgaaaattgatgtggaagatatactctgcaaggcagaagcaatttctctacagatggtaaaatgcaaggaattgccacaagcagtctgtgagatccttgggcttcaaggcagtgaagttacaacaccagattcagacgttggtgaagacgaaaatgttgtcatgactccttgtcctacatctgcatttcaaagtaatgccttgcctacactctctgccagtggagccagaaatgacagcccaacacagataccagtgtcctcagatgtctgcagattaacacctgcatgatcactgttcttgcttttttgggaagagacactttgttgcaaccctttttcaagtacttgaaagttgaaaatttgaaatcttggtattgatcatgctttaaggtttatgtaaagaaagtgtactgatgttcttacattaaagctttacaaagatttaaactaattatttttgtagttacttctaccaaatagcctttccttttcgataacattcctcagtatttttatagccaagtacattttattttcttgctgatgaactggaattggataaatattgcaagtggatgagttggaaattatgcactttgaaaaacattcactttgtttaagcttattgggtttcagatttgattaaattaaatgtggaggctttctatagcattctaagctgagaagtagattgttacccagtaatgaaataaaaaataaaaataaaagg

SEQ ID NO: 189485 - DNA, 6184 bp, Homo sapiens
  Payload ID: 17416
  Gene Symbol: TBC1D15
  Gene Name: TBC1 domain family, member 15
  Uniprot ID: Q8TC07
  ENST ID: ENST00000550746
  CDS Start-End: 65-2140
gttgttgtatgtccgagagacacgtgaggttctgctacgtcattaccaggcacgcgcaggaaacatggcggcggcgggtgttgtgagcgggaagattatatatgaacaagaaggagtatatattcactcatcttgtggaaagaccaatgaccaagacggcttgatttcaggaatattacgtgttttagaaaaggatgccgaagtaatagtggactggagaccattggatgatgcattagattcctctagtattctctatgctagaaaggactccagttcagttgtagaatggactcaggccccaaaagaaagaggtcatcgaggatcagaacatctgaacagttacgaagcagaatgggacatggttaatacagtttcatttaaaaggaaaccacataccaatggagatgctccaagtcatagaaatgggaaaagcaaatggtcattcctgttcagtttgacagacctgaaatcaatcaagcaaaacaaagagggtatgggctggtcctatttggtattctgtctaaaggatgacgtcgttctccctgctctacactttcatcaaggagatagcaaactactgattgaatctcttgaaaaatatgtggtattgtgtgaatctccacaggataaaagaacacttcttgtgaattgtcagaataagagtctttcacagtcttttgaaaatcttcttgatgagccagcatatggtttaatacaagcaggactgctagacagaagaaagctgttgtgggccattcaccactggaaaaaaattaaaaaggacccttatacggcaactatgataggattttccaaagtcacaaactacatttttgacagtttgagaggcagcgatccctctacacatcaacgaccaccttcagaaatggcagattttcttagtgatgctattccaggtctaaagataaatcaacaagaagaaccaggatttgaagtcatcacaagaattgatttgggggaacgccctgttgttcaaaggagagaaccggtatcactggaagaatggactaagaacattgattctgaaggaagaattttaaatgtagataatatgaagcagatgatatttagagggggacttagtcatgcattgagaaagcaagcatggaaatttcttctgggttattttccctgggacagtaccaaggaggaaagaacccaattacaaaagcaaaaaactgatgaatacttcagaatgaaactgcagtggaaatccatcagccaggaacaagagaaaagaaattcgaggttaagagattatagaagtcttatcgaaaaagatgttaacagaacagatcgaacaaacaagttttatgaaggccaagataatccagggttgattttacttcatgacattttgatgacctactgtatgtatgattttgatttaggatatgttcaaggaatgagtgatttactttcccctcttttatatgtgatggaaaatgaagtggatgccttttggtgctttgcctcttacatggaccaaatgcatcagaattttgaagaacaaatgcaaggcatgaagacccagctaattcagctgagtaccttacttcgattgttagacagtggattttgcagttacttagaatctcaggactctggatacctttatttttgcttcaggtggcttttaatcagattcaaaagggaatttagttttctagatattcttcgattatgggaggtaatgtggaccgaactaccatgtacaaatttccatcttcttctctgttgtgctattctggaatcagaaaagcagcaaataatggaaaagcattatggcttcaatgaaatacttaagcatatcaatgaattgtccatgaaaattgatgtggaagatatactctgcaaggcagaagcaatttctctacagatggtaaaatgcaaggaattgccacaagcagtctgtgagatccttgggcttcaaggcagtgaagttacaacaccagattcagacgttggtgaagacgaaaatgttgtcatgactccttgtcctacatctgcatttcaaagtaatgccttgcctacactctctgccagtggagccagaaatgacagcccaacacagataccagtgtcctcagatgtctgcagattaacacctgcatgatcactgttcttgcttttttgggaagagacactttgttgcaaccctttttcaagtacttgaaagttgaaaatttgaaatcttggtattgatcatgctttaaggtttatgtaaagaaagtgtactgatgttcttacattaaagctttacaaagatttaaactaattatttttgtagttacttctaccaaatagcctttccttttcgataacattcctcagtatttttatagccaagtacattttattttcttgctgatgaactggaattggataaatattgcaagtggatgagttggaaattatgcactttgaaaaacattcactttgtttaagcttattgggtttcagatttgattaaattaaatgtggaggctttctatagcattctaagctgagaagtagattgttacccagtaatgaaataaaaaataaaaataaaaggatttttttctctattgtttacgacagtactcagcttaaatatttatgctggtcaaatgtgatttaaattggacattttcatcaatgcagtctaatgtgtagataaatatttcaaccataataagtggattggcagtatattttttacattgaacttttcttcacttgtatataaagattatatataagtacttatttatgagtataagaaaggttaggcatattttcattaactgaataaacgacttgatttatataacctggtttatcaaaatttaacatggcttcagtatgagatctttttcaaaactattttcttaaacatttatttcatgagattatgttcaaccctgtacctggtgtaattttaaaattaattgcttgtaacctcactttactaataatgtttattatctttcctaataatgcattaactgattaatcaggtgtttaaatttttataaaatactcttgcaaaaagtttatttgaaaaatttctagatggtctcatgagtttcaaaataataatttttgtgtatgaacaaagctgttgtttttaccatgcagtattgcatgattttaagttatgtggaattaacataactgattttgttttaattgtaagttgttaactcctgtatatatcattaaaataaatctgaagttgaagtagtgtttttagttaaattatacttagaaatagtctgcttttttaaaattttttttcttgagaaagagtcttgctctgttgcccaggctggagtgcagtggcgcagtcctggctcactgcagcctccgccttctgggttcaagcgattctcctgtctcagcctcccgagcagctgggactacaggcttgtgccatcgcgcctgactaatttttgtattttgagtagagatggggtttcaccatgttggccaggctggtctcgaactcttgacctcaagtgatccactcgcttcagcctcccaaagtgctgagattacaggtgtgagccactgtgcccggctaattctttaatagaagaaaaaacatccaagatggacctcaattcatctcttatttttatatgattaaaatgataatctggccgggcgcggtggctcacgcctgtaatcccagcactttgggaggccgaggcgggcggatcacgaggtcaggagatcgagaccatcccggctaaaacggtgaaaccccgtctctactaaaaatacaaaaaattagccgggcgtagtggcgggcgcctgtagtcccagctacttgggaggctgaggcaggagaatggcgtgaacccgggaggcggagcttgcagtgagccgagatcccgccactgcactccagcctgggcgacagagcgagactccgtctcaaaaaaaaaaaaaaaaaaatgataatctgaataagttatggaaatgaaaaccatcctttttataactgaaaaaaaattttcattagcatggaaatgggcacagtgttgccttgaaagatacagttatttgactcagtaaagcagcttattacaactgatgctaatagtatagagaaaaaagttgtgcagttctaaaatggtcctagagattgacttttttcccccaagaaagttagggaacaaaacgaacttttttcctggttgagcattaactgacaatcacgacagtagaaccgttagagtttagtttttaatattatgtgtgttatctttcatcagttaataatgagtaagcctattcagaaaaagaacataaactgatcaaaaactcagcatctccagcctttcatttcctgctattcaggaaattgcttagaacatcttgatgtcctccttgttcttcctggacagtgactttttgggagtttgttcctgctgcgtaatgtgatacccacttcagattttttttttatcaatacatttagtaagttgaacttctgtcaagttttattacaaaattacttgttaaaacaatttttactaaactgcatttctatctagcatatttttgatatggaagtgatagtatagtatagttccaggagaagtcttaaatcagtccacagagtccagttagcaaatactctgtgccattaagattgctaaaatacacagttcaggtaaatttactagtgttttttaaaggtttatttgttttcacaagatgctctgtccacacccttataacatgtaaaatattgtgtgctgtattatgtggtaaagttgttaaaattcagtttctaacattaacttaaaagtacagacaatctaacatgatgatttgacttacaaactttcaactaaatttatgatggctttaaagcagtgcactgaatagaaaccatactttgagtacccatacagccatttttcacttttactacaatattctataaatcacatgagatatttaacactttattataaaataggctttgtgttagatgattttgcccaaatgtaaactaatgtagtgttctgagcatgtttaagttagggtaggctaaactatgtttggtaggttagatgtattaaaagcatttttgattaatgatgtcttcaatttatgatgtgtttattggaacataacctcaatataagttgaaaagcatatgtattttcaattctggcatgaacctatgggaatcttttgcatttaagaacctccccattttaataatttcatgggtctaagattcttcatctgtttataaggaactttagtcttagtgattagagactaaatttttttttgagcagtaagaaaacagccttttgggacagatagtgagtgattcttaggaacttgacattgccaagaaattttatagatgccgaagaattcttatgtgaaattcacataagcatgcccattactaaagacagtttgtataaagtaaccctaaatgtttattgaggaacctacagcttcaactgacttacgtgcagatatgtaccaggagaacatcattttagcttgggcgtctttacttggggttttcagaggatccaggaacctcactgtatgcaaagtcttgtggatgtacctgaatgtttttggaggcaggtcacatagtttctgaaagtgttctcttattttcctcaaatgtaggtaaccattgttacaagttatttaacaggagaatagtaacaatgtctaacttatgctaatgattttgtgtgctgagctcccattaattaaaatgtcttcagaatgcttgtttccagatccttggtctgtattattaagatacatgtctaggtgctacttcaggcttacagaatcagtctttggaagtcagatcaggaatctgcattttaacaagcatccaggtgatttcttgagcccctctgaagttagagcactaccattatatattgtatttcatatgttaatcttttgatttatggccaagtggacaattcccttaatttttaaaagcttgtcccttgattttctaagatatttgctctagttccggtcgccatttttagtaaaaagtgatgacagctcagcctgttatatgtagatttctcatttcttactttctgaagaaaattaagctttctgtgtcacttctgagcacgaaacaagattaaattattggaatctg

SEQ ID NO: 189486 - DNA, 863 bp, Homo sapiens
  Payload ID: 17416
  Gene Symbol: TBC1D15
  Gene Name: TBC1 domain family, member 15
  ENST ID: ENST00000482439
  CDS Start-End: 504-863
ttttgccggatgttgttgtatgtccgagagacacgtgaggttctgctacgtcattaccaggcacgcgcaggaaacatggcggcggcgggtgttgtgagcgggaagggtggatgctgatatactgcttgacttactgcgtatttgaagattatcctgtttgattttccatctaaactgatccaggctgggacttttcaagaggggatcccttccgtttaaacatctccctctttcagattatatatgaacaagaaggagtatatattcactcatcttgtggaaagaccaatgaccaagacggcttgatttcaggaatattacgtgttttagaaaaggatgccgaagtaatagtggactggagaccattggatgatgcattagattcctctagtattctctatgctagaaaggactccagttcagttgtagaatggactcaggccccaaaagaaagaggtcatcgaggatcagaacatctgaacagttacgaagcagaatgggacatggttaatacagtttcatttaaaaggaaaccacataccaatggagatgctccaagtcatagaaatgggaaaagcaaatggtcattcctgttcagtttgacagacctgaaatcaatcaagcaaaacaaagagggtatgggctggtcctatttggtattctgtctaaaggatgacgtcgttctccctgctctacactttcatcaaggagatagcaaactactgattgaatctcttgaaaaatatgtggtattgtgtgaatctccacaggataaaagaacacttcttgtgaattgtcagaataagagtctttcacagtcttttgaaaatcttcttgatgagccagcatatggtttaatacaa

SEQ ID NO: 189487 - DNA, 10936 bp, Homo sapiens
  Payload ID: 17417
  Gene Symbol: TBC1D16
  Gene Name: TBC1 domain family, member 16
  Uniprot ID: Q8TBP0
  ENST ID: ENST00000310924
  CDS Start-End: 117-2420
gacggtggcggctctcggagccggcgcgaatccggcccccgcagcgggacccgggcaggtcttgacgagccctgcccgggccgacgcatgcggaggatggaaacacttgcccggcaatgtctctgggccgcctccttcgcagggcctcctccaaagcctcggacctcctgaccctcacccccggtggcagcggcagcgggtccccctctgtcctggatggagagatcatctactccaagaacaatgtctgcgtgcacccgccggaggggctgcaggggctgggggagcaccacccaggttacctgtgcttgtacatggagaaggatgagatgctgggagccaccctcatcctggcatgggtccccaactctcgcatccagaggcaggacgaggaggccctgcgctacatcacacccgagagctcccccgttcgcaaggcaccccgccctcggggccggcgcacccggagctcaggagcctcccaccagccctccccgacggagctgcggcctaccctgacccccaaagatgaggacatcctggtggtggcccagagtgttccagaccgcatgctcgccagccctgcgccagaggatgaggagaagctggcgcagggcttgggggtggatggtgcccagccagcctcgcagcctgcttgcagcccctccgggatcttgtcgacggtcagtccgcaggatgtcaccgaggaggggcgggagccgcggcccgaggccggggaggaggatggctctttggaactgtcagccgagggcgtgagcagagacagctcctttgactcagactcagacaccttctcctcgcccttctgcctctcgcccatcagcgcggcgctggccgagagccgcggctccgtgtttctggaaagtgacagcagccccccgtccagctccgacgccggcctgcggttcccggacagcaacggcctcctgcagaccccacgctgggacgagccgcagcgggtgtgcgccctggagcagatttgcggcgtgttccgcgtggacctgggccacatgcgctccctccgccttttcttcagcgacgaggcctgcaccagcggccagctggtcgttgccagccgagagagccagtacaaggttttccacttccaccacggcggcctggacaagctgtctgacgtgttccagcagtggaaatactgcaccgagatgcagctcaaagaccagcaggtcgcccccgataagacatgcatgcagttctccatccgccgccccaagctgccgtcctccgagacgcaccccgaggagagcatgtacaagaggctcggcgtctccgcctggctcaaccacctgaatgagctgggccaggtggaggaggagtacaagctgcggaaggccattttctttggcggtattgatgtgtcaatccgcggggaggtctggcccttcctgctgcgctattacagccacgagtccacgtcggaggagcgggaggcgctgcggctgcagaagcgaaaggagtactctgagatccagcagaaaaggctctccatgactcccgaggagcacagagcgttctggcgtaatgtgcagttcactgtggacaaagacgtggtccggacagatcggaacaaccagttcttccggggggaagacaatcccaatgtggagagcatgaggaggatcctgctgaactacgccgtgtacaaccctgccgtcggctattcccaagggatgtcggacctggtggcgcccatcttggccgaggtcctggatgagtcagacaccttctggtgctttgtgggtttgatgcagaacacgatcttcgtcagctcaccccgggacgaggacatggagaaacaactgctgtacctgcgcgagctgctgcggctgacgcacgtgcgcttctaccagcacctggtctcgctgggcgaggacggcctgcagatgctcttctgccaccgctggctccttctgtgcttcaagcgggagttccccgaggccgaagcgctgcggatctgggaggcctgctgggcccactaccagacggactacttccaccttttcatctgcgtggccatcgtggccatctacggggatgacgtcatcgagcagcagctggccacggaccagatgctcctgcacttcggaaacctggccatgcacatgaacggggagctcgttctccggaaggcgaggagtttgctgtaccagttccgcctcctgccccggatcccctgcagcctgcacgatctgtgtaagctgtgcgggtcaggcatgtgggacagcggctccatgcccgcggtggagtgcaccggccaccatcccggctcggagagctgtccctacgggggcacggtggagatgccttcccccaagtccctgagggaaggcaagaagggcccaaagacgccgcaggacggcttcggcttccgcagataggtcgggcccccgacaccggacaggggttgaggggacctcctcagaggccctgggcacgggagggggtggggctgggcgtgaaggggacaggggacggtagaaacctaaggaaaatgcttttgggcaacatgagaggaaccttttcatattaatgacaaaattagagtctggaagtgacagaagtcagatctacagccacccagaggaaagtcagctcctgaaacgctgcagtggaacgcgcagccaccgcacctgagacgcaggctggctgggctctcctgctggctgccctggaggatttcaacatgtcccaggatttgctccaccctcgagggcagccagacagcgtcgccaggcaatgaggaaagcagagacaggagaggaaggcctcactcacccactgcgtcgagggctgcagaacacagcggggtcctgtccaggcccagggacatctttgcaagccagacacacttcctcttgagacctcgttctctcggagtgagccaaacacacttcccaaaacgtccccagccacagctgggatgccgatggaaaggcatctgccataaaagaaaagcaaaagataaaaagcccaaccgatgtggggatagagaggcggaagagcagtcaggcttgaggagctggcgcttgtaatgtttatccgtttaaacatttcgtcctcctggtacacgaagggaactgtctgcccaggagcctgagcctcaggctgttggagaagcatctgatgcctttttctttgctgggggtcttctacgtgaggttccttggcgttgtttaaggtcaactccaccaaatacagcaaccagctggggcttgaatgggtcgatgtgtgcgtgtgtccctgcgtgcatgcatgcatgcacacgtgcgtgcgtgtttgtgtttgcaagatcctctgacaatgatctgctttgtcccagggacgtggtagtgtattagctgaccaaccaagacaaggacacctggaaatagttagactcttccacttcccttcaggacctgtgaactcagatatgtaagtcagcttctcaggtggtcggacgtgagagcgaccacagtgaaggagccagcactcagggctctctgccttctatgtgggaatgaggtcttcccaacagactctccctcttccaaaagattgtgtatcagttgctccttctgggatttagagatggacagaaaagggtgtgcgatctatgctgtgagaactcccagccagcttagaagtgtcgagccatttgcacagaaagccactccttgagcgaggagaccaaatccctcctgaaatcctccatcgcgtccttctggggagaaaaacccttgatgtgctgagaaccatcatggggaccaggatagaaggcttcttcccactcaaagcttttctccctggagggtgggcactgctgggccatgccacttcaaagcagtgttcctcagcaggaaagcggaggtcaccacttaccggcctcctccaccttctcggcttctcttttctccatgaacccaggtcgtccagcaggtacttccaagttcccaggtctgtctgcctaagagccttttgaggagaccgtcctggagccccatcagtgcccagatcctggggtaccgaccattgctgtctagcagtgggggatcctgtggtgggaatggggtgggcttctcatccatgttgcttctgggaagagagggttgcctttctgggctagggaggtggctggagcttctgccctgaccctccgctagaaaccagttatatccattgccacagcaatactgtgtaacaaatccgccaacactcggtggcctgcaacagtcagcactgatctagggcaggagtcagcagtctgggcagggtgattcttctggtctaggctgggcttgtttgtttagggccagtgggttgttaagtcccaggggatgctcatggtgcagaggtcggacctggccctgctctgtggtctcttgcatccctcctgcaggccagccatggcacagccaaaggcacggagggagagacagcaagtgcctttccaagccttggtggacaccacacctgcagctctccccttggccacagcaagtcacgtggctgggctcagcattaaggggtgggggacaggcctgccactttattgtccgctctgcacagtcgggtggcagtaggctgagaatttggagggctaaacaactgggactctggagagtctgtgtcctaataatgcctgctttggagcactccttccccacccgcctgctccaggggaatagcgtccctggtcctagcatttcactagatacctcgtgcctttgaaccgctgtgtttgggagggaggaagaggatagacaggtccagggctcccctcacttgggaaggtcctagtagaaggcattccttctgagtctcctggccctacagcttctcacccctgctgctccccaagacctgacccggaccaatcagctgcatctctgcaccaagtgccacccccaccgtgcactgctcgcacctcacgctccccatgggctggcccggaccccagtgaggtctgcacctctcggaccagccaggacctcggaagccatgagctgggtgttcagggcttggcggaggagacgctgctccgcgggggatggagaagccccgcccctccacaactcccttaatctggatgcaattagaggaaaccagccaaaaaccccgcggcagctgttgccccgggattattcccagccagcgagaggcattagggcgataattcagtcattagacttctagccttcccaccgccagaacgtgcaaataggggataatcagccctgcacggccatcctcagcaatgctgcttatttaacccattttttaaaatgacacttaatgttattggctggcgtacgtgtgtgcgcatacttaaaagttgatgcgtggtgcagctctgctgctaatgtctgctgacagcgtcgcccgatgttgctcagggcctctgggaagaggggacacctttgatgtgggcgtgctggcacccaagaggcaacgtggtcaggctcgatgcttgccagccctggaaggtcccgccagggttggggggtcgggtgagcactcagagatctggggaggaagcgaggagcctggtgtcctcaccaggtgcagaggggaaatgcgtactgctccagaaggttctgactcaagtctcggccctgaggactcagaactcacaagtcatggatcaagtacagagggagggagggccccagcccacccctgcgggggaggaggagggtctgaaggtgggagggcagctccatgagcagccactgttcctgaccagccgaagtgccaggcagggggaggtttccatgtccaggagggagaggacctccaccctctgacctttcagttttccatagcagcccagtgtgaagctcggcgggggtgggcagggcatcaggacaagatgaagatgctggctctggaatgaggactccccttgggctaaggggtagtggctggcagaggttgcccagctcttttggaggccacagggaatagaggtggggtggtgcttccgttcctgtgaggcccgcccccctgagccccctcgtctgcttcttgtttggcagaaatagatgtggggcacagcccctagatgatgggaatctgcccaagctgtgccctctggggaatgaaatcttgctcctcgtgcagcttcccctttcccttgcggggtgggggctgggggtgccaaggctccacccttggagggggttgctgggggtgccaaggctccaccctttgctcgctgggcagagggaaggaagcacctccctgtatgctctgcaggggcccctgcaggccactttgcctcagaggaaggaggagaggtcccctgggaaaatgcgcacacacacacacacacacacacacacacacgcacatgcacacacgcacgcatgcacacacacacacacatatgtgcaggggtgcagcctaagtcagtggagccaggactggctgcgcagctgggcctgccccattcttggagtccccagggaatgagcctcaggatccacttcgtcccttgtttctaagccaggctgcacggccgttcctgggtgtgaaagcattctgtcctgtctccagtcagagggaaccgcccccaaactagaaagctaatttcccccgaaggttcatgaagccagaggcatgcccttgggggttggtcgggagaagggtgagaggcagtgctgtggaaggggcctggcccctgctgcctgcgattctccccgggtatgtggccttctgcctccttcagcctcagtttcctcacctgtaacatgagaataatgatgcctgcctgcccaggccacctcctgggagtgcattggggactctaagtgtaaaactgtcatgaggatggtttatgaagtcccagggaccacacctgccactcagggaagagaccgctgacctcagccatcagccgtgtgcatcgtgaggggcagcgagctcaggacggagagctctcccttggttcggagtcagcacacctgcactcccacacgcccacccagctgtgtgtcctccgccgagggcgagcctctctgtgactcttctgtaaaatgcaccccattctgcccactcctgccacgagacccatcctctgcgatcccgccaggcatgtgtgtgtgaatgcatgtgcaaagctctccatcagaagggtggtgtgggccctgcaggtcctacccctcggccttgaagctccctcgggctgcggactctgcctcctgggtctgagcattagaaccaggagaggggtgtccctgggcagagccaggggtgcaaacagcctgcagccatctggccttttaagtatagtgtgtcgcatttccgggtaggaaggtagcatttcaagttcaaagagaggtcaagtcatgcaaccatctttcctccagcacttttggggtaaggaggacagtttttgttatggtttaggggaaattttcatgaaatttccaccattaccaatagattactgatgtccatggcaagtgatctgttcttggtattttgttttgttttgttttggtttttaaatgtaatcacccattggtcaggcccaggactggtcaccatgagctctgctagccacggccccaacgatgcttccggctctcatggattccacagcaaataaaactgtactgacaacagatgcacgctgtacagtgcctctggaaggtgcggtgggacttgctgggtcaaagcacggcaggctctgtgctgggcaaacagggccccgtggcagcccaagggcagcctgcagacgccagtgtgcccggcttctcccatgttctgagatgggggaggggaaggtgtaaaagagagctggatgggggctgtggggactgagggtcctgggaggctggccaggggctcagcaagcgcccactttgggaggccttgccctctgggctgtggttggacagcactaggcctgcaggctgggctgccaggaggaagagcagctccggacctcaggcccccccagcaggcggcgatggagggtgatgggagaattgacgagtgctcgcggggtctcactcgggaaagggccggttaactctgagcaactgggagcctcgctcccaccccagtgcctggaaacacaaacagtattttattgagccttggctgccggggctctggtttcaggaaaagcctcagtcctgcatttgtgaatttttaaggaggcaaacaaggtgaatttgaccttcctaggagtgggagttagggaaaattcaggctgccctaccaagcccttggaaccgtgcagcaggggtcaggggagggatgggcaaaggcggtttggcccatggagcaggtctcctggtcctcccggagcacggggggcggggagctccagctcttcatcaagcgccctttggggtttccaactgttttctgttgttctctgtgtgtcttttccccttttgcctgggggcgggggctggaggggaacatacctcttatctacatcactcgggtctcatgtctgaagggcctgtctcacctgccacctacctggccttggcctcgacatctgagcgcctcatcacctcctctccacatgcccaggggtgcccctcccaaggctggctgggcaggtcccacggactaggccccaggaggagcagtgggcttcccccaggaaagagcagagccagcactgcctgcctagggagggcacccactaccaggcatggctggtggctccgtttaaagaaatctttgtccatgtgggagtgggaggtgcttccccatcctgcctggaagccacgtcctggctcttaccgtggactctgcaacagccgtggtggccacatgaagatggaggaacctggtggctcaggggcccctgatgtcaccgcctccaaggcaacgggactgggcagggcagctcctcaggaaggatgatcccacctgcacgggtcagccctgcagggggacaaggcccaccacaaccccacctcaggccaccaactggacctgtcctgccaagaaggtcccttccaatttgtccggcagctggttccctggatacagcccagacgcagcatcatcctcatgttcacctctgctgtgccctacttcccccgtaaatgacaactgtgtagtcacccacgccgggcaagagaacataggtgccacctggcgggccacacttttcaggggccgtgcctcgggcaggcccggctctctgttgtcccgcagccctcagggctggcggtggctgctcagtgcctagggagtgcccttgccacacagctgggcagcgagcatgactcagcgtttacactcaaccagccgcacaggctccagaggggaagttctctggggtccttctatgagagagcatcctgtctgcagccctgttctggctccttccacatcattcatgcattcatcccacgaggactatggtaccgtgggctcgctctagggaagcaaggcaggagcgcactggggctacttggattcccggggcagacacatatgtaccctgcacaccctcaaatgagcaaagccaccccactggcccctgggtgaggccatgtggacccccacacctttggggccggctgggcaaaccttgaacccccaatttctgcgtggcctttggctgccctccttctccaaggcgtgactcttactccagagactcaggcgagcacgtgtcccttaccttattttctctcaatcaaactgaaacccattgtgatcccccatagtccagtgcggtctctgttattattacgggtgtctcccttcctccccgtgcccaggacaggccatgagccagagatacaaggggccccaggcaagatgcagggctctctgctcctggctctttatcgtcgtcgggacaccctttgtccaaactcaaggaatcccgggaggtctggctttgccgctttggctgggactcaggtacctgggcatacctgcatctgtgccccctcttcgtcccagtgagacggaccctcagtatcccccccaacatagaacaggaaggtctcaagccagccccctcctccagttcaatcaccctccctcacatccacccagagaagtccagacctgtggccacttccatgccctctccagaccaggagacacctgctgctgacctcgtggaaaacttagattttgacattctgatgcttcggaagtggtggctcctcctccttcacccctccgccacctgtgggcctcctctctgcatctcaagagaacaaccagatctttgggctcctggggtgtgtgccatgcaatttagacgaagtgctttgaaaatatgccattcagtctctgactaggaaaataagtctgacctgataggtccgatgtcatcagctcttcaacatgagacaaaagaggggattttatgttttgagtcattagaatgatataataattttctgaattgacatctggatgttgaaattaggatggtgcaaaaggggtccagggcctcaggctgggcgcagcagccagctcccaatgacgcagaagctgcttcaaaaccccctcaacaaagaggggcacatgcaagtcaccaaagtgggaagccttcaccaaggccacacccaaagtctactgattgtctgtccaaagttcgttgattcctggccatgaacaagcacaatagaaaaagacacagggtcctagtggctacaagtcaatgtgaattggcacatggtctagcagttttaaaatctgacagtagagtatggcaatgggcaagggccaagaagtcctgagatgggaggtcagcgctctaactgggctcagtggaggtctgtgaccagtgtctggacactagctacaggggaccgggcagaggattctgggcagaaggaaaatgtctaaaagtactttgggagggtaaaggacaggggccttatttaaaataaagactgaaggataataagtgtca

SEQ ID NO: 189488 - DNA, 4244 bp, Homo sapiens
  Payload ID: 17417
  Gene Symbol: TBC1D16
  Gene Name: TBC1 domain family, member 16
  Uniprot ID: Q8TBP0
  ENST ID: ENST00000340848
  CDS Start-End: 76-1293
ggggttggagagagtggggggcggcggcacagtgggccggggaggagagagccgcagagggaaaccgattttaagatgaaggtcgcccccgataagacatgcatgcagttctccatccgccgccccaagctgccgtcctccgagacgcaccccgaggagagcatgtacaagaggctcggcgtctccgcctggctcaaccacctgaatgagctgggccaggtggaggaggagtacaagctgcggaaggccattttctttggcggtattgatgtgtcaatccgcggggaggtctggcccttcctgctgcgctattacagccacgagtccacgtcggaggagcgggaggcgctgcggctgcagaagcgaaaggagtactctgagatccagcagaaaaggctctccatgactcccgaggagcacagagcgttctggcgtaatgtgcagttcactgtggacaaagacgtggtccggacagatcggaacaaccagttcttccggggggaagacaatcccaatgtggagagcatgaggaggatcctgctgaactacgccgtgtacaaccctgccgtcggctattcccaagggatgtcggacctggtggcgcccatcttggccgaggtcctggatgagtcagacaccttctggtgctttgtgggtttgatgcagaacacgatcttcgtcagctcaccccgggacgaggacatggagaaacaactgctgtacctgcgcgagctgctgcggctgacgcacgtgcgcttctaccagcacctggtctcgctgggcgaggacggcctgcagatgctcttctgccaccgctggctccttctgtgcttcaagcgggagttccccgaggccgaagcgctgcggatctgggaggcctgctgggcccactaccagacggactacttccaccttttcatctgcgtggccatcgtggccatctacggggatgacgtcatcgagcagcagctggccacggaccagatgctcctgcacttcggaaacctggccatgcacatgaacggggagctcgttctccggaaggcgaggagtttgctgtaccagttccgcctcctgccccggatcccctgcagcctgcacgatctgtgtaagctgtgcgggtcaggcatgtgggacagcggctccatgcccgcggtggagtgcaccggccaccatcccggctcggagagctgtccctacgggggcacggtggagatgccttcccccaagtccctgagggaaggcaagaagggcccaaagacgccgcaggacggcttcggcttccgcagataggtcgggcccccgacaccggacaggggttgaggggacctcctcagaggccctgggcacgggagggggtggggctgggcgtgaaggggacaggggacggtagaaacctaaggaaaatgcttttgggcaacatgagaggaaccttttcatattaatgacaaaattagagtctggaagtgacagaagtcagatctacagccacccagaggaaagtcagctcctgaaacgctgcagtggaacgcgcagccaccgcacctgagacgcaggctggctgggctctcctgctggctgccctggaggatttcaacatgtcccaggatttgctccaccctcgagggcagccagacagcgtcgccaggcaatgaggaaagcagagacaggagaggaaggcctcactcacccactgcgtcgagggctgcagaacacagcggggtcctgtccaggcccagggacatctttgcaagccagacacacttcctcttgagacctcgttctctcggagtgagccaaacacacttcccaaaacgtccccagccacagctgggatgccgatggaaaggcatctgccataaaagaaaagcaaaagataaaaagcccaaccgatgtggggatagagaggcggaagagcagtcaggcttgaggagctggcgcttgtaatgtttatccgtttaaacatttcgtcctcctggtacacgaagggaactgtctgcccaggagcctgagcctcaggctgttggagaagcatctgatgcctttttctttgctgggggtcttctacgtgaggttccttggcgttgtttaaggtcaactccaccaaatacagcaaccagctggggcttgaatgggtcgatgtgtgcgtgtgtccctgcgtgcatgcatgcatgcacacgtgcgtgcgtgtttgtgtttgcaagatcctctgacaatgatctgctttgtcccagggacgtggtagtgtattagctgaccaaccaagacaaggacacctggaaatagttagactcttccacttcccttcaggacctgtgaactcagatatgtaagtcagcttctcaggtggtcggacgtgagagcgaccacagtgaaggagccagcactcagggctctctgccttctatgtgggaatgaggtcttcccaacagactctccctcttccaaaagattgtgtatcagttgctccttctgggatttagagatggacagaaaagggtgtgcgatctatgctgtgagaactcccagccagcttagaagtgtcgagccatttgcacagaaagccactccttgagcgaggagaccaaatccctcctgaaatcctccatcgcgtccttctggggagaaaaacccttgatgtgctgagaaccatcatggggaccaggatagaaggcttcttcccactcaaagcttttctccctggagggtgggcactgctgggccatgccacttcaaagcagtgttcctcagcaggaaagcggaggtcaccacttaccggcctcctccaccttctcggcttctcttttctccatgaacccaggtcgtccagcaggtacttccaagttcccaggtctgtctgcctaagagccttttgaggagaccgtcctggagccccatcagtgcccagatcctggggtaccgaccattgctgtctagcagtgggggatcctgtggtgggaatggggtgggcttctcatccatgttgcttctgggaagagagggttgcctttctgggctagggaggtggctggagcttctgccctgaccctccgctagaaaccagttatatccattgccacagcaatactgtgtaacaaatccgccaacactcggtggcctgcaacagtcagcactgatctagggcaggagtcagcagtctgggcagggtgattcttctggtctaggctgggcttgtttgtttagggccagtgggttgttaagtcccaggggatgctcatggtgcagaggtcggacctggccctgctctgtggtctcttgcatccctcctgcaggccagccatggcacagccaaaggcacggagggagagacagcaagtgcctttccaagccttggtggacaccacacctgcagctctccccttggccacagcaagtcacgtggctgggctcagcattaaggggtgggggacaggcctgccactttattgtccgctctgcacagtcgggtggcagtaggctgagaatttggagggctaaacaactgggactctggagagtctgtgtcctaataatgcctgctttggagcactccttccccacccgcctgctccaggggaatagcgtccctggtcctagcatttcactagatacctcgtgcctttgaaccgctgtgtttgggagggaggaagaggatagacaggtccagggctcccctcacttgggaaggtcctagtagaaggcattccttctgagtctcctggccctacagcttctcacccctgctgctccccaagacctgacccggaccaatcagctgcatctctgcaccaagtgccacccccaccgtgcactgctcgcacctcacgctccccatgggctggcccggaccccagtgaggtctgcacctctcggaccagccaggacctcggaagccatgagctgggtgttcagggcttggcggaggagacgctgctccgcgggggatggagaagccccgcccctccacaactcccttaatctggatgcaattagaggaaaccagccaaaaaccccgcggcagctgttgccccgggattattcccagccagcgagaggcattagggcgataattcagtcattagacttctagccttcccaccgccagaacgtgcaaataggggataatcagccctgcacggccatcctcagcaatgctgcttatttaacccattttttaaaatgacacttaatgttattggctggcgtacgtgtgtgcgcatacttaaaagttgatgcgtggtgca

SEQ ID NO: 189489 - DNA, 683 bp, Homo sapiens
  Payload ID: 17417
  Gene Symbol: TBC1D16
  Gene Name: TBC1 domain family, member 16
  ENST ID: ENST00000574427
  CDS Start-End: 119-683
gttggagagagtggggggcggcggcacagtgggccggggaggagagagccgcagagggaaaccgattttaagatgaagttttcctcccgtccagcaggtcgcccccgataagacatgcatgcagttctccatccgccgccccaagctgccgtcctccgagacgcaccccgaggagagcatgtacaagaggctcggcgtctccgcctggctcaaccacctgaatgagctgggccaggtggaggaggagtacaagctgcggaaggccattttctttggcggtattgatgtgtcaatccgcggggaggtctggcccttcctgctgcgctattacagccacgagtccacgtcggaggagcgggaggcgctgcggctgcagaagcgaaaggagtactctgagatccagcagaaaaggctctccatgactcccgaggagcacagagcgttctggcgtaatgtgcagttcactgtggacaaagacgtggtccggacagatcggaacaaccagttcttccggggggaagacaatcccaatgtggagagcatgaggaggatcctgctgaactacgccgtgtacaaccctgccgtcggctattcccaagggatgtcggacctggtggcgcccatcttggccgaggtcctggatgagtcagacaccttctggtgctttgtgggtttgatgcaga

SEQ ID NO: 189490 - DNA, 961 bp, Homo sapiens
  Payload ID: 17417
  Gene Symbol: TBC1D16
  Gene Name: TBC1 domain family, member 16
  ENST ID: ENST00000570373
  CDS Start-End: 74-913
ggttggagagagtggggggcggcggcacagtgggccggggaggagagagccgcagagggaaaccgattttaagatgaagcaggtcgcccccgataagacatgcatgcagttctccatccgccgccccaagctgccgtcctccgagacgcaccccgaggagagcatgtacaagaggctcggcgtctccgcctggctcaaccacctgaatgagctgggccaggtggaggaggagtacaagctgcggaaggccattttctttggcggtattgatgtgtcaatccgcggggaggtctggcccttcctgctgcgctattacagccacgagtccacgtcggaggagcgggaggcgctgcggctgcagaagcgaaaggagtactctgagatccagcagaaaaggctctccatgactcccgaggagcacagagcgttctggcgtaatgtgcagttcactgtggacaaagacgtggtccggacagatcggaacaaccagttcttccggggggaagacaatcccaatgtggagagcatgaggaggatcctgctgaactacgccgtgtacaaccctgccgtcggctattcccaagggatgtcggacctggtggcgcccatcttggccgaggtcctggatgagtcagacaccttctggtgctttgtgggtttgatgcagaacacgatcttcgtcagctcaccccgggacgaggacatggagaaacaactgctgtacctgcgcgagctgctgcggctgacgcacgtgcgcttctaccagcacctggtctcgctgggcgaggacggcctgcagatgctcttctgccaccgctggctccttctgtgcttcaagcgggagttccccgaggccgaagcgctgcggatctgggaggcctgctgggcccactaccagggggctgatgtctgatgaaagcgagtctgaagccaccgagtgccggtaccacacgccgccttt

SEQ ID NO: 189491 - DNA, 1141 bp, Homo sapiens
  Payload ID: 17417
  Gene Symbol: TBC1D16
  Gene Name: TBC1 domain family, member 16
  Uniprot ID: Q8TBP0
  ENST ID: ENST00000572862
  CDS Start-End: 68-904
agagagtggggggcggcggcacagtgggccggggaggagagagccgcagagggaaaccgattttaagatgaaggtcgcccccgataagacatgcatgcagttctccatccgccgccccaagctgccgtcctccgagacgcaccccgaggagagcatgtacaagaggctcggcgtctccgcctggctcaaccacctgaatgagctgggccaggtggaggaggagtacaagctgcggaaggccattttctttggcggtattgatgtgtcaatccgcggggaggtctggcccttcctgctgcgctattacagccacgagtccacgtcggaggagcgggaggcgctgcggctgcagaagcgaaaggagtactctgagatccagcagaaaaggctctccatgactcccgaggagcacagagcgttctggcgtaatgtgcagttcactgtggacaaagacgtggtccggacagatcggaacaaccagttcttccggggggaagacaatcccaatgtggagagcatgaggaggatcctgctgaactacgccgtgtacaaccctgccgtcggctattcccaagggatgtcggacctggtggcgcccatcttggccgaggtcctggatgagtcagacaccttctggtgctttgtgggtttgatgcagaacacgatcttcgtcagctcaccccgggacgaggacatggagaaacaactgctgtacctgcgcgagctgctgcggctgacgcacgtgcgcttctaccagcacctggtctcgctgggcgaggacggcctgcagatgctcttctgccaccgctggctccttctgtgcttcaagcgggagttccccgaggccgaagcgctgcggatctgggaggcctgctgggcccactaccagggggctgatgtctgatgaaagcgagtctgaagccaccgagtgccggtaccacacgccgcctttgcatgcggtcatcggctcgcccctggcccgggtctaggtttccctcctggctcagcctgctggacgtggacgtgcagggtggacgatctgcattaacgaagggaagcacggcatggacggtctgagaggcttcattcccaccactcccgaattaaaaaaaatcgtgcctcattgcacgttttcccagtg

SEQ ID NO: 189492 - DNA, 567 bp, Homo sapiens
  Payload ID: 17417
  Gene Symbol: TBC1D16
  Gene Name: TBC1 domain family, member 16
  ENST ID: ENST00000571872
  CDS Start-End: 176-567
taacccagcacctgatgaaatcttccctgaaagttgcagccccccgtccagctccgacgccggcctgcggttcccggacagcaacggcctcctgcagaccccacgctgggacgagccgcagcgggtgtgcgccctggagcagatttgcggcgtgttccgcgtggacctgggccacatgcgctccctccgccttttcttcagtcagggctgcccagccgcagacatcaccaatgagaggcccgggcttagaagaagccggcgtgtccagaagctgggggggttcccagacccagagccacattccagcctttcatctaagggcagccggggctgggctgacagcactgacggatgtttactgagtttccctggagggttctcccagagttccacccacacgcaacgaaggagcgacgaggcctgcaccagcggccagctggtcgttgccagccgagagagccagtacaaggttttccacttccaccacggcggcctggacaagctgtctgacgtgttccagcagtggaaatactgcaccgagatgcagctcaaagaccagcaggtcgc

SEQ ID NO: 189493 - DNA, 685 bp, Homo sapiens
  Payload ID: 17417
  Gene Symbol: TBC1D16
  Gene Name: TBC1 domain family, member 16
  ENST ID: ENST00000573782
  CDS Start-End: 116-685
ggagagagtggggggcggcggcacagtgggccggggaggagagagccgcagagggaaaccgattttaagatgaagttttcctcccgtccagcaggtcgcccccgataagacatgcatgcagttctccatccgccgccccaagctgccgtcctccgagacgcaccccgaggagagcatgtacaagaggctcggcgtctccgcctggctcaaccacctgaatgagctgggccaggtggaggaggagtacaagctgcggaaggtctggcccttcctgctgcgctattacagccacgagtccacgtcggaggagcgggaggcgctgcggctgcagaagcgaaaggagtactctgagatccagcagaaaaggctctccatgactcccgaggagcacagagcgttctggcgtaatgtgcagttcactgtggacaaagacgtggtccggacagatcggaacaaccagttcttccggggggaagacaatcccaatgtggagagcatgaggaggatcctgctgaactacgccgtgtacaaccctgccgtcggctattcccaagggatgtcggacctggtggcgcccatcttggccgaggtcctggatgagtcagacaccttctggtgctttgtgggtttgatgcagaacacgatcttcgtcagctcaccccgggacgaggacatggagaaacaa

SEQ ID NO: 189494 - DNA, 6342 bp, Homo sapiens
  Payload ID: 17417
  Gene Symbol: TBC1D16
  Gene Name: TBC1 domain family, member 16
  Uniprot ID: Q8TBP0
  ENST ID: ENST00000576768
  CDS Start-End: 97-1275
attcattccgtttttgcggctggggttggagagagtggggggcggcggcacagtgggccggggaggagagagccgcagagggaaaccgattttaagatgaagcaggtcgcccccgataagacatgcatgcagttctccatccgccgccccaagctgccgtcctccgagacgcaccccgaggagagcatgtacaagaggctcggcgtctccgcctggctcaaccacctgaatgagctgggccaggtggaggaggagtacaagctgcggaaggtctggcccttcctgctgcgctattacagccacgagtccacgtcggaggagcgggaggcgctgcggctgcagaagcgaaaggagtactctgagatccagcagaaaaggctctccatgactcccgaggagcacagagcgttctggcgtaatgtgcagttcactgtggacaaagacgtggtccggacagatcggaacaaccagttcttccggggggaagacaatcccaatgtggagagcatgaggaggatcctgctgaactacgccgtgtacaaccctgccgtcggctattcccaagggatgtcggacctggtggcgcccatcttggccgaggtcctggatgagtcagacaccttctggtgctttgtgggtttgatgcagaacacgatcttcgtcagctcaccccgggacgaggacatggagaaacaactgctgtacctgcgcgagctgctgcggctgacgcacgtgcgcttctaccagcacctggtctcgctgggcgaggacggcctgcagatgctcttctgccaccgctggctccttctgtgcttcaagcgggagttccccgaggccgaagcgctgcggatctgggaggcctgctgggcccactaccagacggactacttccaccttttcatctgcgtggccatcgtggccatctacggggatgacgtcatcgagcagcagctggccacggaccagatgctcctgcacttcggaaacctggccatgcacatgaacggggagctcgttctccggaaggcgaggagtttgctgtaccagttccgcctcctgccccggatcccctgcagcctgcacgatctgtgtaagctgtgcgggtcaggcatgtgggacagcggctccatgcccgcggtggagtgcaccggccaccatcccggctcggagagctgtccctacgggggcacggtggagatgccttcccccaagtccctgagggaaggcaagaagggcccaaagacgccgcaggacggcttcggcttccgcagataggtcgggcccccgacaccggacaggggttgaggggacctcctcagaggccctgggcacgggagggggtggggctgggcgtgaaggggacaggggacggtagaaacctaaggaaaatgcttttgggcaacatgagaggaaccttttcatattaatgacaaaattagagtctggaagtgacagaagtcagatctacagccacccagaggaaagtcagctcctgaaacgctgcagtggaacgcgcagccaccgcacctgagacgcaggctggctgggctctcctgctggctgccctggaggatttcaacatgtcccaggatttgctccaccctcgagggcagccagacagcgtcgccaggcaatgaggaaagcagagacaggagaggaaggcctcactcacccactgcgtcgagggctgcagaacacagcggggtcctgtccaggcccagggacatctttgcaagccagacacacttcctcttgagacctcgttctctcggagtgagccaaacacacttcccaaaacgtccccagccacagctgggatgccgatggaaaggcatctgccataaaagaaaagcaaaagataaaaagcccaaccgatgtggggatagagaggcggaagagcagtcaggcttgaggagctggcgcttgtaatgtttatccgtttaaacatttcgtcctcctggtacacgaagggaactgtctgcccaggagcctgagcctcaggctgttggagaagcatctgatgcctttttctttgctgggggtcttctacgtgaggttccttggcgttgtttaaggtcaactccaccaaatacagcaaccagctggggcttgaatgggtcgatgtgtgcgtgtgtccctgcgtgcatgcatgcatgcacacgtgcgtgcgtgtttgtgtttgcaagatcctctgacaatgatctgctttgtcccagggacgtggtagtgtattagctgaccaaccaagacaaggacacctggaaatagttagactcttccacttcccttcaggacctgtgaactcagatatgtaagtcagcttctcaggtggtcggacgtgagagcgaccacagtgaaggagccagcactcagggctctctgccttctatgtgggaatgaggtcttcccaacagactctccctcttccaaaagattgtgtatcagttgctccttctgggatttagagatggacagaaaagggtgtgcgatctatgctgtgagaactcccagccagcttagaagtgtcgagccatttgcacagaaagccactccttgagcgaggagaccaaatccctcctgaaatcctccatcgcgtccttctggggagaaaaacccttgatgtgctgagaaccatcatggggaccaggatagaaggcttcttcccactcaaagcttttctccctggagggtgggcactgctgggccatgccacttcaaagcagtgttcctcagcaggaaagcggaggtcaccacttaccggcctcctccaccttctcggcttctcttttctccatgaacccaggtcgtccagcaggtacttccaagttcccaggtctgtctgcctaagagccttttgaggagaccgtcctggagccccatcagtgcccagatcctggggtaccgaccattgctgtctagcagtgggggatcctgtggtgggaatggggtgggcttctcatccatgttgcttctgggaagagagggttgcctttctgggctagggaggtggctggagcttctgccctgaccctccgctagaaaccagttatatccattgccacagcaatactgtgtaacaaatccgccaacactcggtggcctgcaacagtcagcactgatctagggcaggagtcagcagtctgggcagggtgattcttctggtctaggctgggcttgtttgtttagggccagtgggttgttaagtcccaggggatgctcatggtgcagaggtcggacctggccctgctctgtggtctcttgcatccctcctgcaggccagccatggcacagccaaaggcacggagggagagacagcaagtgcctttccaagccttggtggacaccacacctgcagctctccccttggccacagcaagtcacgtggctgggctcagcattaaggggtgggggacaggcctgccactttattgtccgctctgcacagtcgggtggcagtaggctgagaatttggagggctaaacaactgggactctggagagtctgtgtcctaataatgcctgctttggagcactccttccccacccgcctgctccaggggaatagcgtccctggtcctagcatttcactagatacctcgtgcctttgaaccgctgtgtttgggagggaggaagaggatagacaggtccagggctcccctcacttgggaaggtcctagtagaaggcattccttctgagtctcctggccctacagcttctcacccctgctgctccccaagacctgacccggaccaatcagctgcatctctgcaccaagtgccacccccaccgtgcactgctcgcacctcacgctccccatgggctggcccggaccccagtgaggtctgcacctctcggaccagccaggacctcggaagccatgagctgggtgttcagggcttggcggaggagacgctgctccgcgggggatggagaagccccgcccctccacaactcccttaatctggatgcaattagaggaaaccagccaaaaaccccgcggcagctgttgccccgggattattcccagccagcgagaggcattagggcgataattcagtcattagacttctagccttcccaccgccagaacgtgcaaataggggataatcagccctgcacggccatcctcagcaatgctgcttatttaacccattttttaaaatgacacttaatgttattggctggcgtacgtgtgtgcgcatacttaaaagttgatgcgtggtgcagctctgctgctaatgtctgctgacagcgtcgcccgatgttgctcagggcctctgggaagaggggacacctttgatgtgggcgtgctggcacccaagaggcaacgtggtcaggctcgatgcttgccagccctggaaggtcccgccagggttggggggtcgggtgagcactcagagatctggggaggaagcgaggagcctggtgtcctcaccaggtgcagaggggaaatgcgtactgctccagaaggttctgactcaagtctcggccctgaggactcagaactcacaagtcatggatcaagtacagagggagggagggccccagcccacccctgcgggggaggaggagggtctgaaggtgggagggcagctccatgagcagccactgttcctgaccagccgaagtgccaggcagggggaggtttccatgtccaggagggagaggacctccaccctctgacctttcagttttccatagcagcccagtgtgaagctcggcgggggtgggcagggcatcaggacaagatgaagatgctggctctggaatgaggactccccttgggctaaggggtagtggctggcagaggttgcccagctcttttggaggccacagggaatagaggtggggtggtgcttccgttcctgtgaggcccgcccccctgagccccctcgtctgcttcttgtttggcagaaatagatgtggggcacagcccctagatgatgggaatctgcccaagctgtgccctctggggaatgaaatcttgctcctcgtgcagcttcccctttcccttgcggggtgggggctgggggtgccaaggctccacccttggagggggttgctgggggtgccaaggctccaccctttgctcgctgggcagagggaaggaagcacctccctgtatgctctgcaggggcccctgcaggccactttgcctcagaggaaggaggagaggtcccctgggaaaatgcgcacacacacacacacacacacacacacacacgcacatgcacacacgcacgcatgcacacacacacacacatatgtgcaggggtgcagcctaagtcagtggagccaggactggctgcgcagctgggcctgccccattcttggagtccccagggaatgagcctcaggatccacttcgtcccttgtttctaagccaggctgcacggccgttcctgggtgtgaaagcattctgtcctgtctccagtcagagggaaccgcccccaaactagaaagctaatttcccccgaaggttcatgaagccagaggcatgcccttgggggttggtcgggagaagggtgagaggcagtgctgtggaaggggcctggcccctgctgcctgcgattctccccgggtatgtggccttctgcctccttcagcctcagtttcctcacctgtaacatgagaataatgatgcctgcctgcccaggccacctcctgggagtgcattggggactctaagtgtaaaactgtcatgaggatggtttatgaagtcccagggaccacacctgccactcagggaagagaccgctgacctcagccatcagccgtgtgcatcgtgaggggcagcgagctcaggacggagagctctcccttggttcggagtcagcacacctgcactcccacacgcccacccagctgtgtgtcctccgccgagggcgagcctctctgtgactcttctgtaaaatgcaccccattctgcccactcctgccacgagacccatcctctgcgatcccgccaggcatgtgtgtgtgaatgcatgtgcaaagctctccatcagaagggtggtgtgggccctgcaggtcctacccctcggccttgaagctccctcgggctgcggactctgcctcctgggtctgagcattagaaccaggagaggggtgtccctgggcagagccaggggtgcaaacagcctgcagccatctggccttttaagtatagtgtgtcgcatttccgggtaggaaggtagcatttcaagttcaaagagaggtcaagtcatgcaaccatctttcctccagcacttttggggtaaggaggacagtttttgttatggtttaggggaaattttcatgaaatttccaccattaccaatagattactgatgtccatggcaa

SEQ ID NO: 189495 - DNA, 770 bp, Homo sapiens
  Payload ID: 17417
  Gene Symbol: TBC1D16
  Gene Name: TBC1 domain family, member 16
  ENST ID: ENST00000574241
  CDS Start-End: 1-770
agagttccacccacacgcaacgaaggagcgacgaggcctgcaccagcggccagctggtcgttgccagccgagagagccagtacaaggttttccacttccaccacggcggcctggacaagctgtctgacgtgttccagcagtggaaatactgcaccgagatgcagctcaaagaccaggtcgcccccgataagacatgcatgcagttctccatccgccgccccaagctgccgtcctccgagacgcaccccgaggagagcatgtacaagaggctcggcgtctccgcctggctcaaccacctgaatgagctgggccaggtggaggaggagtacaagctgcggaaggtctggcccttcctgctgcgctattacagccacgagtccacgtcggaggagcgggaggcgctgcggctgcagaagcgaaaggagtactctgagatccagcagaaaaggctctccatgactcccgaggagcacagagcgttctggcgtaatgtgcagttcactgtggacaaagacgtggtccggacagatcggaacaaccagttcttccggggggaagacaatcccaatgtggagagcatgaggaggatcctgctgaactacgccgtgtacaaccctgccgtcggctattcccaagggatgtcggacctggtggcgcccatcttggccgaggtcctggatgagtcagacaccttctggtgctttgtgggtttgatgcagaacacgatcttcgtcagctcaccccgggacgaggacatggagaaacaactg

SEQ ID NO: 189496 - DNA, 2366 bp, Homo sapiens
  Payload ID: 17418
  Gene Symbol: TBC1D17
  Gene Name: TBC1 domain family, member 17
  Uniprot ID: Q9HA65
  ENST ID: ENST00000221543
  CDS Start-End: 300-2246
aggtggtgcagctctcagaccctcccacttgtttacttcgtggcgagagggcgaacactgcgcctgcgcactctccgtagccggatccaccttcagcgtctgcgccacgtgactccgatccaccctcgaggttccagtggaataacccccttctgaaaaatggtttcacccgctccttctctagaacgggtcgggccgctaccactgtccggcccggaggggaactgttttctccggaagtgacaacacgctgactaggaaaaggaggaggcggggcagtggggccttcggcggcgactatggaaggagccggctacagggtggtgtttgagaagggcggagtgtacctgcacaccagcgctaagaagtatcaggaccgagactctctcatcgctggtgtcatccgtgtcgtggaaaaggacaatgacgtcctcctgcactgggctcctgtagaggaggctggagattccacccaaatcctcttctccaagaaggactccagtgggggtgactcatgtgcttctgaggaggaaccaacctttgaccccggctatgaacctgactgggctgtcatcagcactgtgcggccacagctctgccactcagagcccacgagaggtgcagagcccagctgcccccagggctcctgggccttctcagtgagtctgggggagctaaagtccatccgccgctccaagccaggcctcagctgggcctacctggttctggtgacccaggctggaggttccctgcccgcactgcacttccaccgcgggggcacccgcgccctgctccgcgtcctcagccgctacctgctgttggccagctccccgcaggactcccgcctctaccttgtcttcccccacgactcctctgctctctccaactccttccaccacctgcagctctttgaccaggacagctccaatgtggtgtcacgcttcctccaggatccctactccaccaccttcagcagcttctcccgagtgaccaacttcttccggggtgccctgcagccacagcctgagggagccgcctccgaccttcccccgccacccgacgatgagcccgagcctggattcgaggtcatttcctgtgtggagctggggcctcggccaaccgtggagcggggccctccagttacagaggaggagtgggcacgccacgtgggccctgaaggtcgcctgcagcaggtccctgagctgaagaaccggatcttctcggggggtctgagccccagcctgcggcgcgaggcctggaagttcctcctagggtacctcagctgggaaggcacagctgaggagcacaaggcccacatacgcaagaaaacggatgagtatttccgcatgaagctgcagtggaaatctgtgagccctgagcaggagcggagaaactcacttctgcatggataccgcagcctcatcgaaagggatgtgagccgcactgacaggaccaacaagttctacgagggtcccgagaacccggggctgggcctgctgaacgatatcctcctcacctactgcatgtatcacttcgacctcggctacgtccagggcatgagtgatcttctctccccgatcctctacgtcattcagaacgaggtggatgctttctggtgtttctgtggcttcatggagctcgtgcaagggaactttgaagagagccaggagaccatgaagcggcaactcgggcgactgctgctgctcctgagggtgctggaccccctgctctgcgacttcctggattcccaggactccggctctctctgcttctgtttccggtggctgctcatctggttcaagagggaattccccttcccggatgtccttcggctgtgggaggtgctgtggacagggctccctggccccaatctgcacctgctggtggcctgcgccatcctggacatggagagggacaccctcatgctgtccggcttcggctccaatgagatcctcaagcacatcaacgagctgactatgaagctgagcgtggaggacgtgctgacccgcgccgaggccctgcaccgccagctaaccgcctgccccgagctgccccacaacgtgcaggagatcctggggctggccccgcccgcagagccccacagcccctcgcccaccgcctccccgctgcctctgtcgcccacccgggccccgcccaccccgccgccctccacggacacagccccgcagcccgacagcagcctggagatcctgcccgaggaggaggacgagggcgccgactcctaaccccgccaggcagcctcgttctgcacaggcactttagcccgagccaggcacacctgcgagggggcaggtgtgctccgccgccctgctgataagctggcttcattaaactgacacttctca

SEQ ID NO: 189497 - DNA, 2025 bp, Homo sapiens
  Payload ID: 17418
  Gene Symbol: TBC1D17
  Gene Name: TBC1 domain family, member 17
  Uniprot ID: Q9HA65
  ENST ID: ENST00000535102
  CDS Start-End: 59-1906
gacaacacgctgactaggaaaaggaggaggcggggcagtggggccttcggcggcgactatggaaggagccggctacagggacaatgacgtcctcctgcactgggctcctgtagaggaggctggagattccacccaaatcctcttctccaagaaggactccagtgggggtgactcatgtgcttctgaggaggaaccaacctttgaccccggctatgaacctgactgggctgtcatcagcactgtgcggccacagctctgccactcagagcccacgagaggtgcagagcccagctgcccccagggctcctgggccttctcagtgagtctgggggagctaaagtccatccgccgctccaagccaggcctcagctgggcctacctggttctggtgacccaggctggaggttccctgcccgcactgcacttccaccgcgggggcacccgcgccctgctccgcgtcctcagccgctacctgctgttggccagctccccgcaggactcccgcctctaccttgtcttcccccacgactcctctgctctctccaactccttccaccacctgcagctctttgaccaggacagctccaatgtggtgtcacgcttcctccaggatccctactccaccaccttcagcagcttctcccgagtgaccaacttcttccggggtgccctgcagccacagcctgagggagccgcctccgaccttcccccgccacccgacgatgagcccgagcctggattcgaggtcatttcctgtgtggagctggggcctcggccaaccgtggagcggggccctccagttacagaggaggagtgggcacgccacgtgggccctgaaggtcgcctgcagcaggtccctgagctgaagaaccggatcttctcggggggtctgagccccagcctgcggcgcgaggcctggaagttcctcctagggtacctcagctgggaaggcacagctgaggagcacaaggcccacatacgcaagaaaacggatgagtatttccgcatgaagctgcagtggaaatctgtgagccctgagcaggagcggagaaactcacttctgcatggataccgcagcctcatcgaaagggatgtgagccgcactgacaggaccaacaagttctacgagggtcccgagaacccggggctgggcctgctgaacgatatcctcctcacctactgcatgtatcacttcgacctcggctacgtccagggcatgagtgatcttctctccccgatcctctacgtcattcagaacgaggtggatgctttctggtgtttctgtggcttcatggagctcgtgcaagggaactttgaagagagccaggagaccatgaagcggcaactcgggcgactgctgctgctcctgagggtgctggaccccctgctctgcgacttcctggattcccaggactccggctctctctgcttctgtttccggtggctgctcatctggttcaagagggaattccccttcccggatgtccttcggctgtgggaggtgctgtggacagggctccctggccccaatctgcacctgctggtggcctgcgccatcctggacatggagagggacaccctcatgctgtccggcttcggctccaatgagatcctcaagcacatcaacgagctgactatgaagctgagcgtggaggacgtgctgacccgcgccgaggccctgcaccgccagctaaccgcctgccccgagctgccccacaacgtgcaggagatcctggggctggccccgcccgcagagccccacagcccctcgcccaccgcctccccgctgcctctgtcgcccacccgggccccgcccaccccgccgccctccacggacacagccccgcagcccgacagcagcctggagatcctgcccgaggaggaggacgagggcgccgactcctaaccccgccaggcagcctcgttctgcacaggcactttagcccgagccaggcacacctgcgagggggcaggtgtgctccgccgccctgctgataagctggcttcattaaactgacacttctc

SEQ ID NO: 189498 - DNA, 1161 bp, Homo sapiens
  Payload ID: 17418
  Gene Symbol: TBC1D17
  Gene Name: TBC1 domain family, member 17
  ENST ID: ENST00000594996
  CDS Start-End: 23-250
agtggggccttcggcggcgactatggaaggagccggctacagggtggtgtttgagaagggcggagtgtacctgcacaccagcgctaagaagtatcaggaccgagactctctcatcgctggtgtcatccgtgtcgtggaaaaggacaatgacgtcctcctgcactgggctcctgtagaggaggctggagattccacccaaatcctcttctccaagaaggggccggaagtcagtcggcacccacagagctagtgacgagacactggaaggctgagctgaccacctgcgctgccccagggcaggaggatgaagatgaagatgaagatgactctccaccttgctccacagccaaacacagccaaggcaccaggaagttgcgttacatcacttccgctttccaggactccagtgggggtgactcatgtgcttctgaggaggaaccaacctttgaccccggctatgaacctgactgggctgtcatcagcactgtgcggccacagctctgccactcagagcccacgagaggtgcagagcccagctgcccccagggctcctgggccttctcagtgagtctgggggagctaaagtccatccgccgctccaagccaggcctcagctgggcctacctggttctggtgacccaggctggaggttccctgcccgcactgcacttccaccgcgggggcacccgcgccctgctccgcgtcctcagccgctacctgctgttggccagctccccgcaggactcccgcctctaccttgtcttcccccacgactcctctgctctctccaactccttccaccacctgcagctctttgaccaggacagctccaatgtggtgtcacgcttcctccaggatccctactccaccaccttcagcagcttctcccgagtgaccaacttcttccggggtgccctgcagccacagcctgagggagccgcctccgaccttcccccgccacccgacgatgagcccgagcctggattcgaggtcatttcctgtgtggagctggggcctcggccaaccgtggagcggggccctccagttacagaggaggagtgggcacgccacgtgggccctgaaggtcgcctgcagcaggtccctgagctgaagaaccggatcttctcggggggtctgagccccagcctgcggcgcgaggcc

SEQ ID NO: 189499 - DNA, 1441 bp, Homo sapiens
  Payload ID: 17418
  Gene Symbol: TBC1D17
  Gene Name: TBC1 domain family, member 17
  ENST ID: ENST00000594984
  CDS Start-End: 1-1035
accaccttcagcagcttctcccgagtgaccaacttcttccggggtgccctgcagccacagcctgagggagccgcctccgaccttcccccgccacccgacgatgagcccgagcctggattcgaggtcatttcctgtgtggagctggggcctcggccaaccgtggagcggggccctccagttacagaggaggagtgggcacgccacgtgggccctgaaggtcgcctgcagcaggtccctgagctgaagaaccggatcttctcggggggtctgagccccagcctgcggcgcgaggcctggaagttcctcctagggtacctcagctgggaaggcacagctgaggagcacaaggcccacatacgcaagaaaacggatgagtatttccgcatgaagctgcagtggaaatctgtgagccctgagcaggagcggagaaactcacttctgcatggataccgcagcctcatcgaaagggatgtgagccgcactgacaggaccaacaagttctacgagggtcccgagaacccggggctgggcctgctgaacgatatcctcctcacctactgcatgtatcacttcgacctcggctacgtccagggcatgagtgatcttctctccccgatcctctacgtcattcagaacgaggtggatgctttctggtgtttctgtggcttcatggagctcgtgcaagggaactttgaagagagccaggagaccatgaagcggcaactcgggcgactgctgctgctcctgagggtgctggaccccctgctctgcgacttcctggattcccaggactccggctctctctgcttctgtttccggtggctgctcatctggttcaagagggaattccccttcccggatgtccttcggctgtgggaggtgctgtggacagggctccctggccccaatctgcacctgctggtggcctgcgccatcctggacatggagagggacaccctcatgctgtccggcttcggctccaatgagatcctcaagcacgaagcacagagtgggcgctcgggcggaggtggttgagtgccgactggcgcctgacccaccccctcccgcagcacatcaacgagctgactatgaagctgagcgtggaggacgtgctgacccgcgccgaggccctgcaccgccagctaaccgcctgccccgagctgccccacaacgtgcaggagatcctggggctggccccgcccgcagagccccacagcccctcgcccaccgcctccccgctgcctctgtcgcccacccgggccccgcccaccccgccgccctccacggacacagccccgcagcccgacagcagcctggagatcctgcccgaggaggaggacgagggcgccgactcctaaccccgccaggcagcctcgttctgcacaggcactttagcccgagccaggcacacctgcgagggggcaggtgtgctccgccgccc

SEQ ID NO: 189500 - DNA, 1742 bp, Homo sapiens
  Payload ID: 17418
  Gene Symbol: TBC1D17
  Gene Name: TBC1 domain family, member 17
  ENST ID: ENST00000599049
  CDS Start-End: 1-1441
gaagtatcaggaccgagactctctcatcgctggtgtcatccgtgtcgtggaaaaggacaatgacgtcctcctgcactgggctcctgtagaggaggctggagattccacccaaatcctcttctccaagaaggactccagtgggggtgactcatgtgcttctgaggaggaaccaacctttgaccccggctatgaacctgactgggctgtcatcagcactgtgcggccacagctctgccactcagagcccacgagaggtgcagagcccagctgcccccagggctcctgggccttctcagtgagtctgggggagctaaagtccatccgccgctccaagccaggcctcagctgggcctacctggttctggtgacccaggctggaggttccctgcccgcactgcacttccaccgcgggggcacccgcgccctgctccgcgtcctcagccgctacctgctgttggccagctccccgcaggactcccgcctctaccttgtcttcccccacgactcctctgctctctccaactccttccaccacctgcagctctttgaccaggacagctccaatgtggtgtcacgcttcctccaggatccctactccaccaccttcagcagcttctcccgagtgaccaacttcttccggggtgccctgcagccacagcctgagggagccgcctccgaccttcccccgccacccgacgatgagcccgagcctggattcgaggtcatttcctgtgtggagctggggcctcggccaaccgtggagcggggccctccagttacagaggaggagtgggcacgccacgtgggccctgaaggtcgcctgcagcaggtccctgagctgaagaaccggatcttctcggggggtctgagccccagcctgcggcgcgaggcctggaagttcctcctagggtacctcagctgggaaggcacagctgaggagcacaaggcccacatacgcaagaaaacggatgagtatttccgcatgaagctgcagtggaaatctgtgagccctgagcaggagcggagaaactcacttctgcatggataccgcagcctcatcgaaagggatgtgagccgcactgacaggaccaacaagttctacgagggtcccgagaacccggggctgggcctgctgaacgatatcctcctcacctactgcatgtatcacttcgacctcggctacgtccagggcatgagtgatcttctctccccgatcctctacgtcattcagaacgaggtggatgctttctggtgtttctgtggcttcatggagctcgtgcaagggaactttgaagagagccaggagaccatgaagcggcaactcgggcgactgctgctgctcctgagggtgctggaccccctgctctgcgacttcctgggcacagtggctcacacctgtaatcccagcactttgggaggccaaggcgggcggatcacttgaggtcaggagttcaagaccagcctgaccaacatggagaaactgtctctactaaaaatacaaaattagctgggcctggtggcacacgcctgtgatcccagctactcaggaggctgaggcaggagaatcgcttgaacctgggaggtggaggctgcagtgagccaagatcacaccatggcacttcagcctgggcaacaagagcgaaagaaactccatctcaaaaaaaaaaaaaaaaaaaaatatattctttattacttggtcaatgtaaaaactgcaggaaattaagatgaagaagaaaaagtaa

SEQ ID NO: 189501 - DNA, 2370 bp, Homo sapiens
  Payload ID: 17418
  Gene Symbol: TBC1D17
  Gene Name: TBC1 domain family, member 17
  ENST ID: ENST00000622860
  CDS Start-End: 1347-1973
aggtggtgcagctctcagaccctcccacttgtttacttcgtggcgagagggcgaacactgcgcctgcgcactctccgtagccggatccaccttcagcgtctgcgccacgtgactccgatccaccctcgaggttccagtggaataacccccttctgaaaaatggtttcacccgctccttctctagaacgggtcgggccgctaccactgtccggcccggaggggaactgttttctccggaagtgacaacacgctgactaggaaaaggaggaggcggggcagtggggccttcggcggcgactatggaaggagccggctacagggtggtgtttgagaagggcggagtgtacctgcacaccagcgctaagaagtatcaggaccgagactctctcatcgctggtgtcatccgtgtcgtggaaaaggacaatgacgtcctcctgcactgggctcctgtagaggaggctggagattccacccaaatcctcttctccaagaaggactccagtgggggtgactcatgtgcttctgaggaggaaccaacctttgaccccggctatgaacctgactgggctgtcatcagcactgtgcggccacagctctgccactcagagcccacgagaggtgcagagcccagctgcccccagggctcctgggccttctcagtgagtctgggggagctaaagtccatccgccgctccaagccaggcctcagctgggcctacctggttctggtgacccaggctggaggttccctgcccgcactgcacttccaccgcgggggcacccgcgccctgctccgcgtcctcagccgctacctgctgttggccagctccccgcaggactcccgcctctaccttgtcttcccccacgactcctctgctctctccaactccttccaccacctgcagctctttgaccaggacagctccaatgtggtgtcacgcttcctccaggatccctactccaccaccttcagcagcttctcccgagtgaccaacttcttccggggtgccctgcagccacagcctgagggagccgcctccgaccttcccccgccacccgacgatgagcccgagcctggattcgaggtcatttcctgtgtggagctggggcctcggccaaccgtggagcggggccctccagttacagaggaggagtgggcacgccacgtgggccctgaaggtcgcctgcagcaggtccctgagctgaagaaccggatcttctcggggggtctgagccccagcctgcggcgcgaggcctggaagttcctcctagggtacctcagctgggaaggcacagctgaggagcacaaggcccacatacgcaagaaaacggatgagtatttccgcatgaagctgcagtggaaatctgtgagccctgagcaggagcggagaaactcacttctgcatggataccgcagcctcatcgaaagggatgtgagccgcactgacaggaccaacaagttctacgagggtcccgagaacccggggctgggcctgctgaacgatatcctcctcacctactgcatgtatcacttcgacctcggctacgtccagggcatgagtgatcttctctccccgatcctctacgtcattcagaacgaggtggatgctttctggtgtttctgtggcttcatggagctcgtgcaagggaactttgaagagagccaggagaccatgaagcggcaactcgggcgactgctgctgctcctgagggtgctggaccccctgctctgcgacttcctggattcccaggactccggctctctctgcttctgtttccggtggctgctcatctggttcaagagggaattccccttcccggatgtccttcggctgtgggaggtgctgtggacagggctccctggccccaatctgcacctgctggtggcctgcgccatcctggacatggagagggacaccctcatgctgtccggcttcggctccacaaggtcctccggcacatcaacgagctgactatgaagctgagcgtggaggacgtgctgacccgcgccgaggccctgcaccgccagctaaccgcctgccccgagctgccccacaacgtgcaggagatcctggggctggccccgcccgcagagccccacagcccctcgcccaccgcctccccgctgcctctgtcgcccacccgggccccgcccaccccgccgccctccacggacacagccccgcagcccgacagcagcctggagatcctgcccgaggaggaggacgagggcgccgactcctaaccccgccaggcagcctcgttctgcacaggcactttagcccgagccaggcacacctgcgagggggcaggtgtgctccgccgccctgctgataagctggcttcattaaactgacacttctcatgtgc

SEQ ID NO: 189502 - DNA, 2263 bp, Homo sapiens
  Payload ID: 17419
  Gene Symbol: TBC1D19
  Gene Name: TBC1 domain family, member 19
  Uniprot ID: Q8N5T2
  ENST ID: ENST00000264866
  CDS Start-End: 279-1859
tttcaaccatagacaaggcaggaacaacggtgtgaaaagcgtcctccccgccccggtctttttccgccggcggaacgcagatgctgtggccttcaggcgctgaggggaccagagagggacggacacaaggctcggcagttgcctggtaacgcccgctggaggagtcccagtgtaataaggtcccggagaagtgtcactggccctgagtgggacccggtagcccgttcgctccgcgccggcggcctgtccccgcggcttggcgggctagggcaggggaaatgttgcaggaggagtcggacctctctctcattattgcccagatagtccaaaagctcaagggctccaatttgtactctcagctggaacggcaggcctgggccagtcttcagagacctgagattaaacttgaatcactgaaagaagatattaaggaattctttaaaatatcaggttgggagaagaaacttcagaatgctgtttatagtgaactgagtgtgtttcctttacctagtcatcctgctgcacctcctgaacatcttaaagaacctttggtatacatgaggaaagcacagggaagttgggaaaaaagaattttgaagagtttaaatagtatgtgcactgaactgagtatcccactggcacgaaagaggccagttggagaacagaaagaacttcttaataaatggaatgaaatgggaactgatgaaccagatttaagccttttcagacctgtttatgcacctaaggattttcttgaggtattaattaatcttcgcaacccaaattatgaaaacggtgattctcttagtttcaggactcatttgggtttaattcaagttccactgaaagtaaaagacatccctgaattgaaagaatgctttgtggaacttggcttaaatataggacaactgggtatagatgattctacacaagtgcctcctgaactttttgaaaatgaacatgtacgtattgggcaaaaagttctagcagaacaagatagtgctgctgctcaacagtacatcagacaaggaagtcccacggcactgagagctgaattgtgggctctcattttgaatatttccagccaacctgaggatgtcttgtattatgagcagcttaagaccaatgtgatacaacatgaccttttggtggacagtctaatctataaagatgtgaagttgacagcaagcaatgatgattattattttgtatttgaagattatttatatcaggtattactttgtttttcccgggatacatctgtgttgagtcactttgcattcaacagtgcctcgccaccaaaatcatacataagaggaaaactaggactggaagaatatgctgtcttttacccaccaaatggtgttatcccttttcatggattttcaatgtatgttgcaccactttgttttctataccatgaaccttccaaattgtatcagatattccgtgagatgtatgtgcgttttttcttcagactccattccatctcttctcatccttctggtattgtgtcactctgtctgctgtttgaaactcttcttcaaacttatcttccccaactcttttatcatctacgagaaattggggctcaaccacttcgcatatcatttaagtggatggttcgagctttctctggatacttagctacagatcagctcttgcttttatgggatagaatcctaggatacaactctctggaaattcttgctgtgctggcagctgccgtgtttgctttccgagcagtgaacctgatggaggtgacatcactggctgcagctgaagcagttcttgctgacctttctactttaaaagttatgcctcttcttcagatttttctgtttgctactgtcacctgatcttcttcacagtcactggcaacacatctagtttttcattagaaacaaatcatgaactatgcaaactctgcataaaaccaaaatgaaactttgcatataagccaataaagatcatgttccctcttcagttaaacctaagtagtttctcactttttgaaacaataactctgcaccaaatattgcatcgcatgctgctgattttcaagagagaagcaataaacacaacttctgctaaattgagcattatatatataatattataatatatatataatcctgacttgtcaatggcatgtaataatatatgcaataagaactaaagatactgtaataaacttcaagaggtaatgtagcttcttggataattcttttatgtcagtttataaatttatctctagataatg

SEQ ID NO: 189503 - DNA, 774 bp, Homo sapiens
  Payload ID: 17419
  Gene Symbol: TBC1D19
  Gene Name: TBC1 domain family, member 19
  ENST ID: ENST00000505206
  CDS Start-End: 106-774
aataaggtcccggagaagtgtcactggccctgagtgggacccggtagcccgttcgctccgcgccggcggcctgtccccgcggcttggcgggctagggcaggggaaatgttgcaggaggagtcggacctctctctcattattgcccagatagtccaaaagctcaagggctccaatttgtactctcagctggaacggcaggcctggggaagttgggaaaaaagaattttgaagagtttaaatagtatgtgcactgaactgagtatcccactggcacgaaagaggccagttggagaacagaaagaacttcttaataaatggaatgaaatgggaactgatgaaccagatttaagccttttcagacctgtttatgcacctaaggattttcttgaggtattaattaatcttcgcaacccaaattatgaaaacggtgattctcttagtttcaggactcatttgggtttaattcaagttccactgaaagtaaaagacatccctgaattgaaagaatgctttgtggaacttggcttaaatataggacaactgggtatagatgattctacacaagtgcctcctgaactttttgaaaatgaacatgtacgtattgggcaaaaagttctagcagaacaagatagtgctgctgctcaacagtacatcagacaaggaagtcccacggcactgagagctgaattgtgggctctcattttgaatatttccagccaacctgaggatgtcttgtattatgagcagcttaagaccaatgtgatacaacatgac

SEQ ID NO: 189504 - DNA, 567 bp, Homo sapiens
  Payload ID: 17419
  Gene Symbol: TBC1D19
  Gene Name: TBC1 domain family, member 19
  ENST ID: ENST00000513455
  CDS Start-End: 364-567
ccaggggctgcagtttgattttgccacctttccttttcgttaacaaaagtgctatttgacatatattttatgtgtagttccatgaactaaacttcattttgtttggggaatctggaaagaatctcacactttgtttgaggctctacacaacaaatcactggattgaaattcctgcggggggggcattctggaagggactttggaccccgctcaagaagtcagtccccaagagtggagtccaattcagcagagaattcacggacagaagaacaacacagcagggcagagagccacagagccactagcagatgtcagggagatgaagagaggggccacagtaaaataagactctgggatgaaggtatgaccaggacaagggccaggtatgaccaggccagtcttcagagacctgagattaaacttgaatcactgaaagaagatattaaggaattctttaaaatatcaggttgggagaagaaacttcagaatgctgtttatagtgaactgagtgtgtttcctttacctagtcatcctgctgcacctcctgaacatcttaaagaacctttg

SEQ ID NO: 189505 - DNA, 580 bp, Homo sapiens
  Payload ID: 17419
  Gene Symbol: TBC1D19
  Gene Name: TBC1 domain family, member 19
  ENST ID: ENST00000513596
  CDS Start-End: 229-580
ttttgttgatatttcagtagttctgttcctttttattgctgagtaatatttcagtgtttgaatgtacaatggcttgtttattcatcattgtgtgaagggcattgggttgctttctggttttagagattataagtaaagctgatatatacattctagtatacgattttgcttggatatttgtttctttttttcttggataaatacctaggattggaattgctgacttgtatggccagtcttcagagacctgagattaaacttgaatcactgaaagaagatattaaggaattctttaaaatatcaggttgggagaagaaacttcagaatgctgtttatagtgaactgagtgtgtttcctttacctagtcatcctgctgcacctcctgaacatcttaaagaacctttggtatacatgaggaaagcacagggaagttgggaaaaaagaattttgaagagtttaaatagtatgtgcactgaactgagtatcccactggcacgaaagaggccagttggagaacagaaagaacttcttaataaatggaatgaaatgggaactgatgaaccagatttaagccttttca

SEQ ID NO: 189506 - DNA, 1386 bp, Homo sapiens
  Payload ID: 17419
  Gene Symbol: TBC1D19
  Gene Name: TBC1 domain family, member 19
  Uniprot ID: Q8N5T2
  ENST ID: ENST00000511789
  CDS Start-End: 1-1386
atgttgcaggaggagtcggacctctctctcattattgcccagatagtccaaaagctcaagggctccaatttgtactctcagctggaacggcaggcctggggaagttgggaaaaaagaattttgaagagtttaaatagtatgtgcactgaactgagtatcccactggcacgaaagaggccagttggagaacagaaagaacttcttaataaatggaatgaaatgggaactgatgaaccagatttaagccttttcagacctgtttatgcacctaaggattttcttgaggtattaattaatcttcgcaacccaaattatgaaaacggtgattctcttagtttcaggactcatttgggtttaattcaagttccactgaaagtaaaagacatccctgaattgaaagaatgctttgtggaacttggcttaaatataggacaactgggtatagatgattctacacaagtgcctcctgaactttttgaaaatgaacatgtacgtattgggcaaaaagttctagcagaacaagatagtgctgctgctcaacagtacatcagacaaggaagtcccacggcactgagagctgaattgtgggctctcattttgaatatttccagccaacctgaggatgtcttgtattatgagcagcttaagaccaatgtgatacaacatgaccttttggtggacagtctaatctataaagatgtgaagttgacagcaagcaatgatgattattattttgtatttgaagattatttatatcaggtattactttgtttttcccgggatacatctgtgttgagtcactttgcattcaacagtgcctcgccaccaaaatcatacataagaggaaaactaggactggaagaatatgctgtcttttacccaccaaatggtgttatcccttttcatggattttcaatgtatgttgcaccactttgttttctataccatgaaccttccaaattgtatcagatattccgtgagatgtatgtgcgttttttcttcagactccattccatctcttctcatccttctggtattgtgtcactctgtctgctgtttgaaactcttcttcaaacttatcttccccaactcttttatcatctacgagaaattggggctcaaccacttcgcatatcatttaagtggatggttcgagctttctctggatacttagctacagatcagctcttgcttttatgggatagaatcctaggatacaactctctggaaattcttgctgtgctggcagctgccgtgtttgctttccgagcagtgaacctgatggaggtgacatcactggctgcagctgaagcagttcttgctgacctttctactttaaaagttatgcctcttcttcagatttttctgtttgctactgtcacctga

SEQ ID NO: 189507 - DNA, 912 bp, Homo sapiens
  Payload ID: 17419
  Gene Symbol: TBC1D19
  Gene Name: TBC1 domain family, member 19
  ENST ID: ENST00000512840
  CDS Start-End: 111-912
agcagagaattcacggacagaagaacaacacagcagggcagagagccacagagccactagcagatgtcagggagatgaagagaggggccacagtaaaataagactctgggatgaaggccagtcttcagagacctgagattaaacttgaatcactgaaagaagatattaaggaattctttaaaatatcaggttgggagaagaaacttcagaatgctgtttatagtgaactgagtgtgtttcctttacctagtcatcctgctgcacctcctgaacatcttaaagaacctttggtatacatgaggaaagcacagggaagttgggaaaaaagaattttgaagagtttaaatagtatgtgcactgaactgagtatcccactggcacgaaagaggccagttggagaacagaaagaacttcttaataaatggaatgaaatgggaactgatgaaccagatttaagccttttcagacctgtttatgcacctaaggattttcttgaggtattaattaatcttcgcaacccaaattatgaaaacggtgattctcttagtttcaggactcatttgggtttaattcaagttccactgaaagtaaaagacatccctgaattgaaagaatgctttgtggaacttggcttaaatataggacaactgggtatagatgattctacacaagtgcctcctgaactttttgaaaatgaacatgtacgtattgggcaaaaagttctagcagaacaagatagtgctgctgctcaacagtacatcagacaaggaagtcccacggcactgagagctgaattgtgggctctcattttgaatatttccagccaacctgaggatgtcttgtattatgagcagcttaagaccaatgtgatacaacatgaccttttggtggacagtctaatctataaagatg

SEQ ID NO: 189508 - DNA, 3046 bp, Homo sapiens
  Payload ID: 17420
  Gene Symbol: TBC1D2
  Gene Name: TBC1 domain family, member 2
  Uniprot ID: Q9BYX2
  ENST ID: ENST00000342112
  CDS Start-End: 562-2694
tggtggtcccgcggacccctcgtccctccgcagtctccggctggcagcgatggagggcgctggggagaacgccccggagtccagctcctctgcccctgggtccgaagagtctgccagggatccacaggtgccgcctccggaggaagaatcgggggactgcgcccggtccctggaggcggtccccaagaaactctgtgggtatttaagtaagttcggcggcaaagggcccatccggggctggaaatcccgctggttcttctacgacgaaaggaaatgtcagctgtattactcgcggaccgctcaggatgccaatcccttggacagcatcgacctctccagtgcagtgtttgactgtaaggcggacgctgaggaggggatcttcgaaatcaagactcccagccgggttattaccctgaagggcaagaagaggcagagctggaggagttcctgtgccctgtgaaaacaccccctgggctagtgggcgtggcagctgccttgcagcccttccctgcccttcagaatatttccctcaagcacctggggactgaaatacagaacacaatgcacaacatccgtggcaacaagcaggcccagggaacaggccatgaacctccaggggaagattctccacagagtggggagcctcagagggaggagcagcccttggcctctgacgccagcaccccagggagagagccagaggattctccaaagcctgcacccaagccttctctgaccatcagtttcgctcagaaagccaagcgccagaacaacaccttcccattcttttctgaaggaatcacacggaaccgaactgcccaggagaaagtggcagccttggagcaacaggttctgatgctcaccaaggagttaaagtctcagaaggagctagtgaagatcctgcacaaggcactggaggccgcccagcaggagaagcgggcgtccagcgcatacctggcggcggctgaggacaaggaccggctggagctggtgcggcacaaagtgcggcagatcgcggagctgggccggcgggtggaggccctggagcaggagcgggagagcctggcgcacacagcgagcctgcgggagcagcaggtgcaggagctacagcagcacgtgcagctgcttatggacaagaaccacgccaagcagcaggtcatctgcaagctctctgagaaggtcacccaggacttcacgcacccccctgaccagtctcctttgcgccccgacgctgccaacagggacttcctgagccagcaggggaagatagagcacctgaaggatgacatggaagcttaccggacccagaactgcttcctcaactccgagatccaccaggtcacaaagatctggagaaaggtggctgagaaggagaaggcccttctgacgaagtgcgcctacctccaagccagaaactgccaggtggaaagcaagtacctggccggtctgagaaggctgcaggaggccctgggggacgaagccagcgagtgctcagagctgctgaggcagcttgtccaggaggcactgcagtgggaagctggggaggcctcatctgacagcatcgagctgagccccatcagtaagtatgatgagtacggcttcctgacggtgcccgactatgaggtggaagacctgaagctgctggccaagatccaggcattggagtcacgatcccaccacctgctgggcctcgaggctgtggatcggccgctgagggagcgctgggctgccctgggcgatcttgtgccctcagccgagctcaagcagctactgcgggcaggagtaccccgtgaacaccggcctcgtgtctggaggtggctggtccacctccgtgtccagcacctgcacactccaggctgctaccaggaactgctgagccggggccaggcccgcgagcaccctgctgcccgccagattgagctggacctgaaccggaccttccccaacaacaaacacttcacctgccccacctccagcttccccgacaagctccgccgggtgctgctggccttctcctggcagaaccccaccatcggctactgccagggcctgaacaggctggcggccattgccctgctggtcctagaggaggaggagagcgccttctggtgcctggtggccattgtggagaccatcatgcccgctgattactactgcaacacgctgacggcatcccaggtggaccagcgggtgctccaggacctgctctcggagaagctgcccaggctgatggcccatctggggcagcaccacgtggatctctccctcgtcaccttcaactggttcctcgtggtctttgcggacagtctcattagcaacatcctccttcgggtctgggatgccttcctgtacgaggggacgaaggtggtgtttcgctatgccttggccattttcaagtacaacgagaaggagatcttgaggctacagaatggcctggaaatctaccagtacctgcgcttcttcaccaagaccatctccaacagccggaagctgatgaacatcgccttcaatgacatgaaccccttccgcatgaaacagctgcggcagctgcgcatggtccaccgggagcggctggaggctgagctgcgggagctggagcagcttaaggcagagtacctggagaggcgggcatcccggcgcagagctgtgtccgagggctgtgccagcgaggacgaggtggagggggaagcctgacttggccacctcccctccccacagccttcctcacccttggctggcagacccactggaggtcaggcacggaccagtggcccagccctgggtgtcccatcaccatgtgaccttggacatgtcccttcccctctctggccctcagtttccccactgggacattgtgtgctgcaaagccattggttgggctacttcttcataggcacttacttacccagggatgccaccctttcgtcacctcttccacagagcactttggcatgtaaacaagcaagagcactgcctctatagggtaacctggaacattctctaggttatatcaatataaaacaatgtaaatggtggaaatcattca

SEQ ID NO: 189509 - DNA, 2100 bp, Homo sapiens
  Payload ID: 17420
  Gene Symbol: TBC1D2
  Gene Name: TBC1 domain family, member 2
  Uniprot ID: Q9BYX2
  ENST ID: ENST00000375063
  CDS Start-End: 339-1745
aactgcccagtaggttagttggtatttgccccttttacagatgaggaaacagagggtcagagtggttcagtggcctgcctgaggccttccagccagaacatcagccaggacttaaattcagacctactggtccctttaccacatcatgctgacatcaagaatagagaagggtgctatgagtattttatttttctttcagacttcctcttctgttgccattattggaaatttctaaggaaaagaagctttgggggctcatttgagggtgtgactccccaggaccagggagatgtttatgtccaactgataacatattttactctcttctccaggatgacatggaagcttaccggacccagaactgcttcctcaactccgagatccaccaggtcacaaagatctggagaaaggtggctgagaaggagaaggcccttctgacgaagtgcgcctacctccaagccagaaactgccaggtggaaagcaagtacctggccggtctgagaaggctgcaggaggccctgggggacgaagccagcgagtgctcagagctgctgaggcagcttgtccaggaggcactgcagtgggaagctggggaggcctcatctgacagcatcgagctgagccccatcagtaagtatgatgagtacggcttcctgacggtgcccgactatgaggtggaagacctgaagctgctggccaagatccaggcattggagtcacgatcccaccacctgctgggcctcgaggctgtggatcggccgctgagggagcgctgggctgccctgggcgatcttgtgccctcagccgagctcaagcagctactgcgggcaggagtaccccgtgaacaccggcctcgtgtctggaggtggctggtccacctccgtgtccagcacctgcacactccaggctgctaccaggaactgctgagccggggccaggcccgcgagcaccctgctgcccgccagattgagctggacctgaaccggaccttccccaacaacaaacacttcacctgccccacctccagcttccccgacaagctccgccgggtgctgctggccttctcctggcagaaccccaccatcggctactgccagggcctgaacaggctggcggccattgccctgctggtcctagaggaggaggagagcgccttctggtgcctggtggccattgtggagaccatcatgcccgctgattactactgcaacacgctgacggcatcccaggtggaccagcgggtgctccaggacctgctctcggagaagctgcccaggctgatggcccatctggggcagcaccacgtggatctctccctcgtcaccttcaactggttcctcgtggtctttgcggacagtctcattagcaacatcctccttcgggtctgggatgccttcctgtacgaggggacgaaggtggtgtttcgctatgccttggccattttcaagtacaacgagaaggagatcttgaggctacagaatggcctggaaatctaccagtacctgcgcttcttcaccaagaccatctccaacagccggaagctgatgaacatcgccttcaatgacatgaaccccttccgcatgaaacagctgcggcagctgcgcatggtccaccgggagcggctggaggctgagctgcgggagctggagcagcttaaggcagagtacctggagaggcgggcatcccggcgcagagctgtgtccgagggctgtgccagcgaggacgaggtggagggggaagcctgacttggccacctcccctccccacagccttcctcacccttggctggcagacccactggaggtcaggcacggaccagtggcccagccctgggtgtcccatcaccatgtgaccttggacatgtcccttcccctctctggccctcagtttccccactgggacattgtgtgctgcaaagccattggttgggctacttcttcataggcacttacttacccagggatgccaccctttcgtcacctcttccacagagcactttggcatgtaaacaagcaagagcactgcctctatagggtaacctggaacattctctaggttatatcaatataaaacaatgtaaatggtggaaatcattcataa

SEQ ID NO: 189510 - DNA, 3174 bp, Homo sapiens
  Payload ID: 17420
  Gene Symbol: TBC1D2
  Gene Name: TBC1 domain family, member 2
  Uniprot ID: Q9BYX2
  ENST ID: ENST00000375064
  CDS Start-End: 40-2622
gcggacccctcgtccctccgcagtctccggctggcagcgatggagggcgctggggagaacgccccggagtccagctcctctgcccctgggtccgaagagtctgccagggatccacaggtgccgcctccggaggaagaatcgggggactgcgcccggtccctggaggcggtccccaagaaactctgtgggtatttaagtaagttcggcggcaaagggcccatccggggctggaaatcccgctggttcttctacgacgaaaggaaatgtcagctgtattactcgcggaccgctcaggatgccaatcccttggacagcatcgacctctccagtgcagtgtttgactgtaaggcggacgctgaggaggggatcttcgaaatcaagactcccagccgggttattaccctgaaggccgccaccaagcaagcgatgctgtactggctgcagcagctgcagatgaagcgctgggaattccacaacagcccgccggcacctcctgccacccctgatgccgccctggctgggaatgggcccgtcctgcacctcgagctagggcaagaagaggcagagctggaggagttcctgtgccctgtgaaaacaccccctgggctagtgggcgtggcagctgccttgcagcccttccctgcccttcagaatatttccctcaagcacctggggactgaaatacagaacacaatgcacaacatccgtggcaacaagcaggcccagggaacaggccatgaacctccaggggaagattctccacagagtggggagcctcagagggaggagcagcccttggcctctgacgccagcaccccagggagagagccagaggattctccaaagcctgcacccaagccttctctgaccatcagtttcgctcagaaagccaagcgccagaacaacaccttcccattcttttctgaaggaatcacacggaaccgaactgcccaggagaaagtggcagccttggagcaacaggttctgatgctcaccaaggagttaaagtctcagaaggagctagtgaagatcctgcacaaggcactggaggccgcccagcaggagaagcgggcgtccagcgcatacctggcggcggctgaggacaaggaccggctggagctggtgcggcacaaagtgcggcagatcgcggagctgggccggcgggtggaggccctggagcaggagcgggagagcctggcgcacacagcgagcctgcgggagcagcaggtgcaggagctacagcagcacgtgcagctgcttatggacaagaaccacgccaagcagcaggtcatctgcaagctctctgagaaggtcacccaggacttcacgcacccccctgaccagtctcctttgcgccccgacgctgccaacagggacttcctgagccagcaggggaagatagagcacctgaaggatgacatggaagcttaccggacccagaactgcttcctcaactccgagatccaccaggtcacaaagatctggagaaaggtggctgagaaggagaaggcccttctgacgaagtgcgcctacctccaagccagaaactgccaggtggaaagcaagtacctggccggtctgagaaggctgcaggaggccctgggggacgaagccagcgagtgctcagagctgctgaggcagcttgtccaggaggcactgcagtgggaagctggggaggcctcatctgacagcatcgagctgagccccatcagtaagtatgatgagtacggcttcctgacggtgcccgactatgaggtggaagacctgaagctgctggccaagatccaggcattggagtcacgatcccaccacctgctgggcctcgaggctgtggatcggccgctgagggagcgctgggctgccctgggcgatcttgtgccctcagccgagctcaagcagctactgcgggcaggagtaccccgtgaacaccggcctcgtgtctggaggtggctggtccacctccgtgtccagcacctgcacactccaggctgctaccaggaactgctgagccggggccaggcccgcgagcaccctgctgcccgccagattgagctggacctgaaccggaccttccccaacaacaaacacttcacctgccccacctccagcttccccgacaagctccgccgggtgctgctggccttctcctggcagaaccccaccatcggctactgccagggcctgaacaggctggcggccattgccctgctggtcctagaggaggaggagagcgccttctggtgcctggtggccattgtggagaccatcatgcccgctgattactactgcaacacgctgacggcatcccaggtggaccagcgggtgctccaggacctgctctcggagaagctgcccaggctgatggcccatctggggcagcaccacgtggatctctccctcgtcaccttcaactggttcctcgtggtctttgcggacagtctcattagcaacatcctccttcgggtctgggatgccttcctgtacgaggggacgaaggtggtgtttcgctatgccttggccattttcaagtacaacgagaaggagatcttgaggctacagaatggcctggaaatctaccagtacctgcgcttcttcaccaagaccatctccaacagccgctgatgaacatcgccttcaatgacatgaaccccttccgcatgaaacagctgcggcagctgcgcatggtccaccgggagcggctggaggctgagctgcgggagctggagcagcttaaggcagagtacctggagaggcgggcatcccggcgcagagctgtgtccgagggctgtgccagcgaggacgaggtggagggggaagcctgacttggccacctcccctccccacagccttcctcacccttggctggcagacccactggaggtcaggcacggaccagtggcccagccctgggtgtcccatcaccatgtgaccttggacatgtcccttcccctctctggccctcagtttccccactgggacattgtgtgctgcaaagccattggttgggctacttcttcataggcacttacttacccagggatgccaccctttcgtcacctcttccacagagcactttggcatgtaaacaagcaagagcactgcctctatagggtaacctggaacattctctaggttatatcaatataaaacaatgtaaatggtggaaatcattca

SEQ ID NO: 189511 - DNA, 3198 bp, Homo sapiens
  Payload ID: 17420
  Gene Symbol: TBC1D2
  Gene Name: TBC1 domain family, member 2
  Uniprot ID: Q9BYX2
  ENST ID: ENST00000375066
  CDS Start-End: 93-2846
ctccctttgggaagctgcccgccgagtctccgagatttgtccctggtggtcccgcggacccctcgtccctccgcagtctccggctggcagcgatggagggcgctggggagaacgccccggagtccagctcctctgcccctgggtccgaagagtctgccagggatccacaggtgccgcctccggaggaagaatcgggggactgcgcccggtccctggaggcggtccccaagaaactctgtgggtatttaagtaagttcggcggcaaagggcccatccggggctggaaatcccgctggttcttctacgacgaaaggaaatgtcagctgtattactcgcggaccgctcaggatgccaatcccttggacagcatcgacctctccagtgcagtgtttgactgtaaggcggacgctgaggaggggatcttcgaaatcaagactcccagccgggttattaccctgaaggccgccaccaagcaagcgatgctgtactggctgcagcagctgcagatgaagcgctgggaattccacaacagcccgccggcacctcctgccacccctgatgccgccctggctgggaatgggcccgtcctgcacctcgagctagggcaagaagaggcagagctggaggagttcctgtgccctgtgaaaacaccccctgggctagtgggcgtggcagctgccttgcagcccttccctgcccttcagaatatttccctcaagcacctggggactgaaatacagaacacaatgcacaacatccgtggcaacaagcaggcccagggaacaggccatgaacctccaggggaagattctccacagagtggggagcctcagagggaggagcagcccttggcctctgacgccagcaccccagggagagagccagaggattctccaaagcctgcacccaagccttctctgaccatcagtttcgctcagaaagccaagcgccagaacaacaccttcccattcttttctgaaggaatcacacggaaccgaactgcccaggagaaagtggcagccttggagcaacaggttctgatgctcaccaaggagttaaagtctcagaaggagctagtgaagatcctgcacaaggcactggaggccgcccagcaggagaagcgggcgtccagcgcatacctggcggcggctgaggacaaggaccggctggagctggtgcggcacaaagtgcggcagatcgcggagctgggccggcgggtggaggccctggagcaggagcgggagagcctggcgcacacagcgagcctgcgggagcagcaggtgcaggagctacagcagcacgtgcagctgcttatggacaagaaccacgccaagcagcaggtcatctgcaagctctctgagaaggtcacccaggacttcacgcacccccctgaccagtctcctttgcgccccgacgctgccaacagggacttcctgagccagcaggggaagatagagcacctgaaggatgacatggaagcttaccggacccagaactgcttcctcaactccgagatccaccaggtcacaaagatctggagaaaggtggctgagaaggagaaggcccttctgacgaagtgcgcctacctccaagccagaaactgccaggtggaaagcaagtacctggccggtctgagaaggctgcaggaggccctgggggacgaagccagcgagtgctcagagctgctgaggcagcttgtccaggaggcactgcagtgggaagctggggaggcctcatctgacagcatcgagctgagccccatcagtaagtatgatgagtacggcttcctgacggtgcccgactatgaggtggaagacctgaagctgctggccaagatccaggcattggagtcacgatcccaccacctgctgggcctcgaggctgtggatcggccgctgagggagcgctgggctgccctgggcgatcttgtgccctcagccgagctcaagcagctactgcgggcaggagtaccccgtgaacaccggcctcgtgtctggaggtggctggtccacctccgtgtccagcacctgcacactccaggctgctaccaggaactgctgagccggggccaggcccgcgagcaccctgctgcccgccagattgagctggacctgaaccggaccttccccaacaacaaacacttcacctgccccacctccagcttccccgacaagctccgccgggtgctgctggccttctcctggcagaaccccaccatcggctactgccagggcctgaacaggctggcggccattgccctgctggtcctagaggaggaggagagcgccttctggtgcctggtggccattgtggagaccatcatgcccgctgattactactgcaacacgctgacggcatcccaggtggaccagcgggtgctccaggacctgctctcggagaagctgcccaggctgatggcccatctggggcagcaccacgtggatctctccctcgtcaccttcaactggttcctcgtggtctttgcggacagtctcattagcaacatcctccttcgggtctgggatgccttcctgtacgaggggacgaagtacaacgagaaggagatcttgaggctacagaatggcctggaaatctaccagtacctgcgcttcttcaccaagaccatctccaacagccggaagctgatgaacatcgccttcaatgacatgaaccccttccgcatgaaacagctgcggcagctgcgcatggtccaccgggagcggctggaggctgagctgcgggagctggagcagcttaaggcagagtacctggagaggcgggcatcccggcgcagagctgtgtccgagggctgtgccagcgaggacgaggtggagggggaagcctgacttggccacctcccctccccacagccttcctcacccttggctggcagacccactggaggtcaggcacggaccagtggcccagccctgggtgtcccatcaccatgtgaccttggacatgtcccttcccctctctggccctcagtttccccactgggacattgtgtgctgcaaagccattggttgggctacttcttcataggcacttacttacccagggatgccaccctttcgtcacctcttccacagagcactttggcatgtaaacaagcaagagcactgcctctatagggtaacctggaacattctctaggttatatcaatataaaacaatgtaaatggtggaaatcattca

SEQ ID NO: 189512 - DNA, 3349 bp, Homo sapiens
  Payload ID: 17420
  Gene Symbol: TBC1D2
  Gene Name: TBC1 domain family, member 2
  Uniprot ID: Q9BYX2
  ENST ID: ENST00000465784
  CDS Start-End: 181-2967
atctttgaggcgcgcgcaccgcacccggtcccgactctgtggcttcctgggggcgggttcgccgtcggccccgcccccgcccaggtgtctccctttgggaagctgcccgccgagtctccgagatttgtccctggtggtcccgcggacccctcgtccctccgcagtctccggctggcagcgatggagggcgctggggagaacgccccggagtccagctcctctgcccctgggtccgaagagtctgccagggatccacaggtgccgcctccggaggaagaatcgggggactgcgcccggtccctggaggcggtccccaagaaactctgtgggtatttaagtaagttcggcggcaaagggcccatccggggctggaaatcccgctggttcttctacgacgaaaggaaatgtcagctgtattactcgcggaccgctcaggatgccaatcccttggacagcatcgacctctccagtgcagtgtttgactgtaaggcggacgctgaggaggggatcttcgaaatcaagactcccagccgggttattaccctgaaggccgccaccaagcaagcgatgctgtactggctgcagcagctgcagatgaagcgctgggaattccacaacagcccgccggcacctcctgccacccctgatgccgccctggctgggaatgggcccgtcctgcacctcgagctagggcaagaagaggcagagctggaggagttcctgtgccctgtgaaaacaccccctgggctagtgggcgtggcagctgccttgcagcccttccctgcccttcagaatatttccctcaagcacctggggactgaaatacagaacacaatgcacaacatccgtggcaacaagcaggcccagggaacaggccatgaacctccaggggaagattctccacagagtggggagcctcagagggaggagcagcccttggcctctgacgccagcaccccagggagagagccagaggattctccaaagcctgcacccaagccttctctgaccatcagtttcgctcagaaagccaagcgccagaacaacaccttcccattcttttctgaaggaatcacacggaaccgaactgcccaggagaaagtggcagccttggagcaacaggttctgatgctcaccaaggagttaaagtctcagaaggagctagtgaagatcctgcacaaggcactggaggccgcccagcaggagaagcgggcgtccagcgcatacctggcggcggctgaggacaaggaccggctggagctggtgcggcacaaagtgcggcagatcgcggagctgggccggcgggtggaggccctggagcaggagcgggagagcctggcgcacacagcgagcctgcgggagcagcaggtgcaggagctacagcagcacgtgcagctgcttatggacaagaaccacgccaagcagcaggtcatctgcaagctctctgagaaggtcacccaggacttcacgcacccccctgaccagtctcctttgcgccccgacgctgccaacagggacttcctgagccagcaggggaagatagagcacctgaaggatgacatggaagcttaccggacccagaactgcttcctcaactccgagatccaccaggtcacaaagatctggagaaaggtggctgagaaggagaaggcccttctgacgaagtgcgcctacctccaagccagaaactgccaggtggaaagcaagtacctggccggtctgagaaggctgcaggaggccctgggggacgaagccagcgagtgctcagagctgctgaggcagcttgtccaggaggcactgcagtgggaagctggggaggcctcatctgacagcatcgagctgagccccatcagtaagtatgatgagtacggcttcctgacggtgcccgactatgaggtggaagacctgaagctgctggccaagatccaggcattggagtcacgatcccaccacctgctgggcctcgaggctgtggatcggccgctgagggagcgctgggctgccctgggcgatcttgtgccctcagccgagctcaagcagctactgcgggcaggagtaccccgtgaacaccggcctcgtgtctggaggtggctggtccacctccgtgtccagcacctgcacactccaggctgctaccaggaactgctgagccggggccaggcccgcgagcaccctgctgcccgccagattgagctggacctgaaccggaccttccccaacaacaaacacttcacctgccccacctccagcttccccgacaagctccgccgggtgctgctggccttctcctggcagaaccccaccatcggctactgccagggcctgaacaggctggcggccattgccctgctggtcctagaggaggaggagagcgccttctggtgcctggtggccattgtggagaccatcatgcccgctgattactactgcaacacgctgacggcatcccaggtggaccagcgggtgctccaggacctgctctcggagaagctgcccaggctgatggcccatctggggcagcaccacgtggatctctccctcgtcaccttcaactggttcctcgtggtctttgcggacagtctcattagcaacatcctccttcgggtctgggatgccttcctgtacgaggggacgaaggtggtgtttcgctatgccttggccattttcaagtacaacgagaaggagatcttgaggctacagaatggcctggaaatctaccagtacctgcgcttcttcaccaagaccatctccaacagccggaagctgatgaacatcgccttcaatgacatgaaccccttccgcatgaaacagctgcggcagctgcgcatggtccaccgggagcggctggaggctgagctgcgggagctggagcagcttaaggcagagtacctggagaggcgggcatcccggcgcagagctgtgtccgagggctgtgccagcgaggacgaggtggagggggaagcctgacttggccacctcccctccccacagccttcctcacccttggctggcagacccactggaggtcaggcacggaccagtggcccagccctgggtgtcccatcaccatgtgaccttggacatgtcccttcccctctctggccctcagtttccccactgggacattgtgtgctgcaaagccattggttgggctacttcttcataggcacttacttacccagggatgccaccctttcgtcacctcttccacagagcactttggcatgtaaacaagcaagagcactgcctctatagggtaacctggaacattctctaggttatatcaatataaaacaatgtaaatggtggaaatcattcataagctttggaacttaaacagttctcagtt

SEQ ID NO: 189513 - DNA, 4466 bp, Homo sapiens
  Payload ID: 17421
  Gene Symbol: TBC1D20
  Gene Name: TBC1 domain family, member 20
  Uniprot ID: Q96BZ9
  ENST ID: ENST00000354200
  CDS Start-End: 149-1360
agcggggcgcctgcgcgcctgcgcgccgctggccgacggaggggagcctgccgatgccgagcgggtgctacgtcccgcggtcggagccgcgtcttctcccggctccgccaccagccggggctcgggtgggggcccggggccccggggcatggccctccggagtgcgcagggcgacggccccacctccggccactgggacggcggcgcggagaaggcagactttaacgccaaaaggaaaaagaaagtggcagagatacaccaggctctgaacagtgatcccactgatgtggctgcccttagacgcatggctatcagtgaaggagggctcctgactgatgagatcagacgaaaagtgtggcccaagctcctcaatgtcaatgccaatgacccacctcctatatcagggaagaacctacggcagatgagcaaggactaccaacaagtgttgctggacgtccggcggtcattgcggcggttccctcctggcatgccagaggaacagagagaagggctccaggaagaactgattgacatcatcctcctcatcttggagcgcaaccctcagctgcactactaccagggctaccatgacattgtggtcacatttctgctggtggtaggcgagaggctggcaacatccctggtagaaaaattatctacccaccacctcagggattttatggatccaacaatggacaacaccaagcatatattaaactatctgatgcccatcattgaccaggtgaatccagagctccatgacttcatgcagagtgctgaggtagggaccatctttgccctcagctggctcatcacctggtttgggcatgtcctgtctgacttcaggcacgtcgtgcggttatatgacttcttcctggcctgccacccactgatgccgatttactttgcagccgtgattgtgttgtatcgcgagcaggaagtcctggactgtgactgtgacatggcctcggtccaccacctgttgtcccagatccctcaggacttgccctatgagacactgatcagcagagcaggagacctttttgttcagtttcccccatccgaacttgctcgggaggccgctgcccaacagcaagctgagaggacggcagcctctactttcaaagactttgagctggcatcagcccagcagaggcctgatatggtgctgcggcagcggtttcggggacttctgcggcctgaagatcgaacaaaagatgtcctgaccaagccaaggaccaaccgctttgtgaaattggcagtgatggggctgacagtggcacttggagcggctgcactggctgtggtgaaaagtgccctggaatgggcccctaagtttcagctgcagctgtttccctgaaagccagagaagaccttcctcttacatcacattaaggtctcacccttccatggaaggattgggaggggtggaatttcctttattaaaagggtttctgtccagagttttttattcctgccaccctgccctgcccgtttgtgtttgcctttacttcagaggccagtagcagagcctacctgacacagaggggacctgggggcctggcacagaatcttatgcctctcccagtgggcttttggatgggctctctgccacctccctggtgttggaggaagtgggtttctgaagcttgcagctgcttttgcaacctgctgggcctgggctgccctagttaccgggaacctcctagtcaccccatagaaggtgaactggaacatgggatgccctcttactgctcctgcttgcctgcatcagatggacacagaaggagggggctgctgctgaaggagtcaggcttgggatggagagcaagaggccaaaggactcgtctgggagcatgatcggcccctcttactagcagctccatcagctgatcagaaatcagagacagaagggaactaggttactcgttaaatcctacctattttcagcctagaaatcacatgggcgtttccagtcaagtgggaaggaagctcatttttagggcctagacctagactagttttgcctgcctttttttcctccctgctttcttctacaagccacacaacattgcttataaaaggtacttttattactatttttagaatatatacaccccatatgtaaattaccctcacttttaaagtaataatagttccttcacggaaaaaaaaatagttctcatcagaaggatgagcttctaagatcctgaattttactttctacttgattaacattttcgctttagccagagttgctatttgcaaacagctttccacttccaaagtgccactttctgaccggtttttcttcctgttttcctcaaatcatcctactcccaaataggcacccactcactaccttggcgtcgttttttgggtctgacttgactcgtcaactgctggtctctcccacctggttggaaatgtcgttggaaacttgcaaagactctccagaccttagggaacaagaggcatcactcagtccttctgggacagcttccctgtaagcaaagccaggtttgttttagattcactctggcctgaaaaaaaaagtgccttttgctgctttaaagaattggggtatatggtatgaagcagccatgtacttgtattttcctggtctttcctgggcactcttctctcttggcagatgttttcttaaagtgaacacaccagaagcactctaccccaccatatccagtcctctttgcatgcctgttgtgtgcagggtggagggtgtcccacgtgccagagcagctgggagccctgtccgctgagttacactaagcactttatttttatttattttattattattttcttttttctgagatggagtctcactctgttgcccaggctggagtgcagtggtgcagtctcagctcactgcaacctccgcctcccaagttcaggcaattctcgctgcctcagcctcccgagtagctgggactacaggcacctgctaccacgcctgactaatttttgtatttttagtagagatggggtttcgccacgttggccaggctggtctcgaactcctgacctcaggtgatctgcccgtctcgtcctcccaaagtgctgggattacaggtgtgagccaccacgcccagccaccactacgcactttaaaaccaaaaaaagctcaaagggatggatcattgtccatggctcaggagccccactgtggggtaagtgtgatgtcgatggattaatttagacagtggtgtattcatcagggcaaaggaaattcttccagaggtgatgatgcggcagatattcccagtgctctcccaaagcaagctggccctcttgtcatcctctcagtgggcggcaccagctgcccctccttccacaagtactcaagcctgtttgtaaatactgaaggaattgatggggttgaggaaaggaggtgcatgtgaccagggtcccaaggccacagcttttcagatcctaggaagcaagtggcatttgcttgagttgtggcctcggaaggagaatgtttatctgttttctaactttgctgacaccaggattctccctgtcattgagaagaaagcattatctaattaccttcaggtggtttacttattctgtaaagaatatgtgtaaatattttgtacagagccctgtatcaaataaacagccatatgtggttactaatcacctcttctgtcattccgtccttggccaccgctcagtgggaatggtctctgatctggatgctcccaccttccatgtcaggcccagaactgtgccatggtctgtggactcctggtcagccttgactggctaggagaccttgggcagtacctacagtcttgctgtttctgtttcatctgcaagaattatgacccacacactccagctgcagcccagggcactgtgatattttatacgtgtgtagatgtttttgtccacagttcctggttcatcactcccataaccctttgttataatgttgggacactgcaggcctcagaaaacggaatctctgtctgtgaccttctcctgccccatttcacttgctcaacaccagactttaatctgactgtagctcataagaccctcattccagagagggtgctgccccatacccggaaggaggaacgctgcacagagaggccaagaagcatctggacagacaggccttgctgggtttagaccttatgctttttgtccagtttcatctcaacacagctgccatgcttcagccatgcctatccaatgacgtctccataaaaggcccaggaacacgggagcttctgaagagctgaacatgtggagggaggggaacgagaacttgtccatgtgccaagagggtggcgcacccccactccatggggacagaagctccagcatttgcccaggacccgtccagacctcaccctgtgtgtatcttcatctggctgtttacttatttgtatccttttctaataatgtttgtaataaactggtaaacataa

SEQ ID NO: 189514 - DNA, 2024 bp, Homo sapiens
  Payload ID: 17421
  Gene Symbol: TBC1D20
  Gene Name: TBC1 domain family, member 20
  Uniprot ID: Q96BZ9
  ENST ID: ENST00000461304
  CDS Start-End: 127-1338
gcgccgctggccgacggaggggagcctgccgatgccgagcgggtgctacgtcccgcggtcggagccgcgtcttctcccggctccgccaccagccggggctcgggtgggggcccggggccccggggcatggccctccggagtgcgcagggcgacggccccacctccggccactgggacggcggcgcggagaaggcagactttaacgccaaaaggaaaaagaaagtggcagagatacaccaggctctgaacagtgatcccactgatgtggctgcccttagacgcatggctatcagtgaaggagggctcctgactgatgagatcagacgaaaagtgtggcccaagctcctcaatgtcaatgccaatgacccacctcctatatcagggaagaacctacggcagatgagcaaggactaccaacaagtgttgctggacgtccggcggtcattgcggcggttccctcctggcatgccagaggaacagagagaagggctccaggaagaactgattgacatcatcctcctcatcttggagcgcaaccctcagctgcactactaccagggctaccatgacattgtggtcacatttctgctggtggtaggcgagaggctggcaacatccctggtagaaaaattatctacccaccacctcagggattttatggatccaacaatggacaacaccaagcatatattaaactatctgatgcccatcattgaccaggtgaatccagagctccatgacttcatgcagagtgctgaggtagggaccatctttgccctcagctggctcatcacctggtttgggcatgtcctgtctgacttcaggcacgtcgtgcggttatatgacttcttcctggcctgccacccactgatgccgatttactttgcagccgtgattgtgttgtatcgcgagcaggaagtcctggactgtgactgtgacatggcctcggtccaccacctgttgtcccagatccctcaggacttgccctatgagacactgatcagcagagcaggagacctttttgttcagtttcccccatccgaacttgctcgggaggccgctgcccaacagcaagctgagaggacggcagcctctactttcaaagactttgagctggcatcagcccagcagaggcctgatatggtgctgcggcagcggtttcggggacttctgcggcctgaagatcgaacaaaagatgtcctgaccaagccaaggaccaaccgctttgtgaaattggcagtgatggggctgacagtggcacttggagcggctgcactggctgtggtgaaaagtgccctggaatgggcccctaagtttcagctgcagctgtttccctgaaagccagagaagaccttcctcttacatcacattaaggcacccactcactaccttggcgtcgttttttgggtctgacttgactcgtcaactgctggtctctcccacctggttggaaatgtcgttggaaacttgcaaagactctccagaccttagggaacaagaggcatcactcagtccttctgggacagcttccctgcctcagaaaacggaatctctgtctgtgaccttctcctgccccatttcacttgctcaacaccagactttaatctgactgtagctcataagaccctcattccagagagggtgctgccccatacccggaaggaggaacgctgcacagagaggccaagaagcatctggacagacaggccttgctgggtttagaccttatgctttttgtccagtttcatctcaacacagctgccatgcttcagccatgcctatccaatgacgtctccataaaaggcccaggaacacgggagcttctgaagagctgaacatgtggagggaggggaacgagaacttgtccatgtgccaagagggtggcgcacccccactccatggggacagaagctccagcatttgcccaggacccgtccagacctcaccctgtgtgtatcttcatctggctgtttacttatttgtatccttttctaataatgtttgtaataaactggtaaacataa

SEQ ID NO: 189515 - DNA, 1207 bp, Homo sapiens
  Payload ID: 17422
  Gene Symbol: TBC1D21
  Gene Name: TBC1 domain family, member 21
  Uniprot ID: Q8IYX1
  ENST ID: ENST00000300504
  CDS Start-End: 84-1094
caacccatctccgaaaaggattaagcatcactagggctccaagtgagttctgatcagaggctgttcggaagacagcaggggccatgaccaccctctctcctgaaaacagcctctctgccagacagtcagcctccttcatcctggtgaagagaaaaccacccattgacaagacagaatgggacagcttctttgatgagagtggccacttggccaaatcacgggacttcatttgtgttaacatcctggaaaggggtctgcaccccttcgtgaggactgaagcctggaaattcctcacgggctacttctcatggcagagttcccaggatgagcggctcacggtggacagcatgaggaggaagaactacaaggccttatgccaaatgtatgagaagattcagccccttctggaaaacctgcaccggaacttcacagagactcgcaataacattgcacgtgacattcagaaaatctatgacaaagatcccctgggcaacgtcctcatcgacaagaagaggctagagaagatcctgctcctgagttacgtctgcaacacgcaggcagagtaccagcagggcttccatgagatgatgatgctcttccagctgatggtggagcacgaccacgagaccttctggcttttccagttcttcctgcagaaaacggaacacagctgtgtcatcaacattggcgtggccaagaacctagacatgctcagcaccctgatcaccttcctggaccccgtgtttgctgagcacctaaaagggaagggtgcaggggctgtgcagtccctcttcccctggttctgcttctgcttccagcgtgccttcaagtccttcgatgatgtctggaggctctgggaggttctgctgacggggaagccctgcaggaacttccaggtgctggtggcctacagcatgctgcagatggtgcgggagcaggtgctgcaggaaagcatgggcggggatgacatcctcctggcctgcaacaacctcatcgaccttgatgctgatgagctgatctctgccgcctgcgtggtttatgctgagctcatccagaaggatgttcctcagacattaaaggatttcttcctctgaggacaccaaagcccgcagtggactgatgccttcgatgggcaggatgaaggccaggggcactggagtgagggagtagataaaacagctgcaatataaacagtcctctggaataa

SEQ ID NO: 189516 - DNA, 1005 bp, Homo sapiens
  Payload ID: 17422
  Gene Symbol: TBC1D21
  Gene Name: TBC1 domain family, member 21
  Uniprot ID: Q8IYX1
  ENST ID: ENST00000535547
  CDS Start-End: 103-1005
ccagttcctcctgggaatgcaacccatctccgaaaaggattaagcatcactagggctccaagtgagttctgatcagaggctgttcggaagacagcaggggccatgaccaccctctctcctgaaaacagcctctctgccagacagtcagcctccttcatcctgggtctgcaccccttcgtgaggactgaagcctggaaattcctcacgggctacttctcatggcagagttcccaggatgagcggctcacggtggacagcatgaggaggaagaactacaaggccttatgccaaatgtatgagaagattcagccccttctggaaaacctgcaccggaacttcacagagactcgcaataacattgcacgtgacattcagaaaatctatgacaaagatcccctgggcaacgtcctcatcgacaagaagaggctagagaagatcctgctcctgagttacgtctgcaacacgcaggcagagtaccagcagggcttccatgagatgatgatgctcttccagctgatggtggagcacgaccacgagaccttctggcttttccagttcttcctgcagaaaacggaacacagctgtgtcatcaacattggcgtggccaagaacctagacatgctcagcaccctgatcaccttcctggaccccgtgtttgctgagcacctaaaagggaagggtgcaggggctgtgcagtccctcttcccctggttctgcttctgcttccagcgtgccttcaagtccttcgatgatgtctggaggctctgggaggttctgctgacggggaagccctgcaggaacttccaggtgctggtggcctacagcatgctgcagatggtgcgggagcaggtgctgcaggaaagcatgggcggggatgacatcctcctggcctgcaacaacctcatcgaccttgatgctgatgagctgatctctgccgcctgcgtggtttatgctgagctcatccagaaggatgttcctcagacattaaaggatttcttcctctga

SEQ ID NO: 189517 - DNA, 965 bp, Homo sapiens
  Payload ID: 17422
  Gene Symbol: TBC1D21
  Gene Name: TBC1 domain family, member 21
  ENST ID: ENST00000562056
  CDS Start-End: 65-964
attaagcatcactagggctccaagtgagttctgatcagaggctgttcggaagacagcaggggccatgaccaccctctctcctgaaaacagcctctctgccagacagtcagcctccttcatcctggtgaagagaaaaccacccattgacaagacagaatgggacagcttctttgatgagagtggccacttggccaaatcacgggacttcatttgtgttaacatcctggaaaggggtctgcaccccttcgtgaggactgaagcctggaaattcctcacgggctacttctcatggcagagttcccaggatgagcggctcacggtggacagcatgaggaggaagaactacaaggccttatgccaaatgtatgagaagattcagccccttctggaaaacctgcaccggaacttcacagagactcgcaataacattgagtaccagcagggcttccatgagatgatgatgctcttccagctgatggtggagcacgaccacgagaccttctggcttttccagttcttcctgcagaaaacggaacacagctgtgtcatcaacattggcgtggccaagaacctagacatgctcagcaccctgatcaccttcctggaccccgtgtttgctgagcacctaaaagggaagggtgcaggggctgtgcagtccctcttcccctggttctgcttctgcttccagcgtgccttcaagtccttcgatgatgtctggaggctctgggaggttctgctgacggggaagccctgcaggaacttccaggtgctggtggcctacagcatgctgcagatggtgcgggagcaggtgctgcaggaaagcatgggcggggatgacatcctcctggcctgcaacaacctcatcgaccttgatgctgatgagctgatctctgccgcctgcgtggtttatgctgagctcatccagaaggatgttcctcagacattaaaggatttcttcctctgag

SEQ ID NO: 189518 - DNA, 3787 bp, Homo sapiens
  Payload ID: 17423
  Gene Symbol: TBC1D22A
  Gene Name: TBC1 domain family, member 22A
  Uniprot ID: Q8WUA7
  ENST ID: ENST00000337137
  CDS Start-End: 167-1720
gcgcgtaggcacaacttccggaaggaggcggaagagcttctcggctctaggctctggagtcccgggagcagtgaggggccacccggggcacaggaaagggccgctaggggagggccgggtgcactcggggtgtctgggccgcgggtctgagggatgaggaggggccatggccagcgacggggccaggaagcaattctggaagcgcagcaacagcaagctcccgggcagcatccagcacgtgtatggtgcccagcaccccccctttgatccactgttacatggcactttgctcaggtccacggccaagatgccgaccacaccagtgaaggccaagagggtcagcaccttccaggagtttgagagcaataccagcgatgcctgggacgctggggaggacgacgatgagctcctggccatggcggcggagagcctgaactccgaggtggtcatggagacggccaaccgtgtgctgcgtaaccacagccagcggcaggggcggcccacgctgcaggaggggccagggcttcagcagaagcccaggcccgaggcagagccgccctcaccccccagcggcgacctccggctggtgaagtcggtcagtgagagccacacgtcctgtcctgcagaaagtgccagcgatgccgcccctctgcagaggtcccagtctctcccacactcggccaccgtcacgctgggtggcacatctgaccccagcactctcagcagctcagcgctgagcgaaagagaggcctcccggctcgacaagttcaagcagctgcttgccggccccaacacggaccttgaggaattacggaggttgagctggtccggaatccctaagccagtgcgtccaatgacgtggaagctcctctcaggttaccttcccgccaatgtagaccggagaccagccactctccagagaaaacaaaaagaatattttgcatttattgagcactattacgattctaggaacgacgaagttcaccaggacacatacaggcagatccacatagacatccctcgcatgagccctgaagcgttgatcctgcagcccaaggtgacggagatttttgaaaggatcttgttcatatgggcgatccgccacccagccagtggatacgttcagggtataaatgatctcgtcactcctttctttgtggtcttcatttgtgaatacatagaggcagaggaggtggacacggtggacgtctccggcgtgcccgcagaggtgctgtgcaacatcgaggccgacacctactggtgcatgagcaagctgctggatggcattcaggacaactacacctttgcccaacctgggattcaaatgaaagtgaaaatgttagaagaactcgtgagccggattgatgagcaagtgcaccggcacctggaccaacacgaagtgagatacctgcagtttgccttccgctggatgaacaacctgctgatgagggaggtgcccctgcgttgtaccatccgcctgtgggacacctaccagtctgaaccggacggcttttctcatttccacttgtacgtgtgcgctgcttttctcgtgagatggaggaaggaaatactagaagaaaaagattttcaagagctgctgctcttcctccagaacctgcccacagcccactgggatgatgaggacatcagcctgttgctggccgaggcctaccgcctcaagtttgcttttgccgacgcccccaatcactacaagaaatgagcccaggcccacccgcagctggcctcactgtcccgggtggcgcgccccacctgcctggctggtggtaggcccctgtgagctggtcccgggctgctaaaaggccttgtgaggtggccccaccctccaggggagctggtgaagatgggccacagacctggtctagggctgacaaagacagggacagcctttgttttctgagataccaaagagagccaggggagggccccgggttcggcggccagaggcaggtcaggggtcccctctccctctccctgcaatgtccttgccaaatgactgcctcgtgctgcccctagtccggggcagcctaggaggccgaccctctttggagtcctgctgtctgggtgccagggccggaacgaggtagtggccatctcatacctactctgaaatgcaaaacttctattctgttgagtgaaagaataaaatgtagacaaaatctagaccgagacgttgcgctgacccggggtctctgtgccgcgaggtcccctcacagctgtatttcactgctgctggccctttccctccgtgtgttttcctgcttgcttggtttaaacgtggctgggaagctgaaggctggagtccaagccgtgagcccgccgagtgcctgggaggccgtgggaccaaaggctgggagcagagggaggcctcgccatcgccttactttccaccttgaacctcttttacaagagagaaacccccacctccctgaggtccagggccaagtggccccgccacgcaggtaggcgccggcctcagccagagcccctggaggcccacccaggctgtcgggccatgttgggctggcagacgggcagggggtcgcgtccctgtcatcaaagccctgaaccacagtgctcttctcaccgcagcctggaagcggaatgagcttttggagacttcctgggacttgctgtccttgtccaggtctgccaggtgtaggggaggtgtgactggttccatcatggaccggttcctccatggaccggttcctccgtggaccggttccgccatggaccggttccgccatggaccactcctgccctggaccactcctgccctggaccggttctgccgtggactggttcccgccgtggaccagttcccgctgtatactggttctgccctggactggttcccgctgtggactggttccttggggctctaagtgcggaagggcccagagctggtccctgcccagcgccctgctagggctgtgtccttggctccaggggccttgggactggcttcccagcgttccctcggtgtgtcacaggctgcatgacccctggaatgcgggcagggccacagccacagtctgtctgatccctgagcccaggacaggctcacgtcctcagcgacccactggtgactgacttcccagactctcctctgtccctcaggagcagccgtgtcctctcccaggccctaggacactgccagagactgtgggacatacaggcataagtgatgtgtgtgtttctgcttctgttttaaaaatccagggtcattacacacagcatggaaattagcacaaaatgctgtgcaaacgtcagatgctcccaaaccagcaaagggatgggcttgcttcacatcagatgcgggcacgccttacccctgccttccgtgtccccaccccagggtcaagggttcctcagaccagccatgcctcctcctcctgccgcctccttttctagatggggaggggattccgtcacaagaagagccgcccctcggccgtgtgcaggaagccccatgtcgctttgccgagatcagccctgggaggatccccttctccagctcagatcatgccgtgtggccagaaggctgcggacacaactgacctgcttctcgaggtggttgatgttttaaacaggaagctccacggagttcagccctgtgtgcatttcctcatgtatgtaaacgccaagactgaatgtgagaggtgttggccgcgggccttaagtctgagcagatccatctggaatgttcggggtgtgctgtctggatgtggtgcgctaaaaacacggaataaagatcagtgacaaa

SEQ ID NO: 189519 - DNA, 1886 bp, Homo sapiens
  Payload ID: 17423
  Gene Symbol: TBC1D22A
  Gene Name: TBC1 domain family, member 22A
  Uniprot ID: Q8WUA7
  ENST ID: ENST00000355704
  CDS Start-End: 107-1426
cccgggagcagtgaggggccacccggggcacaggaaagggccgctaggggagggccgggtgcactcggggtgtctgggccgcgggtctgagggatgaggaggggccatggccagcgacggggccaggaagcaattctggaagcgcagcaacagcaagctcccgggcagtttgctcaggtccacggccaagatgccgaccacaccagtgaaggccaagagggtcagcaccttccaggagtttgagagcaataccagcgatgcctgggacgctggggaggacgacgatgagctcctggccatggcggcggagagcctgaactccgaggtggtcatggagacggccaaccgtgtgctgcgtaaccacagccagcggcaggggcggcccacgctgcaggaggggccagggcttcagcagaagcccaggcccgaggcagagccgccctcaccccccagcggcgacctccggctggtgaagtcggtcagtgagagccacacgtcctgtcctgcagaggaattacggaggttgagctggtccggaatccctaagccagtgcgtccaatgacgtggaagctcctctcaggttaccttcccgccaatgtagaccggagaccagccactctccagagaaaacaaaaagaatattttgcatttattgagcactattacgattctaggaacgacgaagttcaccaggacacatacaggcagatccacatagacatccctcgcatgagccctgaagcgttgatcctgcagcccaaggtgacggagatttttgaaaggatcttgttcatatgggcgatccgccacccagccagtggatacgttcagggtataaatgatctcgtcactcctttctttgtggtcttcatttgtgaatacatagaggcagaggaggtggacacggtggacgtctccggcgtgcccgcagaggtgctgtgcaacatcgaggccgacacctactggtgcatgagcaagctgctggatggcattcaggacaactacacctttgcccaacctgggattcaaatgaaagtgaaaatgttagaagaactcgtgagccggattgatgagcaagtgcaccggcacctggaccaacacgaagtgagatacctgcagtttgccttccgctggatgaacaacctgctgatgagggaggtgcccctgcgttgtaccatccgcctgtgggacacctaccagtctgaaccggacggcttttctcatttccacttgtacgtgtgcgctgcttttctcgtgagatggaggaaggaaatactagaagaaaaagattttcaagagctgctgctcttcctccagaacctgcccacagcccactgggatgatgaggacatcagcctgttgctggccgaggcctaccgcctcaagtttgcttttgccgacgcccccaatcactacaagaaatgagcccaggcccacccgcagctggcctcactgtcccgggtggcgcgccccacctgcctggctggtggtaggcccctgtgagctggtcccgggctgctaaaaggccttgtgaggtggccccaccctccaggggagctggtgaagatgggccacagacctggtctagggctgacaaagacagggacagcctttgttttctgagataccaaagagagccaggggagggccccgggttcggcggccagaggcaggtcaggggtcccctctccctctccctgcaatgtccttgccaaatgactgcctcgtgctgcccctagtccggggcagcctaggaggccgaccctctttggagtcctgctgtctgggtgccagggccggaacgaggtagtggccatctcatacctactctgaaatgcaaaacttctattctgttgagtgaaagaataaaatgtagacaaaatct

SEQ ID NO: 189520 - DNA, 3934 bp, Homo sapiens
  Payload ID: 17423
  Gene Symbol: TBC1D22A
  Gene Name: TBC1 domain family, member 22A
  ENST ID: ENST00000380995
  CDS Start-End: 398-1861
gggcgcgcgtaggcacaacttccggaaggaggcggaagagcttctcggctctaggctctggagtcccgggagcagtgaggggccacccggggcacaggaaagggccgctaggggagggccgggtgcactcggggtgtctgggccgcgggtctgagggatgaggaggggccatggccagcgacggggccaggaagcaattctggaagcgcagcaacagcaagctcccgggcagcatccagcacgtgtatggtgcccagcaccccccctttgatccactgttacatggcacgcattcctcagggaggagactggtttctcattcagccacactgatcaagcagtcgctttgtgtgagatactgtgcaccccgtgctgcgcatcccggtgaagacggcggatgtgggagccacagcctgatgtggggagtttgctcaggtccacggccaagatgccgaccacaccagtgaaggccaagagggtcagcaccttccaggagtttgagagcaataccagcgatgcctgggacgctggggaggacgacgatgagctcctggccatggcggcggagagcctgaactccgaggtggtcatggagacggccaaccgtgtgctgcgtaaccacagccagcggcaggggcggcccacgctgcaggaggggccagggcttcagcagaagcccaggcccgaggcagagccgccctcaccccccagcggcgacctccggctggtgaagtcggtcagtgagagccacacgtcctgtcctgcagaaagtgccagcgatgccgcccctctgcagaggtcccagtctctcccacactcggccaccgtcacgctgggtggcacatctgaccccagcactctcagcagctcagcgctgagcgaaagagaggcctcccggctcgacaagttcaagcagctgcttgccggccccaacacggaccttgaggaattacggaggttgagctggtccggaatccctaagccagtgcgtccaatgacgtggaagctcctctcaggttaccttcccgccaatgtagaccggagaccagccactctccagagaaaacaaaaagaatattttgcatttattgagcactattacgattctaggaacgacgaagttcaccaggacacatacaggcagatccacatagacatccctcgcatgagccctgaagcgttgatcctgcagcccaaggtgacggagatttttgaaaggatcttgttcatatgggcgatccgccacccagccagtggatacgttcagggtataaatgatctcgtcactcctttctttgtggtcttcatttgtgaatacatagaggcagaggaggtggacacggtggacgtctccggcgtgcccgcagaggtgctgtgcaacatcgaggccgacacctactggtgcatgagcaagctgctggatggcattcaggacaactacacctttgcccaacctgggattcaaatgaaagtgaaaatgttagaagaactcgtgagccggattgatgagcaagtgcaccggcacctggaccaacacgaagtgagatacctgcagtttgccttccgctggatgaacaacctgctgatgagggaggtgcccctgcgttgtaccatccgcctgtgggacacctaccagtctgaaccggacggcttttctcatttccacttgtacgtgtgcgctgcttttctcgtgagatggaggaaggaaatactagaagaaaaagattttcaagagctgctgctcttcctccagaacctgcccacagcccactgggatgatgaggacatcagcctgttgctggccgaggcctaccgcctcaagtttgcttttgccgacgcccccaatcactacaagaaatgagcccaggcccacccgcagctggcctcactgtcccgggtggcgcgccccacctgcctggctggtggtaggcccctgtgagctggtcccgggctgctaaaaggccttgtgaggtggccccaccctccaggggagctggtgaagatgggccacagacctggtctagggctgacaaagacagggacagcctttgttttctgagataccaaagagagccaggggagggccccgggttcggcggccagaggcaggtcaggggtcccctctccctctccctgcaatgtccttgccaaatgactgcctcgtgctgcccctagtccggggcagcctaggaggccgaccctctttggagtcctgctgtctgggtgccagggccggaacgaggtagtggccatctcatacctactctgaaatgcaaaacttctattctgttgagtgaaagaataaaatgtagacaaaatctagaccgagacgttgcgctgacccggggtctctgtgccgcgaggtcccctcacagctgtatttcactgctgctggccctttccctccgtgtgttttcctgcttgcttggtttaaacgtggctgggaagctgaaggctggagtccaagccgtgagcccgccgagtgcctgggaggccgtgggaccaaaggctgggagcagagggaggcctcgccatcgccttactttccaccttgaacctcttttacaagagagaaacccccacctccctgaggtccagggccaagtggccccgccacgcaggtaggcgccggcctcagccagagcccctggaggcccacccaggctgtcgggccatgttgggctggcagacgggcagggggtcgcgtccctgtcatcaaagccctgaaccacagtgctcttctcaccgcagcctggaagcggaatgagcttttggagacttcctgggacttgctgtccttgtccaggtctgccaggtgtaggggaggtgtgactggttccatcatggaccggttcctccatggaccggttcctccgtggaccggttccgccatggaccggttccgccatggaccactcctgccctggaccactcctgccctggaccggttctgccgtggactggttcccgccgtggaccagttcccgctgtatactggttctgccctggactggttcccgctgtggactggttccttggggctctaagtgcggaagggcccagagctggtccctgcccagcgccctgctagggctgtgtccttggctccaggggccttgggactggcttcccagcgttccctcggtgtgtcacaggctgcatgacccctggaatgcgggcagggccacagccacagtctgtctgatccctgagcccaggacaggctcacgtcctcagcgacccactggtgactgacttcccagactctcctctgtccctcaggagcagccgtgtcctctcccaggccctaggacactgccagagactgtgggacatacaggcataagtgatgtgtgtgtttctgcttctgttttaaaaatccagggtcattacacacagcatggaaattagcacaaaatgctgtgcaaacgtcagatgctcccaaaccagcaaagggatgggcttgcttcacatcagatgcgggcacgccttacccctgccttccgtgtccccaccccagggtcaagggttcctcagaccagccatgcctcctcctcctgccgcctccttttctagatggggaggggattccgtcacaagaagagccgcccctcggccgtgtgcaggaagccccatgtcgctttgccgagatcagccctgggaggatccccttctccagctcagatcatgccgtgtggccagaaggctgcggacacaactgacctgcttctcgaggtggttgatgttttaaacaggaagctccacggagttcagccctgtgtgcatttcctcatgtatgtaaacgccaagactgaatgtgagaggtgttggccgcgggccttaagtctgagcagatccatctggaatgttcggggtgtgctgtctggatgtggtgcgctaaaaacacggaataaagatcagtgacaaagccgcg

SEQ ID NO: 189521 - DNA, 2048 bp, Homo sapiens
  Payload ID: 17423
  Gene Symbol: TBC1D22A
  Gene Name: TBC1 domain family, member 22A
  ENST ID: ENST00000394449
  CDS Start-End: 105-818
cgggagcagtgaggggccacccggggcacaggaaagggccgctaggggagggccgggtgcactcggggtgtctgggccgcgggtctgagggatgaggaggggccatggccagcgacggggccaggaagcaattctggaagcgcagcaacagcaagctcccgggcagcatccagcacgtgtatggtgcccagcaccccccctttgatccactgttacatggcactttgctcaggtccacggccaagatgccgaccacaccagtgaaggccaagagggtcagcaccttccaggagtttgagagcaataccagcgatgcctgggacgctggggaggacgacgatgagctcctggccatggcggcggagagcctgaactccgaggtggtcatggagacggccaaccgtgtgctgcgtaaccacagccagcggcaggggcggcccacgctgcaggaggggccagggcttcagcagaagcccaggcccgaggcagagccgccctcaccccccagcggcgacctccggctggtgaagtcggtcagtgagagccacacgtcctgtcctgcagaaagtgccagcgatgccgcccctctgcagaggtcccagtctctcccacactcggccaccgtcacgctgggtggcacatctgaccccagcactctcagcagctcagcgctgagcgaaagagaggcctcccggctcgacaagttcaagcagctgcttgccggccccaacacggaccttgggttaccttcccgccaatgtagaccggagaccagccactctccagagaaaacaaaaagaatattttgcatttattgagcactattacgattctaggaacgacgaagttcaccaggacacatacaggcagatccacatagacatccctcgcatgagccctgaagcgttgatcctgcagcccaaggtgacggagatttttgaaaggatcttgttcatatgggcgatccgccacccagccagtggatacgttcagggtataaatgatctcgtcactcctttctttgtggtcttcatttgtgaatacatagaggcagaggaggtggacacggtggacgtctccggcgtgcccgcagaggtgctgtgcaacatcgaggccgacacctactggtgcatgagcaagctgctggatggcattcaggacaactacacctttgcccaacctgggattcaaatgaaagtgaaaatgttagaagaactcgtgagccggattgatgagcaagtgcaccggcacctggaccaacacgaagtgagatacctgcagtttgccttccgctggatgaacaacctgctgatgagggaggtgcccctgcgttgtaccatccgcctgtgggacacctaccagtctgaaccggacggcttttctcatttccacttgtacgtgtgcgctgcttttctcgtgagatggaggaaggaaatactagaagaaaaagattttcaagagctgctgctcttcctccagaacctgcccacagcccactgggatgatgaggacatcagcctgttgctggccgaggcctaccgcctcaagtttgcttttgccgacgcccccaatcactacaagaaatgagcccaggcccacccgcagctggcctcactgtcccgggtggcgcgccccacctgcctggctggtggtaggcccctgtgagctggtcccgggctgctaaaaggccttgtgaggtggccccaccctccaggggagctggtgaagatgggccacagacctggtctagggctgacaaagacagggacagcctttgttttctgagataccaaagagagccaggggagggccccgggttcggcggccagaggcaggtcaggggtcccctctccctctccctgcaatgtccttgccaaatgactgcctcgtgctgcccctagtccggggcagcctaggaggccgaccctctttggagtcctgctgtctgggtgccagggccggaacgaggtagtggccatctcatacctactctgaaatgcaaaacttctattctgttgagtgaaagaataaaatgtagacaaaatcta

SEQ ID NO: 189522 - DNA, 1949 bp, Homo sapiens
  Payload ID: 17423
  Gene Symbol: TBC1D22A
  Gene Name: TBC1 domain family, member 22A
  ENST ID: ENST00000407381
  CDS Start-End: 116-1492
ctctggagtcccgggagcagtgaggggccacccggggcacaggaaagggccgctaggggagggccgggtgcactcggggtgtctgggccgcgggtctgagggatgaggaggggccatggccagcgacggggccaggaagcaattctggaagcgcagcaacagcaagctcccgggcagcatccagcacgtgtatggtgcccagcaccccccctttgatccactgttacatggcactttgctcaggtccacggccaagatgccgaccacaccagtgaaggccaagagggtcagcaccttccaggagtttgagagcaataccagcgatgcctgggacgctggggaggacgacgatgagctcctggccatggcggcggagagcctgaactccgaggtggtcatggagacggccaaccgtgtgctgcgtaaccacagccagcggcaggggcggcccacgctgcaggaggggccagggcttcagcagaagcccaggcccgaggcagagccgccctcaccccccagcggcgacctccggctggtgaagtcggtcagtgagagccacacgtcctgtcctgcagaggaattacggaggttgagctggtccggaatccctaagccagtgcgtccaatgacgtggaagctcctctcaggttaccttcccgccaatgtagaccggagaccagccactctccagagaaaacaaaaagaatattttgcatttattgagcactattacgattctaggaacgacgaagttcaccaggacacatacaggcagatccacatagacatccctcgcatgagccctgaagcgttgatcctgcagcccaaggtgacggagatttttgaaaggatcttgttcatatgggcgatccgccacccagccagtggatacgttcagggtataaatgatctcgtcactcctttctttgtggtcttcatttgtgaatacatagaggcagaggaggtggacacggtggacgtctccggcgtgcccgcagaggtgctgtgcaacatcgaggccgacacctactggtgcatgagcaagctgctggatggcattcaggacaactacacctttgcccaacctgggattcaaatgaaagtgaaaatgttagaagaactcgtgagccggattgatgagcaagtgcaccggcacctggaccaacacgaagtgagatacctgcagtttgccttccgctggatgaacaacctgctgatgagggaggtgcccctgcgttgtaccatccgcctgtgggacacctaccagtctgaaccggacggcttttctcatttccacttgtacgtgtgcgctgcttttctcgtgagatggaggaaggaaatactagaagaaaaagattttcaagagctgctgctcttcctccagaacctgcccacagcccactgggatgatgaggacatcagcctgttgctggccgaggcctaccgcctcaagtttgcttttgccgacgcccccaatcactacaagaaatgagcccaggcccacccgcagctggcctcactgtcccgggtggcgcgccccacctgcctggctggtggtaggcccctgtgagctggtcccgggctgctaaaaggccttgtgaggtggccccaccctccaggggagctggtgaagatgggccacagacctggtctagggctgacaaagacagggacagcctttgttttctgagataccaaagagagccaggggagggccccgggttcggcggccagaggcaggtcaggggtcccctctccctctccctgcaatgtccttgccaaatgactgcctcgtgctgcccctagtccggggcagcctaggaggccgaccctctttggagtcctgctgtctgggtgccagggccggaacgaggtagtggccatctcatacctactctgaaatgcaaaacttctattctgttgagtgaaagaataaaatgtagacaaaa

SEQ ID NO: 189523 - DNA, 2267 bp, Homo sapiens
  Payload ID: 17423
  Gene Symbol: TBC1D22A
  Gene Name: TBC1 domain family, member 22A
  Uniprot ID: Q8WUA7
  ENST ID: ENST00000406733
  CDS Start-End: 389-1801
agaagtctgtgcccttacccatcacagcctcatccttatctcctccattccctaggggacttaacaggtgttgaaattattacagagaaagctgactcactcaccaggaatctgatcctgctgtgggctggcttgggtggaggtgttcctcccgcccccgcacccatcctcctgtttgaactcaggctgctgcctgctgggcctgcctgcccttggagccctgctgagctcagcctgaggcctggctcctccaggctgggggaaaaccaggcttgctgtgctcggcagcagagattcttctggagtgagcatccagcacgtgtatggtgcccagcaccccccctttgatccactgttacatggcactttgctcaggtccacggccaagatgccgaccacaccagtgaaggccaagagggtcagcaccttccaggagtttgagagcaataccagcgatgcctgggacgctggggaggacgacgatgagctcctggccatggcggcggagagcctgaactccgaggtggtcatggagacggccaaccgtgtgctgcgtaaccacagccagcggcaggggcggcccacgctgcaggaggggccagggcttcagcagaagcccaggcccgaggcagagccgccctcaccccccagcggcgacctccggctggtgaagtcggtcagtgagagccacacgtcctgtcctgcagaaagtgccagcgatgccgcccctctgcagaggtcccagtctctcccacactcggccaccgtcacgctgggtggcacatctgaccccagcactctcagcagctcagcgctgagcgaaagagaggcctcccggctcgacaagttcaagcagctgcttgccggccccaacacggaccttgaggaattacggaggttgagctggtccggaatccctaagccagtgcgtccaatgacgtggaagctcctctcaggttaccttcccgccaatgtagaccggagaccagccactctccagagaaaacaaaaagaatattttgcatttattgagcactattacgattctaggaacgacgaagttcaccaggacacatacaggcagatccacatagacatccctcgcatgagccctgaagcgttgatcctgcagcccaaggtgacggagatttttgaaaggatcttgttcatatgggcgatccgccacccagccagtggatacgttcagggtataaatgatctcgtcactcctttctttgtggtcttcatttgtgaatacatagaggcagaggaggtggacacggtggacgtctccggcgtgcccgcagaggtgctgtgcaacatcgaggccgacacctactggtgcatgagcaagctgctggatggcattcaggacaactacacctttgcccaacctgggattcaaatgaaagtgaaaatgttagaagaactcgtgagccggattgatgagcaagtgcaccggcacctggaccaacacgaagtgagatacctgcagtttgccttccgctggatgaacaacctgctgatgagggaggtgcccctgcgttgtaccatccgcctgtgggacacctaccagtctgaaccggacggcttttctcatttccacttgtacgtgtgcgctgcttttctcgtgagatggaggaaggaaatactagaagaaaaagattttcaagagctgctgctcttcctccagaacctgcccacagcccactgggatgatgaggacatcagcctgttgctggccgaggcctaccgcctcaagtttgcttttgccgacgcccccaatcactacaagaaatgagcccaggcccacccgcagctggcctcactgtcccgggtggcgcgccccacctgcctggctggtggtaggcccctgtgagctggtcccgggctgctaaaaggccttgtgaggtggccccaccctccaggggagctggtgaagatgggccacagacctggtctagggctgacaaagacagggacagcctttgttttctgagataccaaagagagccaggggagggccccgggttcggcggccagaggcaggtcaggggtcccctctccctctccctgcaatgtccttgccaaatgactgcctcgtgctgcccctagtccggggcagcctaggaggccgaccctctttggagtcctgctgtctgggtgccagggccggaacgaggtagtggccatctcatacctactctgaaatgcaaaacttctattctgttgagtgaaagaataaaatgtagacaaaatctagaccg

SEQ ID NO: 189524 - DNA, 590 bp, Homo sapiens
  Payload ID: 17423
  Gene Symbol: TBC1D22A
  Gene Name: TBC1 domain family, member 22A
  ENST ID: ENST00000441936
  CDS Start-End: 137-313
gaagagcttctcggctctaggctctggagtcccgggagcagtgaggggccacccggggcacaggaaagggccgctaggggagggccgggtgcactcggggtgtctgggccgcgggtctgagggatgaggaggggccatggccagcgacggggccaggaagcaattctggaagcgcagcaacagcaagctcccgggcagagacggggtttcactgtgttatccaggatggtctcgatctcctgacctcgtgatccgcccgcctcggcctcccgataagactgggtttctgtgctcctgtgacatgctcttgtaggaatcatcatagaacagtcaaaatgccagttgaagttttgcttttcatccagcacgtgtatggtgcccagcaccccccctttgatccactgttacatggcactttgctcaggtccacggccaagatgccgaccacaccagtgaaggccaagagggtcagcaccttccaggagtttgagagcaataccagcgatgcctgggacgctggggaggacgacgatgagctcctggccatggcggcggagagcctgaactccgaggtggtcatggagacggcc

SEQ ID NO: 189525 - DNA, 2636 bp, Homo sapiens
  Payload ID: 17423
  Gene Symbol: TBC1D22A
  Gene Name: TBC1 domain family, member 22A
  Uniprot ID: Q8WUA7
  ENST ID: ENST00000441162
  CDS Start-End: 755-1729
aatattattgtttgagtgtttgaatgataaactttggaatttactgcatccagttagaaaagtttacttttggccaggtgtggcggctcacgcctgtaatcccagcactttgggaggtcgaggtggacagatcacctgaggtcaggagtttgagaccagcctcaccaacatggagaaacctagtctctactaaaaatacaaaattagctgggcatggtggcacatgcctgtaatcctggctacttgggaggctgaggcaggagaatcacttgaacctgggaggtggaggttgcagtgagccgagatcgttccattgcactccatcctgggcaataagagcgaaactctgtctcaaaaaaaaaaaggaaagtttacttttaagagtgatctgggggttagcagcgtgagttactgacagctcagacagtggctttgagaatgaagggagtcatcaaaggtggccggagaccctattcgactccacaggaccgtgcttgattcgagaacagtaagacctttcaacaaaaccagtgtcagggtccaagattggaggcgttgggagtcggggcaagggcagaagcagggagaccaggaggccagggtgccgcagcgtccagtggtcactggtggtggcggcttgcacctgagtggaagctgtggtggtggcaagaaatgcatccagcacgtgtatggtgcccagcaccccccctttgatccactgttacatggcactttgctcaggtccacggccaagatgccgaccacaccagtgaaggccaagagggtcagcaccttccaggagtttgagagcaataccagcgatgcctgggacgctggggaggacgacgatgagctcctggccatggcggcggagagcctgaactccgaggtggtcatggagacggccaaccgtgtgctgcgtaaccacagccagcggcaggggcggcccacgctgcaggaggggccagggcttcagcagaagcccaggcccgaggcagagccgccctcaccccccagcggcgacctccggctggtgaagtcggtcagtgagagccacacgtcctgtcctgcagaaagtgccagcgatgccgcccctctgcagaggtcccagtctctcccacactcggccaccgtcacgctgggtggcacatctgaccccagcactctcagcagctcagcgctgagcgaaagagaggcctcccggctcgacaagttcaagcagctgcttgccggccccaacacggaccttgaggaattacggaggttgagctggtccggaatccctaagccagtgcgtccaatgacgtggaagctcctctcaggttaccttcccgccaatgtagaccggagaccagccactctccagagaaaacaaaaagaatattttgcatttattgagcactattacgattctaggaacgacgaagttcaccaggacacatacaggcagatccacatagacatccctcgcatgagccctgaagcgttgatcctgcagcccaaggtgacggagatttttgaaaggatcttgttcatatgggcgatccgccacccagccagtggatacgttcagggtataaatgatctcgtcactcctttctttgtggtcttcatttgtgaatacatagcctttccaggttgtggtcggcctcagattcccatccttgctgtgatctggagagatgagccttacccgaggacagatgaacagattatcctcagaagatgaggacatatccaagacaactacacctttgcccaacctgggattcaaatgaaagtgaaaatgttagaagaactcgtgagccggattgatgagcaagtgcaccggcacctggaccaacacgaagtgagatacctgcagtttgccttccgctggatgaacaacctgctgatgagggaggtgcccctgcgttgtaccatccgcctgtgggacacctaccagtctgaaccggacggcttttctcatttccacttgtacgtgtgcgctgcttttctcgtgagatggaggaaggaaatactagaagaaaaagattttcaagagctgctgctcttcctccagaacctgcccacagcccactgggatgatgaggacatcagcctgttgctggccgaggcctaccgcctcaagtttgcttttgccgacgcccccaatcactacaagaaatgagcccaggcccacccgcagctggcctcactgtcccgggtggcgcgccccacctgcctggctggtggtaggcccctgtgagctggtcccgggctgctaaaaggccttgtgaggtggccccaccctccaggggagctggtgaagatgggccacagacctggtctagggctgacaaagacagggacagcctttgttttctgagataccaaagagagccaggggagggccccgggttcggcggccagaggcaggtcaggggtcccctctccctctccctgcaatgtccttgccaaatgactgcctcgtgctgcccctagtccggggcagcctaggaggccgaccctctttggagtcctgctgtctgggtgccagggccggaacgaggtagtggccatctcatacctactctgaaatgcaaaacttctattctgttgagtgaaagaataaaatgtagacaaaatctagaccg

SEQ ID NO: 189526 - DNA, 3462 bp, Homo sapiens
  Payload ID: 17424
  Gene Symbol: TBC1D22B
  Gene Name: TBC1 domain family, member 22B
  Uniprot ID: Q9NU19
  ENST ID: ENST00000373491
  CDS Start-End: 147-1664
acatccaagatggcgtccccaggagctgggagcgggtgaccggcggcggggaagcggcctgggttggccctcagattgcggggtctgggggcatctcgccgggcaaacccttggcccgcctacaaggacttcccccggccagagcaatggccgctgagaacagcaagcagttttggaagaggagcgctaagctgccggggagcattcagcctgtatatggagcacagcatcctcctcttgacccacggctcaccaaaaatttcattaaagaacgatcaaaagtcaacacagttcctctgaagaataagaaggcctccagttttcatgagtttgcacggaataccagtgatgcttgggacattggcgatgatgaggaagaggacttttcctcaccttctttccaaactctgaactcaaaagttgctttggcaactgcagcccaagttctagaaaaccacagcaagctgagagtaaaaccagaacggtcccagtcaacgacatcggacgtccctgccaactacaaggtcataaagtccagcagtgatgcccagctgtccagaaactctagtgatacatgcctgaggaacccactccacaaacagcaatcactccctctccggcccatcatccccctcgttgcccggatctcggatcagaacgcttctggggcccccccaatgactgtccgggagaaaacccgcctagaaaaattccgtcaacttctctccagccagaacactgacttagatgaactgaggaagtgtagctggccaggggttcccagggaggttcgacctataacctggagactcctgtcgggctatctcccagcaaacactgagaggaggaagttgaccctgcagcggaagcgggaggaatattttggcttcattgaacagtattatgactctcgaaacgaggaacatcaccaggatacctacagacagattcacattgacattccaaggacgaatcctctcattccgttgttccagcaaccacttgtacaggagatctttgaaagaattctatttatttgggccatccgccaccctgccagtgggtatgtccagggaattaatgacctggtcactccattctttgtcgtcttcctctcagaatatgtggaagaggatgtggagaactttgacgtgaccaacttgtctcaagacatgctgcgaagcattgaggctgacagcttttggtgcatgagcaagctgctggatggaatccaggataactacacctttgcacaaccaggaatccagaagaaggtgaaggcactggaagagcttgtcagccggattgatgagcaggtacataatcacttcaggaggtacgaggtagaatacctgcagtttgccttccgctggatgaacaacctgcttatgcgggagcttcctcttcgctgcaccatccgcctgtgggacacatatcagtctgaaccagaagggttctcccactttcatctctacgtgtgtgcagccttcttgatcaagtggaggaaagagatcttggatgaggaggattttcagggtctcctcatgctgctacagaacctacctacaatacactggggcaacgaagaaattgggctgcttctcgccgaggcatacagactcaagtacatgtttgccgatgccccaaatcactaccgccgataggtgctgtctcctccggggacccagactgccttcatctctgatggcagtctgatcactgtggccactgtgcgagccgtggaccccggccaggaaccactcctgttgtacaaagctcacacccaccgcccaggtcttaactttctggcatccaccactccatgtctctggatgtgtcacttggaccactgtcagtattccatgccgcgtggatgggcccagttctgggagaggacagaaaaggtggtacagggttgtctgcccctttaaaagaaactggacaaagaaggggaaggctcagggtctcacctcacattgtccctacaaggacaggccccaactgataaccgttgcttttttttttttgtgaacatagtttgatttgatcacaggtcaaaaacgccttatattttcgaaagactcctggcccctcttccctcttcctggtttcctagccgttccccttctgccccagtctgagccagtgaggggtagctttttaaaaccattattctagatggaggaggcactgatgcttgtaactctggaaagaggcctacacccaagggctaggaattttatttttccttttctcaccaggtgtctgcatgtgtgtgtgggtgtgaatgtgtatacatgcccatcagcatttagtcacatgtctgaatttctgtgtccagacgagccccatcaaactagttgggaagggccccagtgaccaagtgtataagcatcccttgaagagggattggggcaggggaggcagaaggggctctccagaccccttttccatgatgacccactccaagatattatgtgtaaattgtgttattatgtatatgggtaaagatgtacaaatatatgtcctctttgtagcagatatgattttatatttataatgtgcatcaacatgtgaaagcaatctaggtcactagcacagaggaagttgccaggaaggtggcttcagcacctccaggttggttctgggtgtcctgctgtgaggggtagaacgggaggctgctgaagtgagtagctgagcagctggagccatcccaagcatcagtgtctcagagtcctcctcgcccctttcttcaccccgccccccaacccccagactttcctggagcatctgccctttgctcctagcagcctccccaggaagggactgcagaggcgggcaagccctctctatgtgtttttatccccaccttccccggaatctggggagggcttttgtttttacgttttcaagttcagcattgtattcggacagaagctgtgactgaagactcagtgccaaggaaaggggcttcttgtgtgtccctcgggtttggggctcttctcagagagcagcactccatatcccttactgtcaccttcactccccacacagctcatgagatgtgtgacccctgtttgagttttggtatttggtagtggagggtggggggatgggggccagcagctgtcatcctcctgggaagccgagcagtgtccctggtgggtaacaccctcaagtctctttgccagtgaggccccaccacatcggtgtgagttaggtttctcatctggagctgtttctcaggcattcttcccaaccctcttccttttccccttcggtgtgcctcagtggtctccttcatagagtgagagggcttgagaccctccctcaaccggactaattaaagaaagacacttgtgttcccaagtggtggttttatttttttagtttttatgtttgtatgggaaattgtggataaagtgaaaagaattgtaaataaatggtgtatttcctcctcca

SEQ ID NO: 189527 - DNA, 3656 bp, Homo sapiens
  Payload ID: 17425
  Gene Symbol: TBC1D23
  Gene Name: TBC1 domain family, member 23
  Uniprot ID: Q9NUY8
  ENST ID: ENST00000344949
  CDS Start-End: 19-2073
acgtggacgtcaacagcaatggcggaaggagaagatgtgccgccgctgccaacgtcgagcggcgacggctgggaaaaagatcttgaagaagctctggaagcaggaggttgtgatcttgaaacgttgagaaatataattcaaggaagaccgctgcctgctgatctgagggccaaagtttggaagattgctctgaatgttgcaggaaaaggtgatagtttggcatcatgggatggtattttagacttgccagaacagaacactattcacaaagattgcctgcagtttattgaccagctttcagtgccagaggagaaggcagcagaattacttttggatattgaatctgtaattaccttttattgtaaatcacgtaacattaaatatagcacatcccttagctggatacatctactgaaaccattggtgcatcttcaactgccacgcagcgatttatacaactgcttttatgccataatgaataagtacattcccagggattgttcccagaaagggagaccatttcatctcttcaggttgctcatccaataccatgagcctgagctttgttcttatcttgatacaaagaaaattactccagactcctatgcactcaactggcttggaagtctttttgcatgttactgttccactgaagtcactcaggcaatatgggatggatatctacaacaagcagatccattttttatttatttcttaatgttaattatccttgttaatgcaaaagaagttattttaacacaagagtcagacagcaaagaagaagttatcaagttcttggaaaatactccatccagtctgaatatagaagatatagaagaccttttctctctggctcagtattattgcagcaaaacaccggcttcttttaggaaggataatcaccatctctttggtagtactttgttgggaattaaggatgatgatgcagatctgagtcaggctctttgtctggccatctccgtgtcagagatccttcaagcgaatcagctacaaggggaaggagtccggttctttgtggtggattgccgtcctgcagaacaatataatgctgggcatttatcaactgctttccacttagattcagacctgatgcttcagaatccatctgagtttgcacagtcagtaaaatccttgctggaagcacagaagcagtccattgagtctggctccatagctggtggggagcacctctgttttatgggcagtggcagggaggaagaagacatgtatatgaacatggtcctggcacactttttacagaaaaacaaagaatatgtgagtattgccagtggaggatttatggcactgcagcagcacctggcagacattaatgtggatggaccagaaaatggatatggccattggattgctagtacctcaggctcaaggagcagtatcaattctgttgatggtgaatctcctaatggctcaagtgatagaggaatgaaatcactagtaaataaaatgactgtggctttgaagacaaaatccgttaatgtcagggaaaaagttatcagttttatagagaatacatcaactcctgtggatcggcatgtgagcagcagtgacagagtgggcaagccttaccgtggcgtaaagcctgttttcagcattggggatgaagaagaatacgacacagatgaaattgacagttcttcaatgtcagatgatgatagaaaagaggttgtaaacattcagacttggataaacaaaccagatgtcaaacatcattttccttgtaaagaagtaaaagaaagtggacacatgtttcccagtcatctgttggttactgcaacacatatgtactgtttaagggagattgtttcacggaaaggattggcttatatacagtctcgacaagcgctgaattctgtagttaaaattacatccaaaaaaaaacatcctgaactcattaccttcaagtatggaaatagcagtgcttcaggaatagaaatcttggcaatcgaaaggtatttgattccaaatgcaggggatgcaactaaagccataaaacagcagatcatgaaagttttggatgctttggaaagttaatataaaagaaaattatataaaaagaaattaagacaaccaagagaaacatggacatatacctcctgactgaatactaactggagacctttcatttgctcatggggctgcttaaatagcaggtctaagaaagtgtaaattattataatcaatctgtggacagtaaactttttaaaaatttttcttctgcattttggttttataaaatgatgtattataaaggtcagttattaaattactttgaagtaactgaccctgtgcccttatggactaagtaagggtacagaatgcagttctgttttgaagagctgttttaagggaacatgcatcactttcgggatcaaaaacaactgtacacatacatatctgcagtgtcttcactgaaaattagagatagaattagttgaagagacttccttaattgctacattgttttactcactgagcaatatcagaaactaaaacatagattaataattcactcactgtttctattcttcttaaaaagagtgaaatctttttaatggaatggttgaagattcctgccaactcaaaatacagtacagctagtaaaatgttgaaacatcagtttctaaatcacctttgctccattagctaattttttggacactaaatgcttcaaagataagaaacttcatcctaatgatttctaaagagcagttaaaagcattaaaataagtaggtaggctgttaagattaaaattaacattttggggacagaattgtgtctgtaaaaatgtcattggttttattacaagcggattattttattcatattttaaaacaaatgtttaagccacattgatttatcctcattgaggattatggtctgtgaccacagtaatatccacttatataaatgccaaataatcagagagcttataaagtacaattgtttttgtcatcattttctgaatttctttctcttcttttggttttgtcctctcattgaagttccagtggtttgaaattagttttggacacattgtcttaatgtactgaaaattgctctgctgtattttgcagcgttcttcatttaatttataatggtccatattagacacatttggtaagagaagtccaggaacacatttagggccatggaatagtattttgtaaaatccatttgggaagttgcaatacccacaatctgacatgtcctaaaatgtaagggattatctctaaggggttgatgggagaaatatttagatgtaccctgttaacagccagtcattttgatttacttatggaaatcaagtgaataaaaggcaacataatttgggaaattttattctaatatctaataaaaacagtttgagtggttgaagacatctgcatgaaattgcacctaggtgcattacttgatataactctcccctaaaactgttgtaattgcattttttcccttttcttggcacccctttagaaatgtactgaagtctcatttttcacccatttcagccatgggacatttttcataatattaatgtaaagatgtttgtgttactgtttataaattacaattgtaaataaattactagtttgcccaaaactttgttcttaaa

SEQ ID NO: 189528 - DNA, 3677 bp, Homo sapiens
  Payload ID: 17425
  Gene Symbol: TBC1D23
  Gene Name: TBC1 domain family, member 23
  Uniprot ID: Q9NUY8
  ENST ID: ENST00000394144
  CDS Start-End: 8-2107
aacagcaatggcggaaggagaagatgtgccgccgctgccaacgtcgagcggcgacggctgggaaaaagatcttgaagaagctctggaagcaggaggttgtgatcttgaaacgttgagaaatataattcaaggaagaccgctgcctgctgatctgagggccaaagtttggaagattgctctgaatgttgcaggaaaaggtgatagtttggcatcatgggatggtattttagacttgccagaacagaacactattcacaaagattgcctgcagtttattgaccagctttcagtgccagaggagaaggcagcagaattacttttggatattgaatctgtaattaccttttattgtaaatcacgtaacattaaatatagcacatcccttagctggatacatctactgaaaccattggtgcatcttcaactgccacgcagcgatttatacaactgcttttatgccataatgaataagtacattcccagggattgttcccagaaagggagaccatttcatctcttcaggttgctcatccaataccatgagcctgagctttgttcttatcttgatacaaagaaaattactccagactcctatgcactcaactggcttggaagtctttttgcatgttactgttccactgaagtcactcaggcaatatgggatggatatctacaacaagcagatccattttttatttatttcttaatgttaattatccttgttaatgcaaaagaagttattttaacacaagagtcagacagcaaagaagaagttatcaagttcttggaaaatactccatccagtctgaatatagaagatatagaagaccttttctctctggctcagtattattgcagcaaaacaccggcttcttttaggaaggataatcaccatctctttggtagtactttgttgggaattaaggatgatgatgcagatctgagtcaggctctttgtctggccatctccgtgtcagagatccttcaagcgaatcagctacaaggggaaggagtccggttctttgtggtggattgccgtcctgcagaacaatataatgctgggcatttatcaactgctttccacttagattcagacctgatgcttcagaatccatctgagtttgcacagtcagtaaaatccttgctggaagcacagaagcagtccattgagtctggctccatagctggtggggagcacctctgttttatgggcagtggcagggaggaagaagacatgtatatgaacatggtcctggcacactttttacagaaaaacaaagaatatgtgagtattgccagtggaggatttatggcactgcagcagcacctggcagacattaatgtggatggaccagaaaatggatatggccattggattgctagtacctcaggctcaaggagcagtatcaattctgttgatggtgaatctcctaatggctcaagtgatagaggaatgaaatcactagtaaataaaatgactgtggctttgaagacaaaatccgttaatgtcagggaaaaagttatcagttttatagagaatacatcaactcctgtggatcgaatgtctttcaatcttccttggccagacagatcatgtacagagcggcatgtgagcagcagtgacagagtgggcaagccttaccgtggcgtaaagcctgttttcagcattggggatgaagaagaatacgacacagatgaaattgacagttcttcaatgtcagatgatgatagaaaagaggttgtaaacattcagacttggataaacaaaccagatgtcaaacatcattttccttgtaaagaagtaaaagaaagtggacacatgtttcccagtcatctgttggttactgcaacacatatgtactgtttaagggagattgtttcacggaaaggattggcttatatacagtctcgacaagcgctgaattctgtagttaaaattacatccaaaaaaaaacatcctgaactcattaccttcaagtatggaaatagcagtgcttcaggaatagaaatcttggcaatcgaaaggtatttgattccaaatgcaggggatgcaactaaagccataaaacagcagatcatgaaagttttggatgctttggaaagttaatataaaagaaaattatataaaaagaaattaagacaaccaagagaaacatggacatatacctcctgactgaatactaactggagacctttcatttgctcatggggctgcttaaatagcaggtctaagaaagtgtaaattattataatcaatctgtggacagtaaactttttaaaaatttttcttctgcattttggttttataaaatgatgtattataaaggtcagttattaaattactttgaagtaactgaccctgtgcccttatggactaagtaagggtacagaatgcagttctgttttgaagagctgttttaagggaacatgcatcactttcgggatcaaaaacaactgtacacatacatatctgcagtgtcttcactgaaaattagagatagaattagttgaagagacttccttaattgctacattgttttactcactgagcaatatcagaaactaaaacatagattaataattcactcactgtttctattcttcttaaaaagagtgaaatctttttaatggaatggttgaagattcctgccaactcaaaatacagtacagctagtaaaatgttgaaacatcagtttctaaatcacctttgctccattagctaattttttggacactaaatgcttcaaagataagaaacttcatcctaatgatttctaaagagcagttaaaagcattaaaataagtaggtaggctgttaagattaaaattaacattttggggacagaattgtgtctgtaaaaatgtcattggttttattacaagcggattattttattcatattttaaaacaaatgtttaagccacattgatttatcctcattgaggattatggtctgtgaccacagtaatatccacttatataaatgccaaataatcagagagcttataaagtacaattgtttttgtcatcattttctgaatttctttctcttcttttggttttgtcctctcattgaagttccagtggtttgaaattagttttggacacattgtcttaatgtactgaaaattgctctgctgtattttgcagcgttcttcatttaatttataatggtccatattagacacatttggtaagagaagtccaggaacacatttagggccatggaatagtattttgtaaaatccatttgggaagttgcaatacccacaatctgacatgtcctaaaatgtaagggattatctctaaggggttgatgggagaaatatttagatgtaccctgttaacagccagtcattttgatttacttatggaaatcaagtgaataaaaggcaacataatttgggaaattttattctaatatctaataaaaacagtttgagtggttgaagacatctgcatgaaattgcacctaggtgcattacttgatataactctcccctaaaactgttgtaattgcattttttcccttttcttggcacccctttagaaatgtactgaagtctcatttttcacccatttcagccatgggacatttttcataatattaatgtaaagatgtttgtgttactgtttataaattacaattgtaaataaattactagtttgcccaaaa

SEQ ID NO: 189529 - DNA, 587 bp, Homo sapiens
  Payload ID: 17425
  Gene Symbol: TBC1D23
  Gene Name: TBC1 domain family, member 23
  ENST ID: ENST00000485687
  CDS Start-End: 20-587
gacgtggacgtcaacagcaatggcggaaggagaagatgtgccgccgctgccaacgtcgagcggcgacggctgggaaaaagatcttgaagaagctctggaagcaggaggttgtgatcttgaaacgttgagaaatataattcaaggaagaccgctgcctgctgatctgagggccaaagtttggaagtcactttttaaatctttcttccagattgctctgaatgttgcaggaaaaggtgatagtttggcatcatgggatggtattttagacttgccagaacagaacactattcacaaagattgcctgcagtttattgaccagctttcagtgccagaggagaaggcagcagaattacttttggatattgaatctgtaattaccttttattgtaaatcacgtaacattaaatatagcacatcccttagctggatacatctactgaaaccattggtgcatcttcaactgccacgcagcgatttatacaactgcttttatgccataatgaataagtacattcccagggattgttcccagaaagggagaccatttcatctcttcaggttgctcatccaataccatgagcctgagc

SEQ ID NO: 189530 - DNA, 2074 bp, Homo sapiens
  Payload ID: 17425
  Gene Symbol: TBC1D23
  Gene Name: TBC1 domain family, member 23
  ENST ID: ENST00000475134
  CDS Start-End: 363-2051
aactaagggtaaaatgagagtaaattgactgtatgaagcctgagatttcccacaagaaaacatgctgtgtataccttggcattacattttggttgctgagaacttttgtttcttagacaagcctttaataggccatgcttataaatgaatcttgaataagaaaaagtatgagataaagttcattttaataaataggacttattttttagggaaaaagatcttgaagaagctctggaagcaggaggttgtgatcttgaaacgttgagaaatataattcaaggaagaccgctgcctgctgatctgagggccaaagtttggaagattgctctgaatgttgcaggaaaaggtgatagtttggcatcatgggatggtattttagacttgccagaacagaacactattcacaaagattgcctgcagtttattgggattgttcccagaaagggagaccatttcatctcttcaggttgctcatccaataccatgagcctgagctttgttcttatcttgatacaaagaaaattactccagactcctatgcactcaactggcttggaagtctttttgcatgttactgttccactgaagtcactcaggcaatatgggatggatatctacaacaagcagatccattttttatttatttcttaatgttaattatccttgttaatgcaaaagaagttattttaacacaagagtcagacagcaaagaagaagttatcaagttcttggaaaatactccatccagtctgaatatagaagatatagaagaccttttctctctggctcagtattattgcagcaaaacaccggcttcttttaggaaggataatcaccatctctttggtagtactttgttgggaattaaggatgatgatgcagatctgagtcaggctctttgtctggccatctccgtgtcagagatccttcaagcgaatcagctacaaggggaaggagtccggttctttgtggtggattgccgtcctgcagaacaatataatgctgggcatttatcaactgctttccacttagattcagacctgatgcttcagaatccatctgagtttgcacagtcagtaaaatccttgctggaagcacagaagcagtccattgagtctggctccatagctggtggggagcacctctgttttatgggcagtggcagggaggaagaagacatgtatatgaacatggtcctggcacactttttacagaaaaacaaagaatatgtgagtattgccagtggaggatttatggcactgcagcagcacctggcagacattaatgtggatggaccagaaaatggatatggccattggattgctagtacctcaggctcaaggagcagtatcaattctgttgatggtgaatctcctaatggctcaagtgatagaggaatgaaatcactagtaaataaaatgactgtggctttgaagacaaaatccgttaatgtcagggaaaaagttatcagttttatagagaatacatcaactcctgtggatcgaatgtctttcaatcttccttggccagacagatcatgtacagagcggcatgtgagcagcagtgacagagtgggcaagccttaccgtggcgtaaagcctgttttcagcattggggatgaagaagaatacgacacagatgaaattgacagttcttcaatgtcagatgatgatagaaaagaggttgtaaacattcagacttggataaacaaaccagatgtcaaacatcattttccttgtaaagaagtaaaagaaagtggacacatgtttcccagtcatctgttggttactgcaacacatatgtactgtttaagggagattgtttcacggaaaggattggcttatatacagtctcgacaagcgctgaattctgtagttaaaattacatccaaaaaaaaacatcctgaactcattaccttcaagtatggaaatagcagtgcttcaggaatagaaatcttggcaatcgaaaggtatttgattccaaatgcaggggatgcaactaaagccataaaacagcagatcatgaaagttttggatgctttggaaagttaatataaaagaaaattatataaaaa

SEQ ID NO: 189531 - DNA, 559 bp, Homo sapiens
  Payload ID: 17425
  Gene Symbol: TBC1D23
  Gene Name: TBC1 domain family, member 23
  ENST ID: ENST00000471098
  CDS Start-End: 47-559
tgaaaaggggcagggcttgaaatgagttaaatattgagaattacagatggaaagcagggaaaaagatcttgaagaagctctggaagcaggaggttgtgatcttgaaacgttgagaaatataattcaaggaagaccgctgcctgctgatctgagggccaaagtttggaagattgctctgaatgttgcaggaaaaggtgatagtttggcatcatgggatggtattttagacttgccagaacagaacactattcacaaagattgcctgcagtttattgaccagctttcagtgccagaggagaaggcagcagaattacttttggatattgaatctgtaattaccttttattgtaaatcacgtaacattaaatatagcacatcccttagctggatacatctactgaaaccattggtgcatcttcaactgccacgcagcgatttatacaactgcttttatgccataatgaataagtacattcccagggattgttcccagaaagggagaccatttcatctcttcaggttgctcatccaataccatgagcctgagctttgttcttat

SEQ ID NO: 189532 - DNA, 4340 bp, Homo sapiens
  Payload ID: 17426
  Gene Symbol: TBC1D24
  Gene Name: TBC1 domain family, member 24
  Uniprot ID: Q9ULP9
  ENST ID: ENST00000293970
  CDS Start-End: 134-1813
agaaagcggcgcgcggagggtgtgagatggcagacaggtttgcaggaaaccctcagaaagggggctggaggatttagccactctgtcctccccttccggcagtccagggcctcctcccgagcacagcggcgctatggactctccaggatacaactgcttcgtggacaaagacaagatggacgctgccatccaggacctggggcccaaggagctgagctgcactgaactgcaggaactgaagcagctggcgcgccagggctactgggcccaaagccacgccctgcggggaaaggtgtaccagcgcctgatccgggacattccctgccgcacggtcacgcctgacgccagcgtgtacagcgacatcgtgggcaagatcgtgggcaagcacagcagcagctgcctgccgctgcccgagttcgtggacaacacgcaggtgcccagctactgcctgaatgcacgcggcgagggggccgtgcgcaagatcctcctgtgcctggccaaccagttccccgacatctccttctgccccgccctgccggccgtggtggccctgctgctgcactacagcatcgacgaggccgagtgcttcgagaaggcctgccgcatcctggcctgcaatgaccccggcaggaggctgatcgaccagagcttcctggcctttgagtcgtcctgcatgacgtttggggacctggtgaacaagtactgccaggcggcccacaagctgatggtggccgtgtcggaggatgtcctgcaggtctatgcggactggcagcgctggctgtttggggagctgcccctctgctacttcgcccgggtctttgacgtcttcctggtggagggctacaaggtgctgtaccgcgtggcgctggccatcctcaagttcttccacaaggtgagggccgggcagccgctggagtcggacagcgtgaagcaggacatccgcacgttcgtcagagacatcgcgaagacggtgtcccctgagaagctgctggagaaagcgttcgccatccgcctcttctcccgcaaggagatccagctcctgcagatggccaatgagaaagccctgaagcagaagggcatcaccgtgaagcagaagagtgtgtcactttctaaaaggcagtttgtacacttggccgtccatgcagagaacttccgctcggagatcgtcagcgtgagggagatgagagacatctggtcctgggtccccgagcgctttgccctgtgccagccccttctgctgttctcctccctgcagcacgggtacagcctggccaggttctacttccagtgtgaaggacatgagcctaccctcttgctcatcaagaccacgcagaaggaggtgtgtggtgcttacctgtccacagactggagtgagagaaataagtttggaggcaaactgggcttctttgggaccggagaatgctttgtgtttaggctgcagcctgaggtgcagcgctacgagtgggtggtgatcaagcaccccgagctgaccaagcccccacccttgatggctgccgagcccaccgccccactcagccactccgcctcctcagaccccgctgaccgcctctcgcccttcctggccgctcgccacttcaacctgccctccaagaccgagtccatgttcatggcggggggcagcgactgcctcatcgtcgggggaggaggcggccaggcgctctacatcgatggggacctgaaccggggccgcacaagccactgcgacaccttcaacaaccagcccctctgctccgagaacttcctcattgctgccgtggaggcctggggcttccaggaccctgacacccagtgacggcctgtgccacggtgactgagccgtggtggggcggtgggccgaggctgggctgccgcctcgggcagcagagagcagatgaaacccccatgtggtaggcagggttgggggacggcaggaccccatggccaagcctggcgttgcctggacctgctgctgcctctacctggggtttgggctgggcttccccagtccacctgcatctgggtcagagctggagggcctgctgtgcccccagccccacccagagctggcataggaagtaccttcctcctccgtggaggcttccatagcccaaggccttgggagtgtctgggtcttgctgcccctgagcctctctaggcagcctgagcccctggggtgggagtacaacggcagtgggaacgtgcagctaagggtgggcctgtggtgccccctgctggtgccgcatagcatcgcgccctcctgagcagggccctgcagcctggctggctggcgactgaatcccagcgtagatcccgagaacagactggcacccttgggcctgccccctggcggaccccaccccctgtcctgggcgtttgccccagttccctccccaggcctcctgggccacctctcacattaacccttcttggctgcctctgaggctcccctgggctgcgtttgggagctgctgggtgggaggaggagggtgggatttgtgctgggctccacccccagggagggtgggagctggagggggatgtcacatgtccttgtgtttctgcagagcctgaagcttttgctgggcctccctgcgtgttcccatctgaagaggtagccccgggagaggccctcagggaccgacccagaccagcaagctccatttccaggggtctgcccagagaagcctggacccagggggcttctcagctcccctcccttccagcccaggcctccttgagctcctgtagcctctgcagctgcccatttcacctctttgtcattgcaatgacctggggcccagggtcacgcccaagcccctctttgtggcatgctcatctcagtgcagccccaactgcttctctgcaccaggccccgtgccctcccctggccctggccacacagcacctccttggccaccttgcatggatgcatgtcctccctctgtccctcttgtggtgctgtggctggccacgtgtcagggttttctgtgagcctctcaccttacagcctttgggcccctgggcccctgccctgcctgagccctgcgctggccagacgcaggtaggtgccaggggaggccttgcctctgggcactatagggggcagccccctgccttgtgacctccctccatgccccatgacctccttcaactcgtcttgagggtctggtcaccacggaggggagaagggagacacagaggcccaagtggctgttctgggaccatggaagcctgggtcacagaggcaggtaccagcagtcctgcccccacccccgtccctgctggcctccagccagtgccacttggagtcccctgcaccgtgccactttccatccccacaccattgcctgctcctcccatggggctttagcctcccctgaccatctgctcatgtagcctctgactgggcgcacagtggtgcaggaggaaggaccgggaaccctgtgtggctttgggcaagctgacaaacccgtctggaactcagtttccccagctgtgaaatggggccagtccccatgccctgctgtcctcctcacaggactgttgagaggctcgcagggggatggggtgaatccctctcacggggagaggtatgggagggaagtcgccactcatctcagcccaccgcagccctccaggcccccgcctgagcccctgaggccctcatctgtaccgccagctttggtgttcattaaacatggtcttgctgcatcaactccagggctccaagctgagtctgatctcttcagccagaggggcctccgggggcttcctgggcctacagccaagcaggtgtgggaggctgcccgctgtagtgctcacccacattctatgactggaatgctgcaagcctcttccagagggagccctccaggagcagggaagtcatatccgtggaccatttgtaggtttccctctgcaaacttcctgaactgggtggtgatttttctggcgagttaagtccagcaggttctgcgtggctgcccccagggggccccacccgggccttccagtgatctggaccaggaagacggattgctgctgggtcatgatttccacatcatgagcgaagttctttgttttttgtgtgcatgcaaaatattgtttctttaaatttaatatcttttcctaacttttctactaacctagaaggtatgtgtgattattatcttttttattcttatcactgtacttgttagtatctgatattaggtattcccaaatagaacataatttattttgttaatgttctctatttcttcttgattatttattagctttggatgttaaaaattagccaaaagtggctgctctgcctatgaagtagccattctttgttt

SEQ ID NO: 189533 - DNA, 6578 bp, Homo sapiens
  Payload ID: 17426
  Gene Symbol: TBC1D24
  Gene Name: TBC1 domain family, member 24
  Uniprot ID: Q9ULP9
  ENST ID: ENST00000567020
  CDS Start-End: 141-1802
gctgaggagaaagcggcgcgcggagggtgtgagatggcagacaggtttgcaggaaaccctcagaaagggggctggaggatttagccactctgtcctccccttccggcagtccagggcctcctcccgagcacagcggcgctatggactctccaggatacaactgcttcgtggacaaagacaagatggacgctgccatccaggacctggggcccaaggagctgagctgcactgaactgcaggaactgaagcagctggcgcgccagggctactgggcccaaagccacgccctgcggggaaaggtgtaccagcgcctgatccgggacattccctgccgcacggtcacgcctgacgccagcgtgtacagcgacatcgtgggcaagatcgtgggcaagcacagcagcagctgcctgccgctgcccgagttcgtggacaacacgcaggtgcccagctactgcctgaatgcacgcggcgagggggccgtgcgcaagatcctcctgtgcctggccaaccagttccccgacatctccttctgccccgccctgccggccgtggtggccctgctgctgcactacagcatcgacgaggccgagtgcttcgagaaggcctgccgcatcctggcctgcaatgaccccggcaggaggctgatcgaccagagcttcctggcctttgagtcgtcctgcatgacgtttggggacctggtgaacaagtactgccaggcggcccacaagctgatggtggccgtgtcggaggatgtcctgcaggtctatgcggactggcagcgctggctgtttggggagctgcccctctgctacttcgcccgggtctttgacgtcttcctggtggagggctacaaggtgctgtaccgcgtggcgctggccatcctcaagttcttccacaaggtgagggccgggcagccgctggagtcggacagcgtgaagcaggacatccgcacgttcgtcagagacatcgcgaagacggtgtcccctgagaagctgctggagaaagcgttcgccatccgcctcttctcccgcaaggagatccagctcctgcagatggccaatgagaaagccctgaagcagaagggcatcaccgtgaagcagaagaggcagtttgtacacttggccgtccatgcagagaacttccgctcggagatcgtcagcgtgagggagatgagagacatctggtcctgggtccccgagcgctttgccctgtgccagccccttctgctgttctcctccctgcagcacgggtacagcctggccaggttctacttccagtgtgaaggacatgagcctaccctcttgctcatcaagaccacgcagaaggaggtgtgtggtgcttacctgtccacagactggagtgagagaaataagtttggaggcaaactgggcttctttgggaccggagaatgctttgtgtttaggctgcagcctgaggtgcagcgctacgagtgggtggtgatcaagcaccccgagctgaccaagcccccacccttgatggctgccgagcccaccgccccactcagccactccgcctcctcagaccccgctgaccgcctctcgcccttcctggccgctcgccacttcaacctgccctccaagaccgagtccatgttcatggcggggggcagcgactgcctcatcgtcgggggaggaggcggccaggcgctctacatcgatggggacctgaaccggggccgcacaagccactgcgacaccttcaacaaccagcccctctgctccgagaacttcctcattgctgccgtggaggcctggggcttccaggaccctgacacccagtgacggcctgtgccacggtgactgagccgtggtggggcggtgggccgaggctgggctgccgcctcgggcagcagagagcagatgaaacccccatgtggtaggcagggttgggggacggcaggaccccatggccaagcctggcgttgcctggacctgctgctgcctctacctggggtttgggctgggcttccccagtccacctgcatctgggtcagagctggagggcctgctgtgcccccagccccacccagagctggcataggaagtaccttcctcctccgtggaggcttccatagcccaaggccttgggagtgtctgggtcttgctgcccctgagcctctctaggcagcctgagcccctggggtgggagtacaacggcagtgggaacgtgcagctaagggtgggcctgtggtgccccctgctggtgccgcatagcatcgcgccctcctgagcagggccctgcagcctggctggctggcgactgaatcccagcgtagatcccgagaacagactggcacccttgggcctgccccctggcggaccccaccccctgtcctgggcgtttgccccagttccctccccaggcctcctgggccacctctcacattaacccttcttggctgcctctgaggctcccctgggctgcgtttgggagctgctgggtgggaggaggagggtgggatttgtgctgggctccacccccagggagggtgggagctggagggggatgtcacatgtccttgtgtttctgcagagcctgaagcttttgctgggcctccctgcgtgttcccatctgaagaggtagccccgggagaggccctcagggaccgacccagaccagcaagctccatttccaggggtctgcccagagaagcctggacccagggggcttctcagctcccctcccttccagcccaggcctccttgagctcctgtagcctctgcagctgcccatttcacctctttgtcattgcaatgacctggggcccagggtcacgcccaagcccctctttgtggcatgctcatctcagtgcagccccaactgcttctctgcaccaggccccgtgccctcccctggccctggccacacagcacctccttggccaccttgcatggatgcatgtcctccctctgtccctcttgtggtgctgtggctggccacgtgtcagggttttctgtgagcctctcaccttacagcctttgggcccctgggcccctgccctgcctgagccctgcgctggccagacgcaggtaggtgccaggggaggccttgcctctgggcactatagggggcagccccctgccttgtgacctccctccatgccccatgacctccttcaactcgtcttgagggtctggtcaccacggaggggagaagggagacacagaggcccaagtggctgttctgggaccatggaagcctgggtcacagaggcaggtaccagcagtcctgcccccacccccgtccctgctggcctccagccagtgccacttggagtcccctgcaccgtgccactttccatccccacaccattgcctgctcctcccatggggctttagcctcccctgaccatctgctcatgtagcctctgactgggcgcacagtggtgcaggaggaaggaccgggaaccctgtgtggctttgggcaagctgacaaacccgtctggaactcagtttccccagctgtgaaatggggccagtccccatgccctgctgtcctcctcacaggactgttgagaggctcgcagggggatggggtgaatccctctcacggggagaggtatgggagggaagtcgccactcatctcagcccaccgcagccctccaggcccccgcctgagcccctgaggccctcatctgtaccgccagctttggtgttcattaaacatggtcttgctgcatcaactccagggctccaagctgagtctgatctcttcagccagaggggcctccgggggcttcctgggcctacagccaagcaggtgtgggaggctgcccgctgtagtgctcacccacattctatgactggaatgctgcaagcctcttccagagggagccctccaggagcagggaagtcatatccgtggaccatttgtaggtttccctctgcaaacttcctgaactgggtggtgatttttctggcgagttaagtccagcaggttctgcgtggctgcccccagggggccccacccgggccttccagtgatctggaccaggaagacggattgctgctgggtcatgatttccacatcatgagcgaagttctttgttttttgtgtgcatgcaaaatattgtttctttaaatttaatatcttttcctaacttttctactaacctagaaggtatgtgtgattattatcttttttattcttatcactgtacttgttagtatctgatattaggtattcccaaatagaacataatttattttgttaatgttctctatttcttcttgattatttattagctttggatgttaaaaattagccaaaagtggctgctctgcctatgaagtagccattctttgtttaaaaaaaaaaaaagccaacatttgttgaaactgcataataaattatcatttgtttttagaaacattcaaagaattattttttgattttttttttttttgggacagagtcacccaggctggagtgcagtggcatgatcttggctcactgcaacctccgcctcctgggttcaagcgattctcctgcctcagcctcctgagtagctgggattacaggcatacgccaccacgcccagctaaattttttttgtatttttagtagaggcagggtttcactgtgttggtcaggctggtcttgaactcctgacctcgtgatccacccccccctcagcctcccaaagtgctgggattacaggcgtgagccaccgcgcctagcctattttttaatttttttgaatagaccactttgtgctgaataaatgtttaacatttatttttaaaacaacaattgcacctaatttaaaatagtttattaaatgaattcattaaagcagattatatgcctttggggcttcagaaaatcagtttaagcaaaagaacttatgagagtaagtcatttgtacttgaattttttcagagttttaatgaactaaagtattttaatttttctatttttgtaagccgcatacttcattttttgagtttttcagtggaatttgttttaaaacgttttgaagatttcagaggccttcatatttctcttatccactttctgaacccataaagcctttgcagtctccttgagtagtttatatttagtaatttagttgtgtacctttttattttgaagtaatttttgatttgcagaagagttgcagagacggtacagggtttccatgtaccctcaccttcccccaagtcaatatcaaaacaaagaaataagcattgttgcattgctgttaactaaaccacaggcctattgagattgtcccttttttttttttttttttttttgagacagagtctcgctctgtcgcccaggctggagtgcagtggcgcgatctcggctcaccgcaagccccgcctcccggattcacgccattctcctgcctcagcctcctgagtagctgggactacaggcacctgctaccacacccggctaatttttttatatttttagtagagatggggtttcaccgtgttagccaggatggtcttgatctcctgacctcgtgatctgccctcctcggcctcccaaagtgctgggattacaggcgtgagcaaccgcgcccagccgagattgccccgtttttttcccactgtccaggaatcgatttaatttttacagttgtttactttctcacatttttactaagtccagaatatcatcaaactcacaaaaccactggtcaaaaaaacccaaatggccactaattaggcaatacagcacctgcctcaaatttgggttcatatagatttttttcctccctttttgtggagaacatagtcttgctgtgttgcccaggctagtcttgaactcctggactcaagcaatcctcccgcctctgcctccctaaattctgggattacaggcgtgagctgctgtgcccagctcatccagattcttgctggttctctttctcagcctaaatgtcttgtttgcgtggagaaattatcaaatgaagcaggagtgccaaacaagcctcataggctcttcaccctacaacatctatgttaggtagaaaagtatgtggatttttaaaaatcatctggtataaagagtttttaagaactatcttcatcatcttagtatcagattgtgcttgagaagttaggtacaatgtaatgtgattcattgctaaaaacaaaatgcctcccacaattgcagactcactcattttaccaaactatggaatttgtcaacaccttttcttgggaccaaggaagcaaagtcagtggataccgtgtcctgtagacatgtcacttgtgataaggcacggacaacatgaactggcaaaaacattggcatttggtcaaatgcttatgagctaaggatagaagggaaaaaatagttgtgtgaatgattttacctcttagttcttacgaaggatggttatcgggctggaaaaatgtttattggactgatgctttggagcctctcaatgaatgtaataaaaaaaatgtgtagtgagcacaaatgtatggatttgcagcacaatccaactttgaaaatgtgaaaataagtgagttagtgatatgtttggttggtgttaatttgagtcctaaataaaatcgagaactggtaaaagaag

SEQ ID NO: 189534 - DNA, 571 bp, Homo sapiens
  Payload ID: 17426
  Gene Symbol: TBC1D24
  Gene Name: TBC1 domain family, member 24
  ENST ID: ENST00000569874
  CDS Start-End: 1-60
gagaacttcctcattgctgccgtggaggcctggggcttccaggaccctgacacccagtgacggcctgtgccacggtgactgagccgtggtggggcggtgggccgaggctgggctgccgcctcgggcagcagagagcagatgaaacccccatgtgagcctgaagcttttgctgggcctccctgcgtgttcccatctgaagaggtagccccgggagaggccctcagggaccgacccagaccagcaagctccatttccaggggtctgcccagagaagcctggacccagggggcttctcagctcccctcccttccagcccaggcctccttgagctcctgtagcctctgcagctgcccatttcacctctttgtcattgcaatgacctggggcccagggtcacgcccaagcccctctttgtggcatgctcatctcagtgcagccccaactgcttctctgcaccaggccccgtgccctcccctggccctggccacacagcacctccttggccaccttgcatggatgcatgtcctccctctgtccctcttgtggtgctgtggctggccacgtgtcaggg

SEQ ID NO: 189535 - DNA, 5324 bp, Homo sapiens
  Payload ID: 17426
  Gene Symbol: TBC1D24
  Gene Name: TBC1 domain family, member 24
  ENST ID: ENST00000564879
  CDS Start-End: 1-208
ggtccccgagcgctttgccctgtgccagccccttctgctgttctcctccctgcagcacgggtacagcctggccaggtgtgtggtgcttacctgtccacagactggagtgagagaaataagtttggaggcaaactgggcttctttgggaccggagaatgctttgtgtttaggctgcagcctgaggtgcagcgctacgagtgggtggtgatcaagcaccccgagctgaccaagcccccacccttgatggctgccgagcccaccgccccactcagccactccgcctcctcagaccccgctgaccgcctctcgcccttcctggccgctcgccacttcaacctgccctccaagaccgagtccatgttcatggcggggggcagcgactgcctcatcgtcgggggaggaggcggccaggcgctctacatcgatggggacctgaaccggggccgcacaagccactgcgacaccttcaacaaccagcccctctgctccgagaacttcctcattgctgccgtggaggcctggggcttccaggaccctgacacccagtgacggcctgtgccacggtgactgagccgtggtggggcggtgggccgaggctgggctgccgcctcgggcagcagagagcagatgaaacccccatgtggtaggcagggttgggggacggcaggaccccatggccaagcctggcgttgcctggacctgctgctgcctctacctggggtttgggctgggcttccccagtccacctgcatctgggtcagagctggagggcctgctgtgcccccagccccacccagagctggcataggaagtaccttcctcctccgtggaggcttccatagcccaaggccttgggagtgtctgggtcttgctgcccctgagcctctctaggcagcctgagcccctggggtgggagtacaacggcagtgggaacgtgcagctaagggtgggcctgtggtgccccctgctggtgccgcatagcatcgcgccctcctgagcagggccctgcagcctggctggctggcgactgaatcccagcgtagatcccgagaacagactggcacccttgggcctgccccctggcggaccccaccccctgtcctgggcgtttgccccagttccctccccaggcctcctgggccacctctcacattaacccttcttggctgcctctgaggctcccctgggctgcgtttgggagctgctgggtgggaggaggagggtgggatttgtgctgggctccacccccagggagggtgggagctggagggggatgtcacatgtccttgtgtttctgcagagcctgaagcttttgctgggcctccctgcgtgttcccatctgaagaggtagccccgggagaggccctcagggaccgacccagaccagcaagctccatttccaggggtctgcccagagaagcctggacccagggggcttctcagctcccctcccttccagcccaggcctccttgagctcctgtagcctctgcagctgcccatttcacctctttgtcattgcaatgacctggggcccagggtcacgcccaagcccctctttgtggcatgctcatctcagtgcagccccaactgcttctctgcaccaggccccgtgccctcccctggccctggccacacagcacctccttggccaccttgcatggatgcatgtcctccctctgtccctcttgtggtgctgtggctggccacgtgtcagggttttctgtgagcctctcaccttacagcctttgggcccctgggcccctgccctgcctgagccctgcgctggccagacgcaggtaggtgccaggggaggccttgcctctgggcactatagggggcagccccctgccttgtgacctccctccatgccccatgacctccttcaactcgtcttgagggtctggtcaccacggaggggagaagggagacacagaggcccaagtggctgttctgggaccatggaagcctgggtcacagaggcaggtaccagcagtcctgcccccacccccgtccctgctggcctccagccagtgccacttggagtcccctgcaccgtgccactttccatccccacaccattgcctgctcctcccatggggctttagcctcccctgaccatctgctcatgtagcctctgactgggcgcacagtggtgcaggaggaaggaccgggaaccctgtgtggctttgggcaagctgacaaacccgtctggaactcagtttccccagctgtgaaatggggccagtccccatgccctgctgtcctcctcacaggactgttgagaggctcgcagggggatggggtgaatccctctcacggggagaggtatgggagggaagtcgccactcatctcagcccaccgcagccctccaggcccccgcctgagcccctgaggccctcatctgtaccgccagctttggtgttcattaaacatggtcttgctgcatcaactccagggctccaagctgagtctgatctcttcagccagaggggcctccgggggcttcctgggcctacagccaagcaggtgtgggaggctgcccgctgtagtgctcacccacattctatgactggaatgctgcaagcctcttccagagggagccctccaggagcagggaagtcatatccgtggaccatttgtaggtttccctctgcaaacttcctgaactgggtggtgatttttctggcgagttaagtccagcaggttctgcgtggctgcccccagggggccccacccgggccttccagtgatctggaccaggaagacggattgctgctgggtcatgatttccacatcatgagcgaagttctttgttttttgtgtgcatgcaaaatattgtttctttaaatttaatatcttttcctaacttttctactaacctagaaggtatgtgtgattattatcttttttattcttatcactgtacttgttagtatctgatattaggtattcccaaatagaacataatttattttgttaatgttctctatttcttcttgattatttattagctttggatgttaaaaattagccaaaagtggctgctctgcctatgaagtagccattctttgtttaaaaaaaaaaaaagccaacatttgttgaaactgcataataaattatcatttgtttttagaaacattcaaagaattattttttgattttttttttttttgggacagagtcacccaggctggagtgcagtggcatgatcttggctcactgcaacctccgcctcctgggttcaagcgattctcctgcctcagcctcctgagtagctgggattacaggcatacgccaccacgcccagctaaattttttttgtatttttagtagaggcagggtttcactgtgttggtcaggctggtcttgaactcctgacctcgtgatccacccccccctcagcctcccaaagtgctgggattacaggcgtgagccaccgcgcctagcctattttttaatttttttgaatagaccactttgtgctgaataaatgtttaacatttatttttaaaacaacaattgcacctaatttaaaatagtttattaaatgaattcattaaagcagattatatgcctttggggcttcagaaaatcagtttaagcaaaagaacttatgagagtaagtcatttgtacttgaattttttcagagttttaatgaactaaagtattttaatttttctatttttgtaagccgcatacttcattttttgagtttttcagtggaatttgttttaaaacgttttgaagatttcagaggccttcatatttctcttatccactttctgaacccataaagcctttgcagtctccttgagtagtttatatttagtaatttagttgtgtacctttttattttgaagtaatttttgatttgcagaagagttgcagagacggtacagggtttccatgtaccctcaccttcccccaagtcaatatcaaaacaaagaaataagcattgttgcattgctgttaactaaaccacaggcctattgagattgtcccttttttttttttttttttttttgagacagagtctcgctctgtcgcccaggctggagtgcagtggcgcgatctcggctcaccgcaagccccgcctcccggattcacgccattctcctgcctcagcctcctgagtagctgggactacaggcacctgctaccacacccggctaatttttttatatttttagtagagatggggtttcaccgtgttagccaggatggtcttgatctcctgacctcgtgatctgccctcctcggcctcccaaagtgctgggattacaggcgtgagcaaccgcgcccagccgagattgccccgtttttttcccactgtccaggaatcgatttaatttttacagttgtttactttctcacatttttactaagtccagaatatcatcaaactcacaaaaccactggtcaaaaaaacccaaatggccactaattaggcaatacagcacctgcctcaaatttgggttcatatagatttttttcctccctttttgtggagaacatagtcttgctgtgttgcccaggctagtcttgaactcctggactcaagcaatcctcccgcctctgcctccctaaattctgggattacaggcgtgagctgctgtgcccagctcatccagattcttgctggttctctttctcagcctaaatgtcttgtttgcgtggagaaattatcaaatgaagcaggagtgccaaacaagcctcataggctcttcaccctacaacatctatgttaggtagaaaagtatgtggatttttaaaaatcatctggtataaagagtttttaagaactatcttcatcatcttagtatcagattgtgcttgagaagttaggtacaatgtaatgtgattcattgctaaaaacaaaatgcctcccacaattgcagactcactcattttaccaaactatggaatttgtcaacaccttttcttgggaccaaggaagcaaagtcagtggataccgtgtcctgtagacatgtcacttgtgataaggcacggacaacatgaactggcaaaaacattggcatttggtcaaatgcttatgagctaaggatagaagggaaaaaatagttgtgtgaatgattttacctcttagttcttacgaaggatggttatcgggctggaaaaatgtttattggactgatgctttggagcctctcaatgaatgtaataaaaaaaatgtgtagtgagcacaaatgtatggatttgcagcacaatccaactttgaaaatgtgaaaataagtgagttagtgatatgtttggttggtgttaatttgagtcctaaataaaatcgagaactggtaaaagaa

SEQ ID NO: 189536 - DNA, 344 bp, Homo sapiens
  Payload ID: 17426
  Gene Symbol: TBC1D24
  Gene Name: TBC1 domain family, member 24
  ENST ID: ENST00000562105
  CDS Start-End: 184-344
gtgtttggggcctgctgtcacagcactgggagccttggagagagatggggagctgggatccccaggagggtgtgagatggcagacaggtttgcaggaaaccctcagaaagggggctggaggatttagccactctgtcctccccttccggcagtccagggcctcctcccgagcacagcggcgctatggactctccaggatacaactgcttcgtggacaaagacaagatggacgctgccatccaggacctggggcccaaggagctgagctgcactgaactgcaggaactgaagcagctggcgcgccagggctactgggcccaaagccacgccctgcggggaaaggt

SEQ ID NO: 189537 - DNA, 4382 bp, Homo sapiens
  Payload ID: 17426
  Gene Symbol: TBC1D24
  Gene Name: TBC1 domain family, member 24
  Uniprot ID: Q9ULP9
  ENST ID: ENST00000627285
  CDS Start-End: 226-1887
gtgaatgttctagctgcaagagaaaccggagtggtctggtcactcaaccaaaacctgctgaagcagacccctggggcacactgggaacttctaccatcccaggtggaaagggtgtgagatggcagacaggtttgcaggaaaccctcagaaagggggctggaggatttagccactctgtcctccccttccggcagtccagggcctcctcccgagcacagcggcgctatggactctccaggatacaactgcttcgtggacaaagacaagatggacgctgccatccaggacctggggcccaaggagctgagctgcactgaactgcaggaactgaagcagctggcgcgccagggctactgggcccaaagccacgccctgcggggaaaggtgtaccagcgcctgatccgggacattccctgccgcacggtcacgcctgacgccagcgtgtacagcgacatcgtgggcaagatcgtgggcaagcacagcagcagctgcctgccgctgcccgagttcgtggacaacacgcaggtgcccagctactgcctgaatgcacgcggcgagggggccgtgcgcaagatcctcctgtgcctggccaaccagttccccgacatctccttctgccccgccctgccggccgtggtggccctgctgctgcactacagcatcgacgaggccgagtgcttcgagaaggcctgccgcatcctggcctgcaatgaccccggcaggaggctgatcgaccagagcttcctggcctttgagtcgtcctgcatgacgtttggggacctggtgaacaagtactgccaggcggcccacaagctgatggtggccgtgtcggaggatgtcctgcaggtctatgcggactggcagcgctggctgtttggggagctgcccctctgctacttcgcccgggtctttgacgtcttcctggtggagggctacaaggtgctgtaccgcgtggcgctggccatcctcaagttcttccacaaggtgagggccgggcagccgctggagtcggacagcgtgaagcaggacatccgcacgttcgtcagagacatcgcgaagacggtgtcccctgagaagctgctggagaaagcgttcgccatccgcctcttctcccgcaaggagatccagctcctgcagatggccaatgagaaagccctgaagcagaagggcatcaccgtgaagcagaagaggcagtttgtacacttggccgtccatgcagagaacttccgctcggagatcgtcagcgtgagggagatgagagacatctggtcctgggtccccgagcgctttgccctgtgccagccccttctgctgttctcctccctgcagcacgggtacagcctggccaggttctacttccagtgtgaaggacatgagcctaccctcttgctcatcaagaccacgcagaaggaggtgtgtggtgcttacctgtccacagactggagtgagagaaataagtttggaggcaaactgggcttctttgggaccggagaatgctttgtgtttaggctgcagcctgaggtgcagcgctacgagtgggtggtgatcaagcaccccgagctgaccaagcccccacccttgatggctgccgagcccaccgccccactcagccactccgcctcctcagaccccgctgaccgcctctcgcccttcctggccgctcgccacttcaacctgccctccaagaccgagtccatgttcatggcggggggcagcgactgcctcatcgtcgggggaggaggcggccaggcgctctacatcgatggggacctgaaccggggccgcacaagccactgcgacaccttcaacaaccagcccctctgctccgagaacttcctcattgctgccgtggaggcctggggcttccaggaccctgacacccagtgacggcctgtgccacggtgactgagccgtggtggggcggtgggccgaggctgggctgccgcctcgggcagcagagagcagatgaaacccccatgtggtaggcagggttgggggacggcaggaccccatggccaagcctggcgttgcctggacctgctgctgcctctacctggggtttgggctgggcttccccagtccacctgcatctgggtcagagctggagggcctgctgtgcccccagccccacccagagctggcataggaagtaccttcctcctccgtggaggcttccatagcccaaggccttgggagtgtctgggtcttgctgcccctgagcctctctaggcagcctgagcccctggggtgggagtacaacggcagtgggaacgtgcagctaagggtgggcctgtggtgccccctgctggtgccgcatagcatcgcgccctcctgagcagggccctgcagcctggctggctggcgactgaatcccagcgtagatcccgagaacagactggcacccttgggcctgccccctggcggaccccaccccctgtcctgggcgtttgccccagttccctccccaggcctcctgggccacctctcacattaacccttcttggctgcctctgaggctcccctgggctgcgtttgggagctgctgggtgggaggaggagggtgggatttgtgctgggctccacccccagggagggtgggagctggagggggatgtcacatgtccttgtgtttctgcagagcctgaagcttttgctgggcctccctgcgtgttcccatctgaagaggtagccccgggagaggccctcagggaccgacccagaccagcaagctccatttccaggggtctgcccagagaagcctggacccagggggcttctcagctcccctcccttccagcccaggcctccttgagctcctgtagcctctgcagctgcccatttcacctctttgtcattgcaatgacctggggcccagggtcacgcccaagcccctctttgtggcatgctcatctcagtgcagccccaactgcttctctgcaccaggccccgtgccctcccctggccctggccacacagcacctccttggccaccttgcatggatgcatgtcctccctctgtccctcttgtggtgctgtggctggccacgtgtcagggttttctgtgagcctctcaccttacagcctttgggcccctgggcccctgccctgcctgagccctgcgctggccagacgcaggtaggtgccaggggaggccttgcctctgggcactatagggggcagccccctgccttgtgacctccctccatgccccatgacctccttcaactcgtcttgagggtctggtcaccacggaggggagaagggagacacagaggcccaagtggctgttctgggaccatggaagcctgggtcacagaggcaggtaccagcagtcctgcccccacccccgtccctgctggcctccagccagtgccacttggagtcccctgcaccgtgccactttccatccccacaccattgcctgctcctcccatggggctttagcctcccctgaccatctgctcatgtagcctctgactgggcgcacagtggtgcaggaggaaggaccgggaaccctgtgtggctttgggcaagctgacaaacccgtctggaactcagtttccccagctgtgaaatggggccagtccccatgccctgctgtcctcctcacaggactgttgagaggctcgcagggggatggggtgaatccctctcacggggagaggtatgggagggaagtcgccactcatctcagcccaccgcagccctccaggcccccgcctgagcccctgaggccctcatctgtaccgccagctttggtgttcattaaacatggtcttgctgcatcaactccagggctccaagctgagtctgatctcttcagccagaggggcctccgggggcttcctgggcctacagccaagcaggtgtgggaggctgcccgctgtagtgctcacccacattctatgactggaatgctgcaagcctcttccagagggagccctccaggagcagggaagtcatatccgtggaccatttgtaggtttccctctgcaaacttcctgaactgggtggtgatttttctggcgagttaagtccagcaggttctgcgtggctgcccccagggggccccacccgggccttccagtgatctggaccaggaagacggattgctgctgggtcatgatttccacatcatgagcgaagttctttgttttttgtgtgcatgcaaaatattgtttctttaaatttaatatcttttcctaacttttctactaacctagaaggtatgtgtgattattatcttttttattcttatcactgtacttgttagtatctgatattaggtattcccaaatagaacataatttattttgttaatgttctctatttcttcttgattatttattagctttggatgttaaaaattagccaaaagtggc

SEQ ID NO: 189538 - DNA, 4180 bp, Homo sapiens
  Payload ID: 17426
  Gene Symbol: TBC1D24
  Gene Name: TBC1 domain family, member 24
  ENST ID: ENST00000630263
  CDS Start-End: 195-1214
cgcgtgcgcagaaaggccggcgcggcaggctgaggagaaagcggcgcgcggaggtgaatgttctagctgcaagagaaaccggagtggtctggtcactcaaccaaaacctgctgaagcagacccctggggcacactgggaacttctaccatcccaggtggaaagtccagggcctcctcccgagcacagcggcgctatggactctccaggatacaactgcttcgtggacaaagacaagatggacgctgccatccaggacctggggcccaaggagctgagctgcactgaactgcaggaactgaagcagctggcgcgccagggctactgggcccaaagccacgccctgcggggaaaggtgtaccagcgcctgatccgggacattccctgccgcacggtcacgcctgacgccagcgtgtacagcgacatcgtgggcaagatcgtgggcaagcacagcagcagctgcctgccgctgcccgagttcgtggacaacacgcaggtgcccagctactgcctgaatgcacgcggcgagggggccgtgcgcaagatcctcctgtgcctggccaaccagttccccgacatctccttctgccccgccctgccggccgtggtggccctgctgctgcactacagcatcgacgaggccgagtgcttcgagaaggcctgccgcatcctggcctgcaatgaccccggcaggaggctgatcgaccagagcttcctggcctttgagtcgtcctgcatgacgtttggggacctggtgaacaagtactgccaggcggcccacaagctgatggtggccgtgtcggaggatgtcctgcaggtctatgcggactggcagcgctggctgtttggggagctgcccctctgctacttcgcccgggtctttgacgtcttcctggtggagggctacaaggtgctgtaccgcgtggcgctggccatcctcaagttcttccacaaggtgagggccgggcagccgctggagtcggacagcgtgaagcaggacatccgcacgttcgtcagagacatcgcgaagacggtgtcccctgagaagctgctggagaaagcgttcgccatccgcctcttctcccgcaaggagatccagctcctgcagatggccaatgagaaagccctgaagcagaagggcatcaccgtgaagcagaagagtttgtacacttggccgtccatgcagagaacttccgctcggagatcgtcagcgtgagggagatgagagacatctggtcctgggtccccgagcgctttgccctgtgccagccccttctgctgttctcctccctgcagcacgggtacagcctggccaggttctacttccagtgtgaaggacatgagcctaccctcttgctcatcaagaccacgcagaaggaggtgtgtggtgcttacctgtccacagactggagtgagagaaataagtttggaggcaaactgggcttctttgggaccggagaatgctttgtgtttaggctgcagcctgaggtgcagcgctacgagtgggtggtgatcaagcaccccgagctgaccaagcccccacccttgatggctgccgagcccaccgccccactcagccactccgcctcctcagaccccgctgaccgcctctcgcccttcctggccgctcgccacttcaacctgccctccaagaccgagtccatgttcatggcggggggcagcgactgcctcatcgtcgggggaggaggcggccaggcgctctacatcgatggggacctgaaccggggccgcacaagccactgcgacaccttcaacaaccagcccctctgctccgagaacttcctcattgctgccgtggaggcctggggcttccaggaccctgacacccagtgacggcctgtgccacggtgactgagccgtggtggggcggtgggccgaggctgggctgccgcctcgggcagcagagagcagatgaaacccccatgtggtaggcagggttgggggacggcaggaccccatggccaagcctggcgttgcctggacctgctgctgcctctacctggggtttgggctgggcttccccagtccacctgcatctgggtcagagctggagggcctgctgtgcccccagccccacccagagctggcataggaagtaccttcctcctccgtggaggcttccatagcccaaggccttgggagtgtctgggtcttgctgcccctgagcctctctaggcagcctgagcccctggggtgggagtacaacggcagtgggaacgtgcagctaagggtgggcctgtggtgccccctgctggtgccgcatagcatcgcgccctcctgagcagggccctgcagcctggctggctggcgactgaatcccagcgtagatcccgagaacagactggcacccttgggcctgccccctggcggaccccaccccctgtcctgggcgtttgccccagttccctccccaggcctcctgggccacctctcacattaacccttcttggctgcctctgaggctcccctgggctgcgtttgggagctgctgggtgggaggaggagggtgggatttgtgctgggctccacccccagggagggtgggagctggagggggatgtcacatgtccttgtgtttctgcagagcctgaagcttttgctgggcctccctgcgtgttcccatctgaagaggtagccccgggagaggccctcagggaccgacccagaccagcaagctccatttccaggggtctgcccagagaagcctggacccagggggcttctcagctcccctcccttccagcccaggcctccttgagctcctgtagcctctgcagctgcccatttcacctctttgtcattgcaatgacctggggcccagggtcacgcccaagcccctctttgtggcatgctcatctcagtgcagccccaactgcttctctgcaccaggccccgtgccctcccctggccctggccacacagcacctccttggccaccttgcatggatgcatgtcctccctctgtccctcttgtggtgctgtggctggccacgtgtcagggttttctgtgagcctctcaccttacagcctttgggcccctgggcccctgccctgcctgagccctgcgctggccagacgcaggtaggtgccaggggaggccttgcctctgggcactatagggggcagccccctgccttgtgacctccctccatgccccatgacctccttcaactcgtcttgagggtctggtcaccacggaggggagaagggagacacagaggcccaagtggctgttctgggaccatggaagcctgggtcacagaggcaggtaccagcagtcctgcccccacccccgtccctgctggcctccagccagtgccacttggagtcccctgcaccgtgccactttccatccccacaccattgcctgctcctcccatggggctttagcctcccctgaccatctgctcatgtagcctctgactgggcgcacagtggtgcaggaggaaggaccgggaaccctgtgtggctttgggcaagctgacaaacccgtctggaactcagtttccccagctgtgaaatggggccagtccccatgccctgctgtcctcctcacaggactgttgagaggctcgcagggggatggggtgaatccctctcacggggagaggtatgggagggaagtcgccactcatctcagcccaccgcagccctccaggcccccgcctgagcccctgaggccctcatctgtaccgccagctttggtgttcattaaacatggtcttgctgcatcaactccagggctccaagctgagtctgatctcttcagccagaggggcctccgggggcttcctgggcctacagccaagcaggtgtgggaggctgcccgctgtagtgctcacccacattctatgactggaatgctgcaagcctcttccagagggagccctccaggagcagggaagtcatatccgtggaccatttgtaggtttccctctgcaaacttcctgaactgggtggtgatttttctggcgagttaagtccagcaggttctgcgtggctgcccccagggggccccacccgggccttccagtgatctggaccaggaagacggattgctgctgggtcatgatttccacatcatgagcgaagttctttgttttttgtgtgcatgcaaaatattgtttctttaaatttaatatcttttcctaacttttctac

SEQ ID NO: 189539 - DNA, 4042 bp, Homo sapiens
  Payload ID: 17427
  Gene Symbol: TBC1D25
  Gene Name: TBC1 domain family, member 25
  Uniprot ID: Q3MII6
  ENST ID: ENST00000376771
  CDS Start-End: 342-2408
cgtcagtttaacacctccgtgaatccggaagtatgctgtcaaaacaaccaaaccacggggctgggggaggcggggcctcagtaggcgtctgcacgctagctgaaatagagcaaaatgcccgacttttgggggcggggctcctggcaacagcactctaggcgcaggcgcagaggcgacctccaggcagggccaggtgggagggacggtggggggtagggtcgcgcggcgccctctgcgcctgcgccccggcacgaggtggggcggcgggcgtcagtacagtagagtgtgcgccggggtggggggcaacggtcagccgtcaccctgagacgggcggcggcgggatggcaacagcctccggggcctcggacttgtctggctccggagcgcccccgcccggtgtgggagctcaggcggcggcggccgctgaggaggaggagcgagaggtggtgcgggtccgagtcaagaaatgtgagagcttcttgccgccagagttccgctcttttgctgtagatccccagatcacctcgctcgacgtgttgcagcacatcctcatccgagcctttgatttgagtgggaagaagaactttggcatcagctacctgggccgggaccggctaggacaggaagtttacctctcacttctatctgactgggacctcagcacagcctttgccactgcctccaaaccttacctgcaattgcgtgtagatattcggccctcggaggacagcccattgctagaagactgggacataatcagccccaaagatgtcattggctccgacgtgttgctggctgagaaacggtcatcactgacgactgccgccctgccctttacacagtccatcctcactcaggtgggccgtaccttgtctaaggtccaacaagtgctgagctggtcgtatggggaagatgtcaagcccttcaagccacccctgagcgatgctgagtttcacacgtacctgaaccacgagggccagctctcccgacccgaggagttgcgcctgcggatctatcatggcggtgtggagccctcgctgcgaaaggtggtgtggcggtacctgctgaacgtgtatccagatggactgacaggccgagagcggatggactacatgaaacgcaagagccgcgagtatgagcagctcaagagcgagtgggcccagcgagcgaaccctgaggacctggaattcatccgcagcacggtcctcaaggatgtactgcgcactgaccgggcccacccctactatgcggggcctgaggatggcccacatctacgggcgctgcacgacctgctcaccacctatgccgttacccacccacaggtgtcctactgccagggcatgagtgaccttgcctcacccatcctcgctgtcatggaccatgagggccatgcctttgtttgcttttgtggcatcatgaaacgcctggccgccaacttccaccctgacggccgcgccatggccaccaagtttgcacacttgaagctgttgctgcgacacgctgaccctgacttttatcaatacctgcaagaggcaggcgctgatgacctcttcttctgttaccgctggctgctgctggaactcaagcgtgagttcgccttcgacgatgccctccgcatgcttgaggtcacttggagttcgctgccccctgatcctcctgaacatgaggtagagctggttggaccccccagccaagtggcagacgctggttttggtggccacagggggtggcccgtgcgacagaggcacatgctgaggcctgctggtggaggaggtagtacctttgaagatgctgttgaccacctggccacagccagtcaggggcctggtggtggggggcgtctcctgagacaggccagcttggatggcctccagcaactcagggataacatgggctccaggagggaccctctggtccagctgccccacccagctgcccttatcagctccaagtccctctctgagcctttattgaactccccagacccactgctctcctccttttcccaccctgattccccatcttcctcatctccaccatccacccaggaggcctctcccactggtgatatggctgtaggatcccccttgatgcaagaggtaggctccccgaaagaccctggaaagtccctgccacctgtaccaccaatgggcctgcccccaccccaggagtttggccgggggaacccattcatgctgttcctctgcctggccatcctgctggagcaccgcgaccacatcatgcgcaatgggctggattataatgagctggccatgcactttgaccgccttgtgcgaaaacaccacctggggcgcgtcctgcgccgggctagggctctctttgctgattacctgcagtcagaggtgtgggactcagaggagggggctgaggccacagccgcatcttgatcaggctttctcaagccctccatcggccccaccagatctccattctttgccatgagggccaacacatgagaccccacctccctccctgcctgccagccctagacttgttggagcatagagcccttcctccccaggcctaagtatgtggagctctgctttggcactgccccgcagaggccacgcctatttattctgtttctgttgttttgtttttaacaactatactttgcacacatgaaggtcactgtggtttgtgtgtttctctgcctcctccctgggttttgctgtagatggagtcctcaggggccctttacctgatggaggggaaatacttcacttggtggagagaggctccagcttcccccttgtgatggggagagtggatgctgacaatcagttcccaaaggtgagcccaggtggagcactgcttgaggaaggcctgagtctgtttttttggtacatccatcggcctgtaagggtctgtattatggctgtgaatatatgttttcaggacagccccctggatgagagataagagagttcctggctcaaaaaaggacaagattctttactgagattgggaagtatgggctacttagaaacgttggagcagccacccctggcattccacatgtcaccatttctaggatcttggcctctctgtgaggtttatgcaccaatgctggcagccctgggcaggggcctcggcctcctttttgttttccacttcagacaggtaccgtgcagatgttaacaaggtttgagcgaggtgcatctcacacaagtgtgaaagcccaatcatcacattgttgaattacaaaaggatctagggctcctattcttgtcacttgctttggagccagtttgaaagactggcctagcccatgcctagcggccctaaactgggattccagctcacagcacctgtcttaaccatttcagcagtagaaaccacttatttaccttctccatctcactaatatggacaaacaacaagcactgataaaacgcaggccctaatagaattcacttcgttatttggaggataatgatcaaaaaaaggtcctttttcccactgacatgctcagagggtgggattctctcacaggccaggtgctgtcatccacaaaggatgggtgaaataactggggtcctcaggtcacggtctagccacaccagcttctcccaagtactaaccaggcttgaccctgcttagcttcagaggtcagacaagatctggcatgttcaggatggtatggctgtagaccaggctgggttctggccagagctgttgcactaggcaatgctgccagagatgaggaggcatcagggcagtcatcccttctgctgtttgccccaagaatgccatacaaacctggggatgacccttaaaagtctcccgtcacccccagtattggggggaagctgactattcctcagatgatagcccagtcacttgaagaacaggacaagactattctgtgtctagggggctcaagcactgtgtgtgggtctaacgaatgcattttgtggaaatgggctcagactccccaaagggccatccaacctatgggagtgtctggccttctgaggtcctgaaatgtctcttttgtcagtaaacagctaataccctc

SEQ ID NO: 189540 - DNA, 691 bp, Homo sapiens
  Payload ID: 17427
  Gene Symbol: TBC1D25
  Gene Name: TBC1 domain family, member 25
  ENST ID: ENST00000418627
  CDS Start-End: 1-691
atggcaacagcctccggggcctcggacttgtctggctccggagcgcccccgcccggtgtgggagctcaggcggcggcggccgctgaggaggaggagcgagaggtggtgcgggtccgagtcaagcatggtgatggggcccctggtggcctaccccatgtcttctctccccagaaatgtgagagcttcttgccgccagagttccgctcttttgctgtagatccccagatcacctcgctcgacgtgttgcagcacatcctcatccgagcctttgatttgagtgggaagaagaactttggcatcagctacctgggccgggaccggctaggacaggaagtttacctctcacttctatctgactgggacctcagcacagcctttgccactgcctccaaaccttacctgcaattgcgtgtagatattcggccctcggaggacagcccattgctagaagactgggacataatcagccccaaagatgtcattggctccgacgtgttgctggctgagaaacggtcatcactgacgactgccgccctgccctttacacagtccatcctcactcaggtgggccgtaccttgtctaaggtccaacaagtgctgagctggtcgtatggggaagatgtcaagcccttcaagccacccctgagcgatgctgagtttcacacgtacctgaaccacgagggccagctct

SEQ ID NO: 189541 - DNA, 884 bp, Homo sapiens
  Payload ID: 17427
  Gene Symbol: TBC1D25
  Gene Name: TBC1 domain family, member 25
  Uniprot ID: Q3MII6
  ENST ID: ENST00000481090
  CDS Start-End: 62-364
agagtgtgcgccggggtggggggcaacggtcagccgtcaccctgagacgggcggcggcgggatggcaacagcctccggggcctcggacttgtctggctccggagcgcccccgcccggtgtgggagctcaggcggcggcggccgctgaggaggaggagcgagaggtggtgcgggtccgagtcaagaaatgtgagagcttcttgccgccagagttccgctcttttgctgtagatccccagatcacctcgctcgacgtgttgcagcacatcctcatccgagcctttgatttgagtgggcccattgctagaagactgggacataatcagccccaaagatgtcattggctccgacgtgttgctggctgagaaacggtcatcactgacgactgccgccctgccctttacacagtccatcctcactcaggtgggccgtaccttgtctaaggtccaacaagtgctgagctggtcgtatggggaagatgtcaagcccttcaagccacccctgagcgatgctgagtttcacacgtacctgaaccacgagggccagctctcccgacccgaggagttgcgcctgcggatctatcatggcggtgtggagccctcgctgcgaaaggtggtgtggcggtacctgctgaacgtgtatccagatggactgacaggccgagagcggatggactacatgaaacgcaagagccgcgagtatgagcagctcaagagcgagtgggcccagcgagcgaaccctgaggacctggaattcatccgcagcacggtcctcaaggatgtactgcgcactgaccgggcccacccctactatgcggggcctgaggatggcccacatctacgggcgctgcacgacctgctcaccacctatgccgttacccaccca

SEQ ID NO: 189542 - DNA, 2015 bp, Homo sapiens
  Payload ID: 17428
  Gene Symbol: TBC1D26
  Gene Name: TBC1 domain family, member 26
  Uniprot ID: Q9HBT8
  ENST ID: ENST00000412988
  CDS Start-End: 80-1615
cacgcctggctccgctccttcttacgcatgcgcgactccgagctggccaaagaagttcgtcccctttgtgaggcccgggatgggagctctgtcttcccaggattctccccatttccaagagaagagcacagaagagggagaagtggctgctctgcgcctcacggccagatcccaggaaacagtgacattcaaggatgtggccatggactttacaccagaggagtgggggaagctggatcctgcacaaagggatgtgatgctggagaactataggaacctagtctcactttggcttccagtttccaaacctgagagctacaacttggagaatggaaaagaaccattgaagcttgagagaaaagcccccaaaagcagctattcagacatggagactagaccacagagcaaggattcaacttcagtgcaagatttttccaaagcagaatcatgcaaagttgcaataatagacagactgacacggaatagtgtctatgactctaacttggaagcagcccttgaatgtgaaaattggttagagaatcagcaaggaaatcaggagagacatttgagagaaatgttcactcacatgaattcactctctgaggaaacagaccataagcatgatgtatactggaaaagcttcaatcagaaatctgtccttatcactgaagacagagttcccaaaggatcttatgccttccatacacttgaaaaaagcttgaaacaaaaatcaaacttaatgaaaaagcagagaacttataaagagaaaaaacctcataaatgtaatgattgtggtgaactcttcacctaccattcagtgcttattcgacaccagagagtccatactggagagaaaccctatacctgcaatgaatgtgggaaatcttttagccacagagctaatttaactaaacaccagagaactcatactagaattctctttgaatgcagtgaatgcaagaaaaccttcacagaaagctcatcccttgcaacacatcagagaattcacgttggagagagaccttatgaatgcaatgaatgtgggaaaggttttaatcgaagtacacatcttgtgcagcatcagttgattcatactggagtgaagccttatgaatgtaatgaatgtgataaagcttttattcattcatcagcactcattaaacatcaaagaactcatactggagagaaaccttataaatgtcaagaatgtgggaaagcctttagccattgctcatccctaactaagcatcagagagttcatactggagaaaagccatatgaatgcagtgaatgtggaaaaacttttagtcagagcacacatcttgttcaacatcagagaattcacactggagagaaaccctatgagtgtaatgaatgtgggaaaaccttcagccggagctccaattttgctaaacatcaaagaattcatattggaaagaaaccgtacaaatgtagcgagtgtggaaaagccttcattcattcatcagctctcattcaacatcagagaactcataccggagagaaaccctttagatgtaatgagtgtgggaaaagctttaagtgcagttcatctctcatcagacatcaaagagttcacactgaagagcaaccctgaaaaattactgaatgtgaagaaataaaactgattatattcctggtccctgaacgatcctatagagacatccagtccctgactccacctgcctccaggtgcccagaacagcccatcgtggggacttcaccctcagcaagtggacgccgtttgtcctgccagggcaggatggagatggatggggacccgtataacctgcctgcccaggggcaaggcaatatcatcattactaagtatgagcagggacaccgagctggggcagcagtggacttggggcatgagcaggttgatgtcagaaaatacaccaataacctcgggattgtgcatgagatggagctgccccacgtcagtgccctggaggtgaaggtaagagcctgtgcctgctgcgtgggaggctgcttca

SEQ ID NO: 189543 - DNA, 1868 bp, Homo sapiens
  Payload ID: 17428
  Gene Symbol: TBC1D26
  Gene Name: TBC1 domain family, member 26
  ENST ID: ENST00000437605
  CDS Start-End: 251-1003
cttgccgtctctatgtctggagctcttagagataagacatagaggtgtctggttctgagaaaaggaagttttgctaagtgagagacacaactgactcaactgactcagaaaactgattatattcctggtccctgaacgatcctatagagacatccagtccctgactccacctgcctccaggtgcccagaacagcccatcgtggggacttcaccctcagcaagtggacgccgtttgtcctgccagggcaggatggagatggatggggacccgtataacctgcctgcccaggggcaaggcaatatcatcattactaagtatgagcagggacaccgagctggggcagcagtggacttggggcatgagcaggttgatgtcagaaaatacaccaataacctcgggattgtgcatgagatggagctgccccacgtcagtgccctggaggtgaagcaaagacgcaaggaaagtaaacgtaccaacaagtggcaaaagatgcttgcagactggacaaaatataggagcaccaagaagctgtctcaaagagtatacaaagtcattcccctggcggtacggggccgggcgtggtcacttttgctagatattgacagaatcaagtcccagaacccaggcaaatataaggtcatgaaggagaagggcaagaggtcctccagaatcatccactgcatccagctagatgtcagccacaccctgcagaaacacatgatgttcatacaaagattcggagtcaagcagcaggaattatgtgacatcctcgtggcctattctgcatataaccctgaggtgggctaccacagggacctgagccgcatcactgccatcctcctcctgtgtctgccagaggaagatgctttctgggcgcttacccagttgctcgctggtgagaggcactccctgtggtattctacagcccaaatactgcctggctcgagaggctcctatcgcaccaggagcaggtgctgcacaagtccttcccaaagatcatgagacacctgggcaaggaagggctgtgcattgagggttccatgctgacgaggctcctccggtgtttccttgatgggaaatccttcgggctcaccctgagactgtgggatgtgttcatcttggagggcgcgcgggtactgacagccatggtgcatgcatcattcaaaatacacaggaagcacctcatgaagctttcctggagcactgtctgggagtttcaggagcgactctctcagagctgggccctggaggacaacgcggtcctcaggaaccttcaaacctctatgaaggaactcacaaaaaaacactgggacctgccacccccagggagcttgctacaaaatgcacattgctataccatagcctggggcttgcaatccaaggctggcaaggattcctgcacgtcaagggcctcaggtgactttcatgcacacccaagtcagaaggctctcctgaatcctggatgtcaccttcctgcccaaaaaaggaggaacgagggtcaaccagcagcagaccagtcacaaaaagagatgaaatgtgagtgcatggccttcctgacacccagacaaaactttgggcacaaagccaggctgcagctctggccactgacttggaccagggatgcccccatgcaggccggtgtgccctggctgctcttgacaccctctggctcctgacaccctctcttcggctgcctgcgttaggaagggagaacctgccagttttcagaagaaaatgtagctttattataacataggaaagactgcaagttattacgggaggaggaggaggcctgaaacagctcctgaaaatgagagggaaaaggaaggtgtaaatatgttggtaataaaatctccaaccacagcat

SEQ ID NO: 189544 - DNA, 1616 bp, Homo sapiens
  Payload ID: 17428
  Gene Symbol: TBC1D26
  Gene Name: TBC1 domain family, member 26
  Uniprot ID: Q86UD7
  ENST ID: ENST00000469477
  CDS Start-End: 245-997
gtctctatgtctggagctcttagagataagacatagaggtgtctggttctgagaaaaggaagttttgctaagtgagagacacaactgactcaactgactcagaaaactgattatattcctggtccctgaacgatcctatagagacatccagtccctgactccacctgcctccaggtgcccagaacagcccatcgtggggacttcaccctcagcaagtggacgccgtttgtcctgccagggcaggatggagatggatggggacccgtataacctgcctgcccaggggcaaggcaatatcatcattactaagtatgagcagggacaccgagctggggcagcagtggacttggggcatgagcaggttgatgtcagaaaatacaccaataacctcgggattgtgcatgagatggagctgccccacgtcagtgccctggaggtgaagcaaagacgcaaggaaagtaaacgtaccaacaagtggcaaaagatgcttgcagactggacaaaatataggagcaccaagaagctgtctcaaagagtatacaaagtcattcccctggcggtacggggccgggcgtggtcacttttgctagatattgacagaatcaagtcccagaacccaggcaaatataaggtcatgaaggagaagggcaagaggtcctccagaatcatccactgcatccagctagatgtcagccacaccctgcagaaacacatgatgttcatacaaagattcggagtcaagcagcaggaattatgtgacatcctcgtggcctattctgcatataaccctgaggtgggctaccacagggacctgagccgcatcactgccatcctcctcctgtgtctgccagaggaagatgctttctgggcgcttacccagttgctcgctggtgagaggcactccctgtggtattctacagcccaaatactgcctggctcgagaggctcctatcgcaccaggagcaggtgctgcacaagtccttcccaaagatcatgagacacctgggcaaggaagggctgtgcattgagggttccatgctgacgaggctcctccggtgtttccttgatgggaaatccttcgggctcaccctgagactgtgggatgtgttcatcttggagggcgcgcgggtactgacagccatggtgcatgcatcattcaaaatacacaggaagcacctcatgaagctttcctggagcactgtctgggagtttcaggagcgactctctcagagctgggccctggaggacaacgcggtcctcaggaaccttcaaacctctatgaaggaactcacaaaaaaacactgggacctgccacccccagggagcttgctacaaaatgcacattgctataccatagcctggggcttgcaatccaaggctggcaaggattcctgcacgtcaagggcctcaggtgactttcatgcacacccaagtcagaaggctctcctgaatcctggatgtcaccttcctgcccaaaaaaggaggaacgagggtcaaccagcagcagaccagtcacaaaaagagatgaaatattgttcactgttggcatagaggaatactactgattttcgtatgttaattttgtatcctgcaacttaactaaatttgtttaacta

SEQ ID NO: 189545 - DNA, 4262 bp, Homo sapiens
  Payload ID: 17428
  Gene Symbol: TBC1D26
  Gene Name: TBC1 domain family, member 26
  Uniprot ID: Q9HBT8
  ENST ID: ENST00000413242
  CDS Start-End: 320-1885
aagaagttcgtcccctttgtgaggcccgggatgggaggtgcccggttcccccagggacagcttcaagcggtagggacagacatctgaggacccagcctcagggatgctgtccccgggcttccaggctccagcgccgtaggactgaggcagactccacggtgagaaagagacccgatctaacccaggcctttcatcagagcccaggagggaaggcaggaagtgggaccacgaggcccggggggcttctaactcgtctggccagggagatctgaattggggtgaagagcagaatctccagaacaaggaggaggtggtgatcatggagacagatttggctgaaatgcctgagaaaggagctctgtcttcccaggattctccccatttccaagagaagagcacagaagagggagaagtggctgctctgcgcctcacggccagatcccaggaaacagtgacattcaaggatgtggccatggactttacaccagaggagtgggggaagctggatcctgcacaaagggatgtgatgctggagaactataggaacctagtctcactttggcttccagtttccaaacctgagagctacaacttggagaatggaaaagaaccattgaagcttgagagaaaagcccccaaaagcagctattcagacatggagactagaccacagagcaaggattcaacttcagtgcaagatttttccaaagcagaatcatgcaaagttgcaataatagacagactgacacggaatagtgtctatgactctaacttggaagcagcccttgaatgtgaaaattggttagagaatcagcaaggaaatcaggagagacatttgagagaaatgttcactcacatgaattcactctctgaggaaacagaccataagcatgatgtatactggaaaagcttcaatcagaaatctgtccttatcactgaagacagagttcccaaaggatcttatgccttccatacacttgaaaaaagcttgaaacaaaaatcaaacttaatgaaaaagcagagaacttataaagagaaaaaacctcataaatgtaatgattgtggtgaactcttcacctaccattcagtgcttattcgacaccagagagtccatactggagagaaaccctatacctgcaatgaatgtgggaaatcttttagccacagagctaatttaactaaacaccagagaactcatactagaattctctttgaatgcagtgaatgcaagaaaaccttcacagaaagctcatcccttgcaacacatcagagaattcacgttggagagagaccttatgaatgcaatgaatgtgggaaaggttttaatcgaagtacacatcttgtgcagcatcagttgattcatactggagtgaagccttatgaatgtaatgaatgtgataaagcttttattcattcatcagcactcattaaacatcaaagaactcatactggagagaaaccttataaatgtcaagaatgtgggaaagcctttagccattgctcatccctaactaagcatcagagagttcatactggagaaaagccatatgaatgcagtgaatgtggaaaaacttttagtcagagcacacatcttgttcaacatcagagaattcacactggagagaaaccctatgagtgtaatgaatgtgggaaaaccttcagccggagctccaattttgctaaacatcaaagaattcatattggaaagaaaccgtacaaatgtagcgagtgtggaaaagccttcattcattcatcagctctcattcaacatcagagaactcataccggagagaaaccctttagatgtaatgagtgtgggaaaagctttaagtgcagttcatctctcatcagacatcaaagagttcacactgaagagcaaccctgaaaaattactgaatgtgaagaaataaaactgattatattcctggtccctgaacgatcctatagagacatccagtccctgactccacctgcctccaggtgcccagaacagcccatcgtggggacttcaccctcagcaagtggacgccgtttgtcctgccagggcagggacaccgagctggggcagcagtggacttggggcatgagcaggttgatgtcagaaaatacaccaataacctcgggattgtgcatgagatggagctgccccacgtcagtgccctggaggtgaaggtaagagcctgtgcctgctgcgtgggaggctgcttcagggactgggaatcgggtggtcggtaaggcagagggggtggcctgtgggcctgtgtggtggtgagtgggccacggctgtcactgggaggggtggcctttcctgctggactctgttcccatgaggacttgaccaaaacccaaaccaagaactgcagtcctggctcagagtccactgcctgtttgaaccaagaccccagctgaaggctggacctgaccaaaacttggggcatttatggcctgaggatggcatgtcatggcatcaccattccagactaccagctccagttccttcagagggtctcagcccctggggcctgccctttcctggcttcttcaagttgggtcccttcagggccccaaagccctggacccagcatccacgggccactgtcagacgcctggcagctccgctaactccatcatggctcatttgacagcaaagacgcaaggaaagtaaacgtaccaacaagtggcaaaagatgcttgcagactggacaaaatataggagcaccaagaaggtaacatggggaggaagtggcccgcgtgactgctctctgcagagccaggagacaggcacccatggttgtgacctggcaccgtctgcctctcagtgggtgggtggtaccccatccttgccataggactgcaggcctgttcgccagctttgctctgcggggtcgccccatgtcctttctcactggagtgttcttctgtctgtagctgtctcaaagagtatacaaagtcattcccctggcggtacggggccgggcgtggtcacttttgctagatattgacagaatcaagtcccagaacccaggcaaatataaggtcatgaaggagaagggcaagaggtcctccagaatcatccactgcatccagctagatgtcagccacaccctgcagaaacacatgatgttcatacaaagattcggagtcaagcagcaggaattatgtgacatcctcgtggcctattctgcatataaccctgaggtgggctaccacagggacctgagccgcatcactgccatcctcctcctgtgtctgccagaggaagatgctttctgggcgcttacccagttgctcgctggtgagaggcactccctgtggtattctacagcccaaatactgcctggctcgagaggctcctatcgcaccaggagcaggtgctgcacaagtccttcccaaagatcatgagacacctgggcaaggaagggctgtgcattgagggttccatgctgacgaggctcctccggtgtttccttgatgggaaatccttcgggctcaccctgagactgtgggatgtgttcatcttggagggcgcgcgggtactgacagccatggtgcatgcatcattcaaaatacacaggaagcacctcatgaagctttcctggagcactgtctgggagtttcaggagcgactctctcagagctgggccctggaggacaacgcggtcctcaggaaccttcaaacctctatgaaggaactcacaaaaaaacactgggacctgccacccccagggagcttgctacaaaatgcacattgctataccatagcctggggcttgcaatccaaggctggcaaggattcctgcacgtcaagggcctcaggtgactttcatgcacacccaagtcagaaggctctcctgaatcctggatgtcaccttcctgcccaaaaaaggaggaacgagggtcaaccagcagcagaccagtcacaaaaagagatgaaatgtgagtgcatggccttcctgacacccagacaaaactttgggcacaaagccaggctgcagctctggccactgacttggaccagggatgcccccatgcaggccggtgtgccctggctgctcttgacaccctctggctcctgacaccctctcttcggctgcctgcgttaggaagggagaacctgccagttttcagaagaaaatgtagctttattataacataggaaagactgcaagttattacgggaggaggaggaggcctgaaacagctcctgaaaatgagagggaaaaggaaggtgtaaatatgttggtaataaaatctccaaccac

SEQ ID NO: 189546 - DNA, 1583 bp, Homo sapiens
  Payload ID: 17428
  Gene Symbol: TBC1D26
  Gene Name: TBC1 domain family, member 26
  Uniprot ID: Q86UD7
  ENST ID: ENST00000579428
  CDS Start-End: 245-877
gtctctatgtctggagctcttagagataagacatagaggtgtctggttctgagaaaaggaagttttgctaagtgagagacacaactgactcaactgactcagaaaactgattatattcctggtccctgaacgatcctatagagacatccagtccctgactccacctgcctccaggtgcccagaacagcccatcgtggggacttcaccctcagcaagtggacgccgtttgtcctgccagggcaggatggagatggatggggacccgtataacctgcctgcccaggggcaaggcaatatcatcattactaagtatgagcagggacaccgagctggggcagcagtggacttggggcatgagcaggttgatgtcagaaaatacaccaataacctcgggattgtgcatgagatggagctgccccacgtcagtgccctggaggtgaagcaaagacgcaaggaaagtaaacgtaccaacaagtggcaaaagatgcttgcagactggacaaaatataggagcaccaagaagctgtctcaaagagtatacaaagtcattcccctggcggtacggggccgggcgtggtcacttttgctagatattgacagaatcaagtcccagaacccaggcaaatataaggtcatgaaggagaagggcaagaggtcctccagaatcatccactgcatccagctagatgtcagccacaccctgcagaaacacatgatgttcatacaaagattcggagtcaagcagcaggaattatgtgacatcctcgtggcctattctgcatataaccctgtgagtattcccgggcagcgatattcctgggacatgtgcccatattcacaggcatgggtgtctcttgggggtgttgcaacttcttgaaaattcagtgtttgtccaccaggacgtagtaggcaggacttcagctcgctgctggcagaaaagggctgaagcccagactcctggtgtcacatggacccaatcaccacgtctcagatgaagaaacgaccttcccctcctggtgttgccccaaagcctaggagcttggcagggtcccacacaggatggtccttgtaggagacaggtttgacaagttgctgaggtgcctgatgggccaggcacttgtcatgaaatgagtttgcatcctgggggagcctcttcttcactggaaacctggcaaggatccaatttcccctttgcctgaaccccataggagcatagcagatagggaggggggtcacccaggtggctgttcctgcttggcccccactttccagaccattccaggcagggagagctgctgagctgactgcatgagctgcccacatggaggacccagccaccccttatgtccggcaggcagcccttgggctgttgcaggaccttttgtgtggtggtcagcgccccgctgcctgccctcgtggcaggtgcagttcacaggtgctgccccaggcctggcacagtggcctccccagcctggcccaggggagggagcatgaacaatccctgactgtgccctttcgggccatgtgagcttggacacttgctgcaggagtccccccatgctccttgtcaactgagttgtgcg

SEQ ID NO: 189547 - DNA, 570 bp, Homo sapiens
  Payload ID: 17428
  Gene Symbol: TBC1D26
  Gene Name: TBC1 domain family, member 26
  ENST ID: ENST00000580596
  CDS Start-End: 413-570
actggtgctgagcactcgcccacctgtccacttgccgtctctatgtctggagctcttagagataagacatagaggtgtctggttctgagaaaaggaagttttgctaagtgagagacacaactgactcaactgactcaggaaaacaaagtcccctcctgtattgacagctgggaattgtggtgtccaccgtcctcgacctgcgacggggtctccatgagcacagaggctgctctggagtcaatagatcatcttttccccaaaccaaactgcttggctggcgttgttcctgaagcggcttcactggccagaagacatccagtccctgactccacctgcctccaggtgcccagaacagcccatcgtggggacttcaccctcagcaagtggacgccgtttgtcctgccagggcaggatggagatggatggggacccgtataacctgcctgcccaggggcaaggcaatatcatcattactaagtatgagcagggacaccgagctggggcagcagtggacttggggcatgagcaggttgatgtcagaaaatacaccaataacctcgggattgtgca

SEQ ID NO: 189548 - DNA, 648 bp, Homo sapiens
  Payload ID: 17428
  Gene Symbol: TBC1D26
  Gene Name: TBC1 domain family, member 26
  ENST ID: ENST00000464963
  CDS Start-End: 451-648
gagcactcgcccacctgtccacttgccgtctctatgtctggagctcttagagataagacatagaggtgtctggttctgagaaaaggaagttttgctaagtgagagacacaactgactcaactgactcagaaactctgtggcgatgggtgctgtccccaaatgtagccattccacaggaaaacaaagtcccctcctgtattgacagctgggaattgtggtgtccaccgtcctcgacctgcgacggggtctccatgagcacagaggctgctctggagtcaatagatcatcttttccccaaaccaaactgcttggctggcgttgttcctgaagcggcttcactggccagaagacatccagtccctgactccacctgcctccaggtgcccagaacagcccatcgtggggacttcaccctcagcaagtggacgccgtttgtcctgccagggcaggatggagatggatggggacccgtataacctgcctgcccaggggcaaggcaatatcatcattactaagtatgagcagggacaccgagctggggcagcagtggacttggggcatgagcaggttgatgtcagaaaatacaccaataacctcgggattgtgcatgagatggagctgccccacgtcagtgccctggaggtgaag

SEQ ID NO: 189549 - DNA, 539 bp, Homo sapiens
  Payload ID: 17428
  Gene Symbol: TBC1D26
  Gene Name: TBC1 domain family, member 26
  ENST ID: ENST00000578506
  CDS Start-End: 499-539
gtgttgtgcagcacttgcacataagacgcacacaggtgtctggttctgtggtgcatgaacgacttttctaagtgagagacacagcagcctgagcagactcaggtgagtgacctctgggcagatgccgaggagggtcacccctgagcactcaccgggtgcatgttctgcactgacggcgtggaccatcctctcctttgtcctcacagaaactctgtggcgatgggtgctgtccccaaatgtagccattccacagctgggaattgtggtgtccaccgtcctcgacctgcgacggggtctccatgagcacagaggctgctctggagtcaatagatcatcttttccccaaaccaaactgcttggctggcgttgttcctgaagcggcttcactggccagaagacatccagtccctgactccacctgcctccaggtgcccagaacagcccatcgtggggacttcaccctcagcaagtggacgccgtttgtcctgccagggcaggatggagatggatggggacccgtataacctgcctgcccaggg

SEQ ID NO: 189550 - DNA, 553 bp, Homo sapiens
  Payload ID: 17428
  Gene Symbol: TBC1D26
  Gene Name: TBC1 domain family, member 26
  ENST ID: ENST00000584301
  CDS Start-End: 507-553
actggtgctgagcactcgcccacctgtccacttgccgtctctatgtctggagctcttagagataagacatagaggtgtctggttctgagaaaaggaagttttgctaagtgagagacacaactgactcaactgactcaggaaaacaaagtcccctcctgtattgacagctgggaattgtggtgtccaccgtcctcgacctgcgacggggtctccatgagcacagaggctgctctggagtcaatagatcatcttttccccaaaccaaactgcttggctggcgttgttcctgaagcggcttcactggccagagtgagtgagaattggggtagaacggagcagtcaccagatgtcttgcttcctacagaaaactgattatattcctggtccctgaacgatcctatagagacatccagtccctgactccacctgcctccaggtgcccagaacagcccatcgtggggacttcaccctcagcaagtggacgccgtttgtcctgccagggcaggatggagatggatggggacccgtataacctgcctgcccaggggcaagg

SEQ ID NO: 189551 - DNA, 1978 bp, Homo sapiens
  Payload ID: 17428
  Gene Symbol: TBC1D26
  Gene Name: TBC1 domain family, member 26
  Uniprot ID: Q86UD7
  ENST ID: ENST00000612583
  CDS Start-End: 413-1045
actggtgctgagcactcgcccacctgtccacttgccgtctctatgtctggagctcttagagataagacatagaggtgtctggttctgagaaaaggaagttttgctaagtgagagacacaactgactcaactgactcaggaaaacaaagtcccctcctgtattgacagctgggaattgtggtgtccaccgtcctcgacctgcgacggggtctccatgagcacagaggctgctctggagtcaatagatcatcttttccccaaaccaaactgcttggctggcgttgttcctgaagcggcttcactggccagaagacatccagtccctgactccacctgcctccaggtgcccagaacagcccatcgtggggacttcaccctcagcaagtggacgccgtttgtcctgccagggcaggatggagatggatggggacccgtataacctgcctgcccaggggcaaggcaatatcatcattactaagtatgagcagggacaccgagctggggcagcagtggacttggggcatgagcaggttgatgtcagaaaatacaccaataacctcgggattgtgcatgagatggagctgccccacgtcagtgccctggaggtgaagcaaagacgcaaggaaagtaaacgtaccaacaagtggcaaaagatgcttgcagactggacaaaatataggagcaccaagaagctgtctcaaagagtatacaaagtcattcccctggcggtacggggccgggcgtggtcacttttgctagatattgacagaatcaagtcccagaacccaggcaaatataaggtcatgaaggagaagggcaagaggtcctccagaatcatccactgcatccagctagatgtcagccacaccctgcagaaacacatgatgttcatacaaagattcggagtcaagcagcaggaattatgtgacatcctcgtggcctattctgcatataaccctgtgagtattcccgggcagcgatattcctgggacatgtgcccatattcacaggcatgggtgtctcttgggggtgttgcaacttcttgaaaattcagtgtttgtccaccaggacgtagtaggcaggacttcagctcgctgctggcagaaaagggctgaagcccagactcctggtgtcacatggacccaatcaccacgtctcagatgaagaaacgaccttcccctcctggtgttgccccaaagcctaggagcttggcagggtcccacacaggatggtccttgtaggagacaggtttgacaagttgctgaggtgcctgatgggccaggcacttgtcatgaaatgagtttgcatcctgggggagcctcttcttcactggaaacctggcaaggatccaatttcccctttgcctgaaccccataggagcatagcagatagggaggggggtcacccaggtggctgttcctgcttggcccccactttccagaccattccaggcagggagagctgctgagctgactgcatgagctgcccacatggaggacccagccaccccttatgtccggcaggcagcccttgggctgttgcaggaccgtggccagttcttggtattgctcaagtcccctgggccttcagactggcgggtgacttcaagggaccaaccaccctgggcctctcctgggacaaacacttgccttcacccactatcgatgtcttgctcagccctcagaggagcgtggttggcgtggattacttcatgccttgattctgccttcccggaaaccacggtggcagcaggcttggatgtcaccaagccaccgtgtttcatgctatttctggaagttctcgcctttgtggcctcggaaaggaaggcgatctggtgctttggggaaggccctcgggatgctcctccagatggtcttcttcaggccttttgctcagcattggtctgatcagttctgccagctctgggccatgatctcttggcactggcgcggctttccttcaataattccataaactcc

SEQ ID NO: 189552 - DNA, 2789 bp, Homo sapiens
  Payload ID: 17429
  Gene Symbol: TBC1D28
  Gene Name: TBC1 domain family, member 28
  Uniprot ID: Q2M2D7
  ENST ID: ENST00000345096
  CDS Start-End: 701-1333
gaggcagggtctggtcctggaagagccactgggacagagcccctgtgggtggggtggagggtgaaattcttggtccaagtctgtgccctaagcttggtccccacaggaggaggtcactgatggttgctgtgggacccactggacacatggggtccttcatctaggagtggggtggggagccctctgccctcaggcagttgtggaaaatgaaggagccctggagggctgcctggagggtgacaatcgtctctcctggtcaaagaggcttggggactggaaccctcctgcagcgtcccattctctctgtctggtcctctagaggccttgccttccgtttgccccgagtattcctgggggggacggttcccccaggtgttctctaggactaaggccccagcgttctcttgttctttcttggtgacccaggaaaacaaagtcccctcctgtattgacagctgggaattgtggtgtccaccgtcctcgacctgcgacggggtctccatgagcacagaggctgctctggagtcaacagatcatcttttccccaaaccaaactgcttggctggcgttgttcctgaaggggcttcactggccagaagacatccagtccctgactccacctgcctccaggtgcccagaacagcccatcgtggggacttcaccctcagcaagtggacgccgtttgtcctgccagggcaggatggagatggatgaggacccggataacctgcctgcccaggggcaaggcaatatcatcattactaagtatgagcagggacaccgagctggggcagcagtggacttggggcatgagcaggttgatgtcagaaaatacaccaataacctcgggattgtgcatgagatggagctgccccgcgtcagtgccctggaggtgaagcaaagacgcaaggaaagtaaacgtaccaacaagtggcaaaagatgcttgcagactggacaaaatataggagcaccaagaagctgtctcaaagagtatgcaaagtcattcccctggcggtgcggggccgggcgttgtcacttttgctagatattgacaaaatcaagtcccagaacccaggcaaatataaggtcatgaaggagaagggcaagaggtcctccagaatcatccactgcatccagctagatgtcagccacaccctgcagaaacacatgatgttcatacaaagattcggagtcaagcagcaggaattatgtgacatcctcgtggcctattctgcatataaccctgtgagtattcccgggcagcgatattcctggtacctgtgcccatattcacaggcatgggtgtctctcgggggtgttgcaacttcttgaaaattcagcgtttgtccaccaggacgtagtaggcaggacttcagctcgctgctggcagaaaagggttgaagcccagactcctggtctcacatggacccaatcaccacatctcagatgaagaaatgaccttcccctcctggtgttgccccaaagcctaggagcttggcagggtcccacacaggatggtccttgtaggagacaggtttgacaagttgctgaggtgcctgatgggccaggcacttgtcatgaaatgagtttgcatcctgggggagcctcttcttcactggaaacctggcaaggatccaatttcccctttgcctgatccccacaggagcatagcagatagggaggggggtcacccaggtggctcttcctgcttggcccccactttccagaccattccaggcagggagagctgctgagctgactgcatgagctgcccacatggaggacccagccaccccttatgttcggcaggcagcccttgggctgttgcaggaccgtggccagttcttggtattgctcaagtcccctgggccttcagactggcgggtgacttcaagggagcaaccatcctgggcctctcctgggacaaacacttgccttcacccactatcgatgtcttgctcagccctcagaggagcgtggttggcgtggattacttcatgccttgattctgccttcccggaaaccacggtggcagcaggcttggatgtcaccaagtcaccgtgtttcatgctatttctggaggttctcgcctttgtggcctcggaaaggaaggcgatctggtgctttggggaaagccctcgggatgctcctccagatggtcttcttcaggccttttgctcagcattggtctgatcagttctgccagctctgggccatgatctcttggcactggcgcggctttccttcaataattccataaactccagacttcgtgtcttttgcatggaaagcacgcggtgcccatttcatcgacaccgcaccccggagtccaaacgtcagccctgcgggtgttgggtttgttagggacaatttcgggctcaggtgcagggggcgcttccccagcgcgggcgcttcctgggccccatctgaggccgtgggctcctggcaggaggacctggagttttcagatccccgggaaggatgcatttcccccactctcgggcacaagctgccctttgctggcgttgggcacggatcatggcctcgcagaagcccgcgacagcgtggagcaggtggtgcccccgcccgggactcctggtgggtgatggctccgggaggccttggctgggacagagtggggcctccgggtcggtcagcggcccgagcccggctgcggctctcggaggcttgggtttggaagacaccgcctgccatcccgcggcgcctctcggggtccgctcccccggactggccctgcccaccgcgcgcgagtagtagcgggcggcca

SEQ ID NO: 189553 - DNA, 1978 bp, Homo sapiens
  Payload ID: 17429
  Gene Symbol: TBC1D28
  Gene Name: TBC1 domain family, member 28
  Uniprot ID: Q2M2D7
  ENST ID: ENST00000405044
  CDS Start-End: 413-1045
actggtgctgagcactcgcccacctgtccgcttgccgtctctatgtctggagctcttagagataagacatagaggtgtctggttctgagaaaaggaagttttgctaagtgagagacacaactgactcaactgactcaggaaaacaaagtcccctcctgtattgacagctgggaattgtggtgtccaccgtcctcgacctgcgacggggtctccatgagcacagaggctgctctggagtcaacagatcatcttttccccaaaccaaactgcttggctggcgttgttcctgaaggggcttcactggccagaagacatccagtccctgactccacctgcctccaggtgcccagaacagcccatcgtggggacttcaccctcagcaagtggacgccgtttgtcctgccagggcaggatggagatggatgaggacccggataacctgcctgcccaggggcaaggcaatatcatcattactaagtatgagcagggacaccgagctggggcagcagtggacttggggcatgagcaggttgatgtcagaaaatacaccaataacctcgggattgtgcatgagatggagctgccccgcgtcagtgccctggaggtgaagcaaagacgcaaggaaagtaaacgtaccaacaagtggcaaaagatgcttgcagactggacaaaatataggagcaccaagaagctgtctcaaagagtatgcaaagtcattcccctggcggtgcggggccgggcgttgtcacttttgctagatattgacaaaatcaagtcccagaacccaggcaaatataaggtcatgaaggagaagggcaagaggtcctccagaatcatccactgcatccagctagatgtcagccacaccctgcagaaacacatgatgttcatacaaagattcggagtcaagcagcaggaattatgtgacatcctcgtggcctattctgcatataaccctgtgagtattcccgggcagcgatattcctggtacctgtgcccatattcacaggcatgggtgtctctcgggggtgttgcaacttcttgaaaattcagcgtttgtccaccaggacgtagtaggcaggacttcagctcgctgctggcagaaaagggttgaagcccagactcctggtctcacatggacccaatcaccacatctcagatgaagaaatgaccttcccctcctggtgttgccccaaagcctaggagcttggcagggtcccacacaggatggtccttgtaggagacaggtttgacaagttgctgaggtgcctgatgggccaggcacttgtcatgaaatgagtttgcatcctgggggagcctcttcttcactggaaacctggcaaggatccaatttcccctttgcctgatccccacaggagcatagcagatagggaggggggtcacccaggtggctcttcctgcttggcccccactttccagaccattccaggcagggagagctgctgagctgactgcatgagctgcccacatggaggacccagccaccccttatgttcggcaggcagcccttgggctgttgcaggaccgtggccagttcttggtattgctcaagtcccctgggccttcagactggcgggtgacttcaagggagcaaccatcctgggcctctcctgggacaaacacttgccttcacccactatcgatgtcttgctcagccctcagaggagcgtggttggcgtggattacttcatgccttgattctgccttcccggaaaccacggtggcagcaggcttggatgtcaccaagtcaccgtgtttcatgctatttctggaggttctcgcctttgtggcctcggaaaggaaggcgatctggtgctttggggaaagccctcgggatgctcctccagatggtcttcttcaggccttttgctcagcattggtctgatcagttctgccagctctgggccatgatctcttggcactggcgcggctttccttcaataattccataaactcc

SEQ ID NO: 189554 - DNA, 647 bp, Homo sapiens
  Payload ID: 17429
  Gene Symbol: TBC1D28
  Gene Name: TBC1 domain family, member 28
  ENST ID: ENST00000575220
  CDS Start-End: 451-647
gagcactcgcccacctgtccgcttgccgtctctatgtctggagctcttagagataagacatagaggtgtctggttctgagaaaaggaagttttgctaagtgagagacacaactgactcaactgactcagagactctgtggcgatgggtgctgtccccaaatgtagccattccacaggaaaacaaagtcccctcctgtattgacagctgggaattgtggtgtccaccgtcctcgacctgcgacggggtctccatgagcacagaggctgctctggagtcaacagatcatcttttccccaaaccaaactgcttggctggcgttgttcctgaaggggcttcactggccagaagacatccagtccctgactccacctgcctccaggtgcccagaacagcccatcgtggggacttcaccctcagcaagtggacgccgtttgtcctgccagggcaggatggagatggatgaggacccggataacctgcctgcccaggggcaaggcaatatcatcattactaagtatgagcagggacaccgagctggggcagcagtggacttggggcatgagcaggttgatgtcagaaaatacaccaataacctcgggattgtgcatgagatggagctgccccgcgtcagtgccctggaggtgaa

SEQ ID NO: 189555 - DNA, 539 bp, Homo sapiens
  Payload ID: 17429
  Gene Symbol: TBC1D28
  Gene Name: TBC1 domain family, member 28
  ENST ID: ENST00000575211
  CDS Start-End: 499-539
gtgttgtgcagcacttgcacataagacgcacacaggtgtctggttctgtggtgcatgaacgacttttctaagcgagagacacagcagcctgagcagactcaggtgagtgacctctgggcagatgccgacgagggtcacccctgagcactcaccgggtacatgttctgcactgacggcgtggaccatcctctcctttgtcctcacagagactctgtggcgatgggtgctgtccccaaatgtagccattccacagctgggaattgtggtgtccaccgtcctcgacctgcgacggggtctccatgagcacagaggctgctctggagtcaacagatcatcttttccccaaaccaaactgcttggctggcgttgttcctgaaggggcttcactggccagaagacatccagtccctgactccacctgcctccaggtgcccagaacagcccatcgtggggacttcaccctcagcaagtggacgccgtttgtcctgccagggcaggatggagatggatgaggacccggataacctgcctgcccaggg

SEQ ID NO: 189556 - DNA, 570 bp, Homo sapiens
  Payload ID: 17429
  Gene Symbol: TBC1D28
  Gene Name: TBC1 domain family, member 28
  ENST ID: ENST00000572213
  CDS Start-End: 413-570
actggtgctgagcactcgcccacctgtccgcttgccgtctctatgtctggagctcttagagataagacatagaggtgtctggttctgagaaaaggaagttttgctaagtgagagacacaactgactcaactgactcaggaaaacaaagtcccctcctgtattgacagctgggaattgtggtgtccaccgtcctcgacctgcgacggggtctccatgagcacagaggctgctctggagtcaacagatcatcttttccccaaaccaaactgcttggctggcgttgttcctgaaggggcttcactggccagaagacatccagtccctgactccacctgcctccaggtgcccagaacagcccatcgtggggacttcaccctcagcaagtggacgccgtttgtcctgccagggcaggatggagatggatgaggacccggataacctgcctgcccaggggcaaggcaatatcatcattactaagtatgagcagggacaccgagctggggcagcagtggacttggggcatgagcaggttgatgtcagaaaatacaccaataacctcgggattgtgca

SEQ ID NO: 189557 - DNA, 553 bp, Homo sapiens
  Payload ID: 17429
  Gene Symbol: TBC1D28
  Gene Name: TBC1 domain family, member 28
  ENST ID: ENST00000573652
  CDS Start-End: 507-553
actggtgctgagcactcgcccacctgtccgcttgccgtctctatgtctggagctcttagagataagacatagaggtgtctggttctgagaaaaggaagttttgctaagtgagagacacaactgactcaactgactcaggaaaacaaagtcccctcctgtattgacagctgggaattgtggtgtccaccgtcctcgacctgcgacggggtctccatgagcacagaggctgctctggagtcaacagatcatcttttccccaaaccaaactgcttggctggcgttgttcctgaaggggcttcactggccagagtgagtgagaattggggtagaacggagcagtcaccagatgtcttgcttcctacggaaaactgattatcttcctggtccctgaaccatcctatagagacatccagtccctgactccacctgcctccaggtgcccagaacagcccatcgtggggacttcaccctcagcaagtggacgccgtttgtcctgccagggcaggatggagatggatgaggacccggataacctgcctgcccaggggcaagg

SEQ ID NO: 189558 - DNA, 3018 bp, Homo sapiens
  Payload ID: 17430
  Gene Symbol: TBC1D29
  Gene Name: TBC1 domain family, member 29
  Uniprot ID: Q9UFV1
  ENST ID: ENST00000580161
  CDS Start-End: 2498-2950
gagcaggcggcaccatggactgagcacctcccaggttccaagccctgggccagactggaacatggggggccagaacccaagaggatcctgaggagacagacggcagcaaacaaaatcatgcacaatggtgaaaggtgctctccctgacccatggggacccatggtaggaccctcgggagggtggcaggttggagggcccgtaagcctccccaggcaacactgatagtaccaaaagctggggagattcagggacctggaaactgtcatccaggtctgctgggaacgtgacatggcacagccactttggcagccagttgggcagtggctcacaaagttcaatggacttgaaccacgcgtccccaaagtgtcacagatattgaacccactgatttgaaaactgacgtccacatgaaacctgcaggccaggttcactgcttgattcctcgtcactcacacacggagccttcggggatggccttcaacacgggaatggggagaacaaggctggtcctcccttcaaacggaagacccagtgagaaaagggaacgagccagtgatgcccgcatgaacgtgggtggatcctaggtgcattttgctaagggaaagaagccagacccaataagctaccaaagtaggattcccattcttaggccattgtggaaaaggccaaaccatagggactgagaagcagtctgggtggccaggggctgacggatcggggagaggctgggtgcataggggccaccctggagacttggaggatgaaggagtcgctccaggaggggctggagtggtagccgggagactctgcacattggtttagaaccatggaggacctgtacacccaaagactgaattggcgtgtgtgcaaactgaaaaaaaaaagatcattcagagtgaaaaggatcaggcaagtcactgtacaactgggctatttgcatgtcacagatgtggattttactgaaacatttcttcaacagtcaaagtccctgaagagctcactgcttatctggtgaatcatctgaacctgaaatgggatttgttgttagggtttgtagacaaagtgaaactaacagcatctgcacaacacaaaccaaagccccctttctctgtttcccaggcagcaggaactattctacatcctcctggcatattcgaagtataacccagtgagtattcctggcagtgaggttcccaggccgtatttccatattcacaggagtgggtgtctggtgggagtgtcgttgcttcttttaaagttagtatttgtgacccaccaggatataggaggtaggattccagctcaccgctggcataaacctccagcaagggggtggtctcaaggggtcaagctgagacacagaggagtcagggcctggactcctggtgtcacctgggcctgaccaccacttatcggaacaagcccctcctcctggggctgccccaaagcccgggagcttggcagcatcacacacagaatggtgctatcaggagacattttggacaaggtgctgaagtgcccgatggatatggctcttgtcatgaaatgaatttgcatcctgaggaagtctcttcttcagaggaagccttcccagtcacctctgccctctccgatgacatgagtcctcccaggtgacctcagccctcccaagtgacttacttccacggtgactctggctgttgcaggtggtgggctactgcagggacctgagccacatcgctgccttgttcctcctttatctgcctgaggaggacacattctgggcactggtgcagctgctggccagtgagaggcactcctgcaggcttgttgggagcctttaggacgtctctgctgacggtcccaaaggaacccggaactgaccccccagagcccaagtcagacgcctttcatccccatcagcagaaggcatctcatcctccccgtggctgccctctgtgtcctggagccacgccctccggctctgattctgtgcagctggctctccgcaacctgagagtcctcctgcccttcagttgctcaggctccagctgcccttggtacccacgaaagggtaccaagcccagatggcagcatctccccatcccgtgtcccttggcccagccccacttccaggagacgaccacaaagcccagcacccaccctgttctggccgccccctgtcgtggcctcaaagtcaggcttgccctcccggcaccctggcccaggaggcctccaggggcacctccagccaggctccaggggatgttcccacccctcctccccagggccaaggccacatggtggggtcaccagatgggagggtgggaggcctcggggtctggggggctctgcagctgcccagctcttccagctgatggctccacatcttgggggaaggctctgatttcatgacgggctgggggcttctcaggattccacagcccaaatggcgggacagttcaggggctccaagaccatcaggagcatgtggtacccacatcacaacccaagaccatggggcatctggacaaggaaggtctatgcacacagggttcctcattcagctggcttctccgggtgctgaatgatgggatctctctcgggctcaccccgtgcctgtgggatatgtatttgctggaaggggaacagatgttgatgctgataacaagcattgcctttaaggttcaaaggagcctctatgaagaaactaacaaggaaacatggggacctgccacccccagggccctcaagggcactggaagagccagacccatttgtgagagcctccactcctccctgcaagcgctgacagcctcagagagcagcagaggcccctcactcctgcagactcctccaagggtgccaggacaacaagccttgagccggggagacaagggaatcagtgtctcattatctctaccatctctaccatctcggagagggagatgtggcaggataatagggtaatagtggggtgagggtcagcaggaaaacatgaacaaatgtctctgtgtcataaacaaggttaaggaaaa

SEQ ID NO: 189559 - DNA, 602 bp, Homo sapiens
  Payload ID: 17430
  Gene Symbol: TBC1D29
  Gene Name: TBC1 domain family, member 29
  ENST ID: ENST00000584297
  CDS Start-End: 150-395
ttccagctgatggctccacatcttgggggaaggctctgatttcatgacgggctgggggcttctcaggattccacagcccaaatggcgggacagttcaggggctccaagaccatcaggagcatgtggtacccacatcacaacccaagaccatggggcatctggacaaggaaggtctatgcacacagggttcctcattcagctggcttctccgggtgctgaatgatgggatctctctcgggctcaccccgtgcctgtgggatatgtatttgctggaaggggaacagatgttgatgctgataacaagcattgcctttaaggttcaaaggaggccctcaagggcactggaagagccagacccatttgtgagagcctccactcctccctgcaagcgctgacagcctcagagagcagcagaggcccctcactcctgcagactcctccaagggtgccaggacaacaagccttgagccggggagacaagggaatcagtgtctcattatctctaccatctctaccatctcggagagggagatgtggcaggataatagggtaatagtggggtgagggtcagcaggaaaacatgaacaaatgtctctgtgtca

SEQ ID NO: 189560 - DNA, 652 bp, Homo sapiens
  Payload ID: 17430
  Gene Symbol: TBC1D29
  Gene Name: TBC1 domain family, member 29
  Uniprot ID: Q9UFV1
  ENST ID: ENST00000579181
  CDS Start-End: 150-602
ttccagctgatggctccacatcttgggggaaggctctgatttcatgacgggctgggggcttctcaggattccacagcccaaatggcgggacagttcaggggctccaagaccatcaggagcatgtggtacccacatcacaacccaagaccatggggcatctggacaaggaaggtctatgcacacagggttcctcattcagctggcttctccgggtgctgaatgatgggatctctctcgggctcaccccgtgcctgtgggatatgtatttgctggaaggggaacagatgttgatgctgataacaagcattgcctttaaggttcaaaggagcctctatgaagaaactaacaaggaaacatggggacctgccacccccagggccctcaagggcactggaagagccagacccatttgtgagagcctccactcctccctgcaagcgctgacagcctcagagagcagcagaggcccctcactcctgcagactcctccaagggtgccaggacaacaagccttgagccggggagacaagggaatcagtgtctcattatctctaccatctctaccatctcggagagggagatgtggcaggataatagggtaatagtggggtgagggtcagcaggaaaacatgaacaaatgtctctgtgtcat

SEQ ID NO: 189561 - DNA, 6067 bp, Homo sapiens
  Payload ID: 17431
  Gene Symbol: TBC1D2B
  Gene Name: TBC1 domain family, member 2B
  Uniprot ID: Q9UPU7
  ENST ID: ENST00000300584
  CDS Start-End: 1-2892
atgccgggggccggagcccgggcggaggagggcggcggcggcggcgagggcgcggcgcagggggcggccgcggagcccggggcgggtccggcgcgggagccagcgcggctgtgtggctatctgcagaagctgtcgggcaagggccccctgcgtggctaccgcagccgctggttcgtgttcgacgcgcgccgctgctacctttactatttcaagagtccgcaggacgcgctgcccctcggccacttggacatcgcggacgcctgcttcagctaccagggccccgacgaggcggcggagccgggcacggagccgcccgcgcacttccaggtgcacagcgcgggagccgtcacggtgctcaaggctcccaatcgtcaactcatgacttactggttacaggagcttcagcagaagagatgggaatattgtaacagtcttgacatggtcaagtgggacagcaggacctctccaactcccggggattttcctaagggtcttgtagccagagataacactgatttaatttacccacacccaaatgcttctgcagaaaaagccagaaatgtcctagctgtggagactgtgcctggagagctggtgggagaacaagctgcaaatcagcccgccccagggcatccaaattccattaatttttactctttgaaacagtggggcaatgagctcaagaattcgatgtcttctttccgtcctgggagaggacataatgatagtcggaggactgtgttttataccaatgaagagtgggaacttttagacccaacccctaaggacctagaggagtccatagtacaggaagaaaagaagaagctgacccctgaaggaaacaaaggagtaactggctcaggattcccctttgattttggacgtaacccctacaaaggaaagcgccctttgaaagacataattgggtcgtacaaaaatcgtcacagcagtggtgacccttcaagtgaaggcacatcaggcagtggcagcgtcagcatcaggaagccggcctccgaaatgcaactgcaggtccagagccagcaggaagagctggaacagttaaagaaagacctgtccagtcagaaggagcttgttcgactgctccagcagacagtccggtcatcccagtatgacaagtatttcacaagcagccggctctgtgagggggtcccaaaggacacgctcgagcttctgcaccaaaaggatgatcagattctgggccttaccagccagctggagaggttcagcttggagaaggagagtcttcagcaggaagtaaggacgctgaagagcaaagtgggcgagctcaacgagcagctgggaatgctcatggagaccatccaagccaaggacgaggtcatcatcaagctcagcgagggcgagggcaacgggcctcctcccaccgtggcgcccagctccccttcggttgtgcctgttgccagggaccagctggaactggacaggctgaaagataatctacaggggtacaaaacccaaaacaaatttctaaataaggagattttggaactctcagctctacgaagaaatgcagaaaggagagagagggatctgatggcaaagtattctagcctggaagccaagctctgccagatagaaagtaaatacctgatattgctccaagaaatgaagacaccagtgtgctcagaagaccaggggcccacccgggaggtcatagcccagttgctggaggatgctctgcaggttgagagccaagagcagccggagcaagcatttgttaaacctcatcttgtcagtgaatatgatatttatgggttcaggactgtacctgaggatgatgaggaagagaaattggttgccaaggtccgcgcgttggatctgaagactctctacctcacagaaaaccaggaagtctccactggggtcaagtgggaaaactattttgcaagtacagtgaacagggagatgatgtgctctccagagttaaaaaacctcatccgtgcgggcattccccacgagcaccgttccaaggtgtggaagtggtgtgtggaccgtcacaccaggaagttcaaggacaacactgagcctggccacttccagaccttgctgcagaaggcgctggagaaacagaacccagcctccaagcagattgagctggacttgctgcgaactctgcccaacaacaaacattactcctgccccacctcagaaggcatacagaagttacgcaatgtcctcctcgccttctcctggcggaatccagatatcggctactgtcaaggcctaaacaggttggtggcagtggccctcctgtacctggaacaagaagatgctttctggtgtctcgttaccatagtggaagttttcatgcctcgagactattatacaaagactcttttaggatcccaggtggaccagcgggtgttcagagaccttatgagtgagaagctgcctcggttgcatggccactttgaacagtacaaagtcgactacactctcatcactttcaactggtttctggtggtatttgtggatagtgtcgttagtgacatcctctttaaaatatgggactctttcctttatgaaggaccaaaggttattttccgttttgctctggcactttttaagtacaaggaagaggagattttgaaattgcaagattcgatgtctatatttaagtatctccgctacttcactcgcactatccttgatgctaggaagctgatcagtatctcctttggggacctgaaccctttccccctacgccagatccggaaccgacgcgcctaccacttggagaaagtccggctggagctgaccgagctggaggccatccgtgaggacttcctgcgtgagcgggacaccagccctgacaagggtgagctggtcagtgacgaggaggaggatacctgagtgggctcgggatgctgctcttccttccttcacaaccaaagtgtgcccaaagggtgaaagtgcacttaaaagccagaatgtaacgtgtgtgtcctctggggatctgctgggcagatgtcccaagccaggctgcccttcctcatttcccactgtgcggggggcaggggtgggaggtctaatctgtttacaaccatttccgtgccatgcttttggttacacgtatctcagtcacgctttctgcctggttggtggatcctcaggcttaccagtggctatttgcaagagcctgtttccagcctccgtcagcctgtcggtgctctgaccctctgaaaccttgctttgctgggcatctccccatattctctctcctgtacatagtgggcagtggtgtgtggttttgaatggcagtgctataaaggatgccagctgtgctttaggcacctgtaggccagagggttgctgcctcaggcataaggttggtatgaaaaggggctgccttagaaaagcaggcacatcccttgttcagaaatggccactgtaggaaagcctgtgaacctcccaccagtggctttaagctgccagccatgccccatttctagaatagcctttgctcttccacacgcaacccttccatcagtgtcttccagcctgcatggggagggcctggctgcccagacacccaccctcacttctcatggccagcctgtgtttgcagatcactgggctgctctgtccccagcttgccccgtgccaggcatggctctgtgagattctgtggaatgcccttcttgacttgtggaaatcattcaccaagtacgatgggatgggattccaagtaaacagtggaccgtcatattgcaaagcaggcccacgcctgggctggccttggttgaggggatggaggaatgttttcgggggtgctttgcagggcagtggtgcagccgcagcgtgaacgctcttggacagctgaaaaccatggcctccttggggatggccagtgctcctggtgtctccacctgcctgggttgtgcaggaggccggctgccagtgcctggggctgggaaacttttttgcttggggcaggcttgggtgagctctcccagatgtgtgcccaccccaccactgcctggaacatccttgttctctgccaggatgcaggggcactgttgcctctgacacagcagtttctgggaactcagaggactgcctttctgaaggctggggagaggctttgagcaaggagcttgtttttgcttaatcgctctagaccatccctgatgcgtagatgtgagaggatgttttctggcacagtgttatgaaaatacaagataaatgatctcagtggaatgtttcatattacccgaaaaaaactggaaatcatcctttgttgtgaacacactgagactaagaattgaagcaatgcagttttaagaagtatttttcctattttttgctgtcaactttttggcaatgccacggcaaagttggtgtttcagcacatgctagagtgagctccggcttcgtgtctttaaccaactccactaatgtttcactgggtagacggagctggcctctatatttagccagaagcctttgcctcttttcaggcatcaaaaatgggttttgtcattgtctttgtctttgagagcagcagtttgaggtctgactccttcagttgtcctgtgagctgggcgttgcagtctgctcgaatcaagtgttggaaccccccccacccctcagcccatcgtgaaacgacagctgtcagcctggggggcggctgctgaggaggtgcagcaggaatggggctgggccctgaggttttactttccgagccaatggcccctggaacatgccagcacacactgccatgtcctggggctaagagctgcctttagggacaggctcgtgttgtccagtttgccctgagagatgcacctgaccaggggcccgtcgtggctgcaacccacggtggtatgttagtgtttccaggcagttgtcagcagctgccgggcagtgtgtgtgtgcgacagcaggagagttcctggaggaaagggactggggacactttctcagaggttctcctgcctggaatcaagtgatgcgtgtccagaaggcaagagagggcggctccgcctggttaaagtttgggaacgggacggagccaactcctccttccaggactgtgggccccactcttttgcgctaacacttcccctccctcgggtcactgaggaaagagctgctctgtcccctccagtgccctgaaggtccctggcctccactggctgccatggcagggggcccttctgacaggggctgccccaagctgctgttcctcctctgaaccttcaccccaacacccagcccgtggcccctgcaagggggaccctgccagctgggaaacccaaaggcctgtccaaacgtgcgcaccaggaccgaggggagctccctcccaacacctgctaggaattgccaacttttaaatggatggggttttttatgggttgaacctctgttaatacttttgtacactctcactacagtttatatttttataggctattttctcaaggtgtttctagattccacatatctattttatataacaagttattatgttatgtgtgtgactcccttgtgtgtatctgtgccagcctcagcctccgagttgcttttccctctggccctgactctcactgactcaccgatgtgatgtgcaggcccacttcttaccccagatagcctcgggcgctgcctgtagtcatgctgacagctgtacagtagccgccaagactgctgacagctggagacggttctggtttcaactacggtatattgatatcggaagtattctagacagatcctcggttgggttttctagctacatgtttgtattgcacagatccccacctgccatcctatagtgttgtcttcctgtgtgttccggggcttctgggcagctgggcctgcccggggaagtccttgcaggtgggaggccatacagagacccactgtgtgccactgaacgtcccactgctgctgggcaactggaggactgcagggggcgccaggtgactctctccttttatatcacagcagctcctgtgctgaccttcaagttacgttttggaactgtaatactaaaggaagaaataaactactaatttgtataata

SEQ ID NO: 189562 - DNA, 6086 bp, Homo sapiens
  Payload ID: 17431
  Gene Symbol: TBC1D2B
  Gene Name: TBC1 domain family, member 2B
  Uniprot ID: Q9UPU7
  ENST ID: ENST00000409931
  CDS Start-End: 73-2817
gggggtagggggcgcagcggccgcggcgcggaggcgcagggcgcgggcgcctacggttggcgcgcggtagcgatgccgggggccggagcccgggcggaggagggcggcggcggcggcgagggcgcggcgcagggggcggccgcggagcccggggcgggtccggcgcgggagccagcgcggctgtgtggctatctgcagaagctgtcgggcaagggccccctgcgtggctaccgcagccgctggttcgtgttcgacgcgcgccgctgctacctttactatttcaagagtccgcaggacgcgctgcccctcggccacttggacatcgcggacgcctgcttcagctaccagggccccgacgaggcggcggagccgggcacggagccgcccgcgcacttccaggtgcacagcgcgggagccgtcacggtgctcaaggctcccaatcgtcaactcatgacttactggttacaggagcttcagcagaagagatgggaatattgtaacagtcttgacatggtcaagtgggacagcaggacctctccaactcccggggattttcctaagggtcttgtagccagagataacactgatttaatttacccacacccaaatgcttctgcagaaaaagccagaaatgtcctagctgtggagactgtgcctggagagctggtgggagaacaagctgcaaatcagcccgccccagggcatccaaattccattaatttttactctttgaaacagtggggcaatgagctcaagaattcgatgtcttctttccgtcctgggagaggacataatgatagtcggaggactgtgttttataccaatgaagagtgggaacttttagacccaacccctaaggacctagaggagtccatagtacaggaagaaaagaagaagctgacccctgaaggaaacaaaggagtaactggctcaggattcccctttgattttggacgtaacccctacaaaggaaagcgccctttgaaagacataattgggtcgtacaaaaatcgtcacagcagtggtgacccttcaagtgaaggcacatcaggcagtggcagcgtcagcatcaggaagccggcctccgaaatgcaactgcaggtccagagccagcaggaagagctggaacagttaaagaaagacctgtccagtcagaaggagcttgttcgactgctccagcagacagtccggtcatcccagtatgacaagtatttcacaagcagccggctctgtgagggggtcccaaaggacacgctcgagcttctgcaccaaaaggatgatcagattctgggccttaccagccagctggagaggttcagcttggagaaggagagtcttcagcaggaagtaaggacgctgaagagcaaagtgggcgagctcaacgagcagctgggaatgctcatggagaccatccaagccaaggacgaggtcatcatcaagctcagcgagggcgagggcaacgggcctcctcccaccgtggcgcccagctccccttcggttgtgcctgttgccagggaccagctggaactggacaggctgaaagataatctacaggggtacaaaacccaaaacaaatttctaaataaggagattttggaactctcagctctacgaagaaatgcagaaaggagagagagggatctgatggcaaagtattctagcctggaagccaagctctgccagatagaaagtaaatacctgatattgctccaagaaatgaagacaccagtgtgctcagaagaccaggggcccacccgggaggtcatagcccagttgctggaggatgctctgcaggttgagagccaagagcagccggagcaagcatttgttaaacctcatcttgtcagtgaatatgatatttatgggttcaggactgtacctgaggatgatgaggaagagaaattggttgccaaggtccgcgcgttggatctgaagactctctacctcacagaaaaccaggaagtctccactggggtcaagtgggaaaactattttgcaagtacagtgaacagggagatgatgtgctctccagagttaaaaaacctcatccgtgcgggcattccccacgagcaccgttccaaggtgtggaagtggtgtgtggaccgtcacaccaggaagttcaaggacaacactgagcctggccacttccagaccttgctgcagaaggcgctggagaaacagaacccagcctccaagcagattgagctggacttgctgcgaactctgcccaacaacaaacattactcctgccccacctcagaaggcatacagaagttacgcaatgtcctcctcgccttctcctggcggaatccagatatcggctactgtcaaggcctaaacaggttggtggcagtggccctcctgtacctggaacaagaagatgctttctggtgtctcgttaccatagtggaagttttcatgcctcgagactattatacaaagactcttttaggatcccaggtggaccagcgggtgttcagagaccttatgagtgagaagctgcctcggttgcatggccactttgaacagtacaaagtcgactacactctcatcactttcaactggtttctggtggtatttgtggatagtgtcgttagtgacatcctctttaaaatatgggactctttcctttatgaaggaccaaaggttattttccgttttgctctggcactttttaagtacaaggaagaggagattttgaaattgcaagattcgatgtctatatttaagtatctccgctacttcactcgcactatccttgatgctagatccggaaccgacgcgcctaccacttggagaaagtccggctggagctgaccgagctggaggccatccgtgaggacttcctgcgtgagcgggacaccagccctgacaagggtgagctggtcagtgacgaggaggaggatacctgagtgggctcgggatgctgctcttccttccttcacaaccaaagtgtgcccaaagggtgaaagtgcacttaaaagccagaatgtaacgtgtgtgtcctctggggatctgctgggcagatgtcccaagccaggctgcccttcctcatttcccactgtgcggggggcaggggtgggaggtctaatctgtttacaaccatttccgtgccatgcttttggttacacgtatctcagtcacgctttctgcctggttggtggatcctcaggcttaccagtggctatttgcaagagcctgtttccagcctccgtcagcctgtcggtgctctgaccctctgaaaccttgctttgctgggcatctccccatattctctctcctgtacatagtgggcagtggtgtgtggttttgaatggcagtgctataaaggatgccagctgtgctttaggcacctgtaggccagagggttgctgcctcaggcataaggttggtatgaaaaggggctgccttagaaaagcaggcacatcccttgttcagaaatggccactgtaggaaagcctgtgaacctcccaccagtggctttaagctgccagccatgccccatttctagaatagcctttgctcttccacacgcaacccttccatcagtgtcttccagcctgcatggggagggcctggctgcccagacacccaccctcacttctcatggccagcctgtgtttgcagatcactgggctgctctgtccccagcttgccccgtgccaggcatggctctgtgagattctgtggaatgcccttcttgacttgtggaaatcattcaccaagtacgatgggatgggattccaagtaaacagtggaccgtcatattgcaaagcaggcccacgcctgggctggccttggttgaggggatggaggaatgttttcgggggtgctttgcagggcagtggtgcagccgcagcgtgaacgctcttggacagctgaaaaccatggcctccttggggatggccagtgctcctggtgtctccacctgcctgggttgtgcaggaggccggctgccagtgcctggggctgggaaacttttttgcttggggcaggcttgggtgagctctcccagatgtgtgcccaccccaccactgcctggaacatccttgttctctgccaggatgcaggggcactgttgcctctgacacagcagtttctgggaactcagaggactgcctttctgaaggctggggagaggctttgagcaaggagcttgtttttgcttaatcgctctagaccatccctgatgcgtagatgtgagaggatgttttctggcacagtgttatgaaaatacaagataaatgatctcagtggaatgtttcatattacccgaaaaaaactggaaatcatcctttgttgtgaacacactgagactaagaattgaagcaatgcagttttaagaagtatttttcctattttttgctgtcaactttttggcaatgccacggcaaagttggtgtttcagcacatgctagagtgagctccggcttcgtgtctttaaccaactccactaatgtttcactgggtagacggagctggcctctatatttagccagaagcctttgcctcttttcaggcatcaaaaatgggttttgtcattgtctttgtctttgagagcagcagtttgaggtctgactccttcagttgtcctgtgagctgggcgttgcagtctgctcgaatcaagtgttggaaccccccccacccctcagcccatcgtgaaacgacagctgtcagcctggggggcggctgctgaggaggtgcagcaggaatggggctgggccctgaggttttactttccgagccaatggcccctggaacatgccagcacacactgccatgtcctggggctaagagctgcctttagggacaggctcgtgttgtccagtttgccctgagagatgcacctgaccaggggcccgtcgtggctgcaacccacggtggtatgttagtgtttccaggcagttgtcagcagctgccgggcagtgtgtgtgtgcgacagcaggagagttcctggaggaaagggactggggacactttctcagaggttctcctgcctggaatcaagtgatgcgtgtccagaaggcaagagagggcggctccgcctggttaaagtttgggaacgggacggagccaactcctccttccaggactgtgggccccactcttttgcgctaacacttcccctccctcgggtcactgaggaaagagctgctctgtcccctccagtgccctgaaggtccctggcctccactggctgccatggcagggggcccttctgacaggggctgccccaagctgctgttcctcctctgaaccttcaccccaacacccagcccgtggcccctgcaagggggaccctgccagctgggaaacccaaaggcctgtccaaacgtgcgcaccaggaccgaggggagctccctcccaacacctgctaggaattgccaacttttaaatggatggggttttttatgggttgaacctctgttaatacttttgtacactctcactacagtttatatttttataggctattttctcaaggtgtttctagattccacatatctattttatataacaagttattatgttatgtgtgtgactcccttgtgtgtatctgtgccagcctcagcctccgagttgcttttccctctggccctgactctcactgactcaccgatgtgatgtgcaggcccacttcttaccccagatagcctcgggcgctgcctgtagtcatgctgacagctgtacagtagccgccaagactgctgacagctggagacggttctggtttcaactacggtatattgatatcggaagtattctagacagatcctcggttgggttttctagctacatgtttgtattgcacagatccccacctgccatcctatagtgttgtcttcctgtgtgttccggggcttctgggcagctgggcctgcccggggaagtccttgcaggtgggaggccatacagagacccactgtgtgccactgaacgtcccactgctgctgggcaactggaggactgcagggggcgccaggtgactctctccttttatatcacagcagctcctgtgctgaccttcaagttacgttttggaactgtaatactaaaggaagaaataaactactaatttgtataat

SEQ ID NO: 189563 - DNA, 948 bp, Homo sapiens
  Payload ID: 17431
  Gene Symbol: TBC1D2B
  Gene Name: TBC1 domain family, member 2B
  ENST ID: ENST00000435468
  CDS Start-End: 75-948
cattcagagggaggctccaggagggaacagtgttcacttggcatctttcggtatttctgggagggtgaattgcaatgatcaccaccaccaaagagctggctcccaatcgtcaactcatgacttactggttacaggagcttcagcagaagagatgggaatattgtaacagtcttgacatggtcaagtgggacagcaggacctctccaactcccggggattttcctaagggtcttgtagccagagataacactgatttaatttacccacacccaaatgcttctgcagaaaaagccagaaatgtcctagctgtggagactgtgcctggagagctggtgggagaacaagctgcaaatcagcccgccccagggcatccaaattccattaatttttactctttgaaacagtggggcaatgagctcaagaattcgatgtcttctttccgtcctgggagaggacataatgatagtcggaggactgtgttttataccaatgaagagtgggaacttttagacccaacccctaaggacctagaggagtccatagtacaggaagaaaagaagaagctgacccctgaaggaaacaaaggagtaactggctcaggattcccctttgattttggacgtaacccctacaaaggaaagcgccctttgaaagacataattgggtcgtacaaaaatcgtcacagcagtggtgacccttcaagtgaaggcacatcaggcagtggcagcgtcagcatcaggaagccggcctccgaaatgcaactgcaggtccagagccagcaggaagagctggaacagttaaagaaagacctgtccagtcagaaggagcttgttcgactgctccagcagacagtccggtcatcccagtatgacaagtatttcacaagcagccggctctgtgagggggtcccaaaggacacgctcgagcttctgcaccaaaaggatgatc

SEQ ID NO: 189564 - DNA, 547 bp, Homo sapiens
  Payload ID: 17431
  Gene Symbol: TBC1D2B
  Gene Name: TBC1 domain family, member 2B
  ENST ID: ENST00000465531
  CDS Start-End: 1-368
attgcaagattcgatgtctatatttaagtatctccgctacttcactcgcactatccttgatgctaggtcctgcctgccgctctgagcagtacacactctgcctctgcacacctaggggccatggggctcagcctgggactggcacccaggtgcccaccgcccaagacccaaagacactctctctgccagaacagcaccttactgcctgtgtcaggatgaaggcagacctccaccgtcacctcctcgctgtcctcctggttctcatacacccccttttctcctatgtagcctcccctctggctgtgcctggaggggtggcagagtgtggagttttagtgggttgggtgcccagaccctctgcttcctagctgaaaccatgggcagctcatttggcctctctgaacctcagtgtcctcctctgtgaagtgggagcaacaatcctgcctcctccaagccctggagggaggactgcatgtgttcttgcatgtgtaggctcggcccttgcccggcacatcctaagagctcgatccatgccagctgctgctag

SEQ ID NO: 189565 - DNA, 2063 bp, Homo sapiens
  Payload ID: 17432
  Gene Symbol: TBC1D3
  Gene Name: TBC1 domain family, member 3
  Uniprot ID: Q8IZP1
  ENST ID: ENST00000620215
  CDS Start-End: 99-1748
gttacacacaggcagtggtatctgtgagcagctctgtggactcaaaggttttctccctgagaggcatgacccaggccagctgattcatcagaatcaggatggacgtggtagaggtcgcgggcagttggtgggcacaagagcgagaggacatcattatgaaatacgaaaagggacaccgagctgggctgccagaggacaaggggcctaagccttttcgaagctacaacaacaacgtcgatcatttggggattgtacatgagacggagctgcctcctctgactgcgcgggaggcgaagcaaattcggcgggagatcagccgaaagagcaagtgggtggatatgctgggagactgggagaaatacaaaagcagcagaaagctcatagatcgagcgtacaagggaatgcccatgaacatccggggcccgatgtggtcagtcctcctgaacactgaggaaatgaagttgaaaaaccccggaagataccagatcatgaaggagaagggcaagaggtcatctgagcacatccagcgcatcgaccgggacgtaagcgggacattaaggaagcatatattcttcagggatcgatacggaaccaagcagcgggaactactccacatcctcctggcatatgaggagtacaacccggaggtgggctactgcagggacctgagccacatcgccgccttgttcctcctctatcttcctgaggaggatgcattctgggcactggtgcagctgctggccagtgagaggcactccctgcagggatttcacagcccaaatggcgggaccgtccaggggctccaagaccaacaggagcatgtggtagccacgtcacaacccaagaccatggggcatcaggacaagaaagatctatgtgggcagtgttccccgttaggctgcctcatccggatattgattgacgggatctctctcgggctcaccctgcgcctgtgggacgtgtatctggtagaaggcgaacaggcgttgatgccgataacaagaatcgcctttaaggttcagcagaagcgcctcacgaagacgtccaggtgtggcccgtgggcacgtttttgcaaccggttcgttgatacctgggccagggatgaggacactgtgctcaagcatcttagggcctctatgaagaaactaacaagaaagaagggggacctgccacccccagccaaacccgagcaagggtcgtcggcatccaggcctgtgccggcttcacgtggcgggaagaccctctgcaagggggacaggcaggcccctccaggcccaccagcccggttcccgcggcccatttggtcagcttccccgccacgggcacctcgttcttccacaccctgtcctggtggggctgtccgggaagacacctaccctgtgggcactcagggtgtgcccagcccggccctggctcagggaggacctcagggttcctggagattcctgcagtggaactccatgccccgcctcccaacggacctggacgtagagggcccttggttccgccattatgatttcaggcagagctgctgggtccgtgccatatcccaggaggaccagctggccccctgctggcaggctgaacaccctgcggagcgggtgagatcggctttcgctgcacccagcactgattccgaccagggcacccccttcagagctagggacgaacagcagtgtgctcccacctcagggccttgcctctgcggcctccacttggaaagttctcagttccctccaggcttctagaagcatctgggccagggctcatggctggataatttccctaggcttaacaacccaagcaagcttcgcatcctcgttttatttttggttaaacttatgaaaatgtattaagaaagagtgcagctcgagagagattcagagatggaacacaccagaccccagatcacaaagccaaccatgcccagcccctcccagcacccccagccccacgaccatcgttctgaattctgacgacaccgtgagcctgcctttgtacttcaaactcatggaaggataaccaccttcatgttttgaaataaatgtttcctgttgaaatga

SEQ ID NO: 189566 - DNA, 582 bp, Homo sapiens
  Payload ID: 17433
  Gene Symbol: TBC1D30
  Gene Name: TBC1 domain family, member 30
  ENST ID: ENST00000544457
  CDS Start-End: 214-582
gcagatgcctgctggcttccctgcgctcggcggctcccgcggtgccccgtaagtccccgtgaccctccagcaccagccggctgtgcgctccctgctcccacgggccggtcagccgcagacactcacccagctccgcgagctcagccgctcagcgagtggggtagcggggaccgagacggacggtagccgtgccagagcccggggcgctctcggatgcggcaggacaagctgaccgggtctctgaggcgcggggggagatgcctgaagcggcagggcggcggcgtgggcaccatcctgagcaatgtgctcaagaagcgcagctgcatttcccggaccgcgccccggctgctgtgcaccctggagccgggagttgataccaagttgaaattcactcttgagccatctttaggtcaaaatggttttcagcagtggtacgatgctctcaaggcagttgccaggctatccacaggaataccaaaggaatggaggagaaaggaccttcaccgcacaggctgtagttcttactgtggccaggaggctgagcaggacagggttgtgttgaagcgggtgctgctggcctat

SEQ ID NO: 189567 - DNA, 2594 bp, Homo sapiens
  Payload ID: 17433
  Gene Symbol: TBC1D30
  Gene Name: TBC1 domain family, member 30
  Uniprot ID: Q9Y2I9
  ENST ID: ENST00000539867
  CDS Start-End: 309-2594
acgccgcctccgtctcccacgcgctcgctcgctcgctcgctcccgccctccccgcctcgagcgatctcctgcctcagccttgcaggctccgcactgcagatgcctgctggcttccctgcgctcggcggctcccgcggtgccccgtaagtccccgtgaccctccagcaccagccggctgtgcgctccctgctcccacgggccggtcagccgcagacactcacccagctccgcgagctcagccgctcagcgagtggggtagcggggaccgagacggacggtagccgtgccagagcccggggcgctctcggatgcggcaggacaagctgaccgggtctctgaggcgcggggggagatgcctgaagcggcagggcggcggcgtgggcaccatcctgagcaatgtgctcaagaagcgcagctgcatttcccggaccgcgccccggctgctgtgcaccctggagccgggagttgataccaagttgaaattcactcttgagccatctttaggtcaaaatggttttcagcagtggtacgatgctctcaaggcagttgccaggctatccacaggaataccaaaggaatggaggagaaaggtttggttgaccttggcagatcattatttgcacagtatagccattgactgggacaaaaccatgcgcttcactttcaatgaaaggagtaatcctgatgatgactccatgggaattcagatagtcaaggaccttcaccgcacaggctgtagttcttactgtggccaggaggctgagcaggacagggttgtgttgaagcgggtgctgctggcctatgcccgatggaacaaaactgttgggtactgccaaggctttaacatcctggctgcactaattctggaagtgatggaaggcaatgaaggggatgccctgaaaattatgatttaccttattgataaggtacttcccgaaagctatttcgtcaataatctccgggcattgtctgtggatatggctgtcttcagagaccttttaagaatgaagctgccggaattatctcagcacctggatactcttcagagaactgcaaacaaagaaagtggaggtggatatgagcccccacttacaaatgtcttcacgatgcagtggtttctgactctctttgccacatgcctccctaatcagaccgttttaaagatctgggattcagtcttctttgaaggttcagaaatcatcctaagggtgtcgctggctatctgggcaaaattaggagagcagatagaatgttgtgaaacagcagatgaattctacagcaccatggggcgccttacccaggagatgctagagaatgatcttctgcaaagccatgaactcatgcagactgtttattccatggctccgttccctttcccacaattggcagagttgagggaaaaatacacctacaacattacaccgttcccagccacagttaaacccacctcagtttctggacgacatagtaaggccagagacagtgatgaagagaatgacccagacgatgaggatgctgtcgttaatgcagtggggtgtcttggaccttttagtgggttcctggctcctgaactgcagaagtaccaaaaacaaattaaagagccaaatgaggagcagagtctgagatctaataacattgcagagctgagtccaggagcaatcaattcctgtcgaagtgaataccatgcagcttttaacagtatgatgatggaacgcatgaccacagatatcaatgcactgaagcggcagtactctcgaattaaaaagaagcaacagcagcaggttcatcaggtgtacatcagggcagacaaagggccagtgaccagcattctcccgtctcaggtaaacagttctccagttataaaccaccttcttttaggaaagaagatgaaaatgactaacagagctgccaagaatgctgtcatccacatccctggtcacacaggagggaaaatatctcctgtcccctacgaagaccttaagacgaagctcaactccccgtggcgaactcacatccgagtccacaaaaagaacatgccaaggaccaagagtcatccgggctgtggggacaccgtagggctgatagatgagcagaacgaggccagcaagaccaatgggctgggggcagcagaggcattcccctctggttgtacagcgacagctgggagagaaggcagcagccctgaaggcagtaccaggaggacgatcgaggggcagtctccggagccggtgttcggagatgctgatgtggatgtgtctgcagttcaggcgaagttgggagccctggaactgaaccagagggatgctgcagctgaaactgagctcagggtgcacccaccctgccagcggcactgcccagagccgccgagtgcacccgaagaaaacaaagccaccagcaaagctccccaaggcagcaactcaaaaacccccatctttagcccttttcccagcgtcaagcccctgcggaaatctgctactgccaggaacttgggattatatggccctacagaaagaaccccaactgtgcactttcctcaaatgagtaggagcttcagcaaacccggcggtggaaacagtggcactaaaaaacgatga

SEQ ID NO: 189568 - DNA, 7433 bp, Homo sapiens
  Payload ID: 17433
  Gene Symbol: TBC1D30
  Gene Name: TBC1 domain family, member 30
  ENST ID: ENST00000542120
  CDS Start-End: 246-2189
gactgcctgcttgcaggctgtgtcacagaagagaacatggcagaacagtatgctcaggagttgataccaagttgaaattcactcttgagccatctttaggtcaaaatggttttcagcagtggtacgatgctctcaaggcagttgccaggctatccacaggaataccaaaggaatggaggagaaaggtttggttgaccttggcagatcattatttgcacagtatagccattgactgggacaaaaccatgcgcttcactttcaatgaaaggagtaatcctgatgatgactccatgggaattcagatagtcaaggaccttcaccgcacaggctgtagttcttactgtggccaggaggctgagcaggacagggttgtgttgaagcgggtgctgctggcctatgcccgatggaacaaaactgttgggtactgccaaggctttaacatcctggctgcactaattctggaagtgatggaaggcaatgaaggggatgccctgaaaattatgatttaccttattgataaggtacttcccgaaagctatttcgtcaataatctccgggcattgtctgtggatatggctgtcttcagagaccttttaagaatgaagctgccggaattatctcagcacctggatactcttcagagaactgcaaacaaagaaagtggaggtggatatgagcccccacttacaaatgtcttcacgatgcagtggtttctgactctctttgccacatgcctccctaatcagaccgttttaaagatctgggattcagtcttctttgaaggttcagaaatcatcctaagggtgtcgctggctatctgggcaaaattaggagagcagatagaatgttgtgaaacagcagatgaattctacagcaccatggggcgccttacccaggagatgctagagaatgatcttctgcaaagccatgaactcatgcagactgtttattccatggctccgttccctttcccacaattggcagagttgagggaaaaatacacctacaacattacaccgttcccagccacagttaaacccacctcagtttctggacgacatagtaaggccagagacagtgatgaagagaatgacccagacgatgaggatgctgtcgttaatgcagtggggtgtcttggaccttttagtgggttcctggctcctgaactgcagaagtaccaaaaacaaattaaagagccaaatgaggagcagagtctgagatctaataacattgcagagctgagtccaggagcaatcaattcctgtcgaagtgaataccatgcagcttttaacagtatgatgatggaacgcatgaccacagatatcaatgcactgaagcggcagtactctcgaattaaaaagaagcaacagcagcaggttcatcaggtgtacatcagggcagacaaagggccagtgaccagcattctcccgtctcaggtaaacagttctccagttataaaccaccttcttttaggaaagaagatgaaaatgactaacagagctgccaagaatgctgtcatccacatccctggtcacacaggagggaaaatatctcctgtcccctacgaagaccttaagacgaagctcaactccccgtggcgaactcacatccgagtccacaaaaagaacatgccaaggaccaagagtcatccgggctgtggggacaccgtagggctgatagatgagcagaacgaggccagcaagaccaatgggctgggggcagcagaggcattcccctctggttgtacagcgacagctgggagagaaggcagcagccctgaaggcagtaccaggaggacgatcgaggggcagtctccggagccggtgttcggagatgctgatgtggatgtgtctgcagttcaggcgaagttgggagccctggaactgaaccagagggatgctgcagctgaaactgagctcagggtgcacccaccctgccagcggcactgcccagagccgccgagtgcacccgaagaaaacaaagccaccagcaaagctccccaaggcagcaactcaaaaacccccatctttagcccttttcccagcgtcaagcccctgcggaaatctgctactgccaggaacttgggattatatggccctacagaaagaaccccaactgtgcactttcctcaaatgagtaggagcttcagcaaacccggcggtggaaacagtggcactaaaaaacgatgatgtctccccgaaactttgtatctggactcaccttttcacagtagtataagggttgcagctgaatggctctaaaagagttttatttgtccagtgaaaatgaataggttcagggatgagcaacagcccataaaaaatgggaactggaagttttataataggagttagaacagggctgttttcccagctacttgctaactgacgaagtggattcttgtggcaaaataaatattgtggttttatagtgtgaagttttcccaatttttcattgtgagctgtttaaaaaagactatatctagattgttaactctcgtccatccttctgttctgggggccttcagagtccctgtgacagcacccccaaaccttccagttctctgggtgttactaatactcaagcatgcacataccagcttgctaggacagaaactgtaaaaagaaagtaagtttcttcgttacaaaaaacttcctgattttccttttcatgctttacggaggggattgtgtcgtgtgagatttcccacagtaccagtttcaaattttttttttattcttatgctaaatcataggagaaaaatctagatagcctttctttaactgtctatttctacctgcaaaatgaagaaaacctttcatctgttgaaatttcaatcgataacccagctgaagatcttatgcacaggacacacttggcatatgctttacgcagttgctccggacagcttgctcgcgccactgagcttttcctgaggtttgtgttcgcctctcaaggagagctttgatcctcagtggtacggatgacttgatgggctccatgcggagcctggcctgcatcccccaccacacagctcactcacccaccagctctagactgcagacgcacaaggcctctgctcagaagccagaacacagcacctgtgactctgttacttgaattttgtgctttttgattggagtcctttgttgagtactttgttaattgaacactgcctttctctggagaaggccccagtgctttctagctccctctcactcctgccctttctagctctctctcacccagcgggtcagggatagcacctcttgtctccactatgcagatgggaactctgagccacacagaggtgaagtagcacttcagttactcaaggtcagtactctcggtattccaagtgacttagccacatttccttcagtgcaataggtgggtttaatgctctttgtacacagatgtattggctacatagcgtgtaaaaaccaagactgggaagccattcactaaaatccctcctgactcaaaggacctgtctccagatggtacagagtcccttgatggcattttacaaaaccagctctgacttccttatcctgaacagggagtttattttaaaaatgcttcatgcacctgttatttggctgaacagaaggctcactcctcaatccccttctcctcgccatcattagaggaatagactcagccttcatgtttgtctctggaagacgattggcgatacttgcaggaatattgttgatgcagccaatattaatttgagctaatggattgttaattctgaaacgaaaactgtaactgtagagcaggcttttactatgagaggtactactttttataatagagaatgtggttgtgtgggctttttttgaacagaaaacacaacaatgacctataccgtgagaaaagccattttatcttcttcgtggtatttttacccccaaaggaactgaagatggaaaatatgactaataagttattgcagttttggtcttgaattctgtgccatctgaagttagcatccagcttcttaaaaagcagccacgcctacagcctgttttttgggaaggctgtaggtggagagatgggcttattttgcataccaccctcagggcccagagacccactgcattttccaaagttaagcaaatgacaccattttcttccatcagctaaactttacagataatagtgtttccacctcatatccttttctttgccccttctcaaatgagtcagaatagtcatgttccccttgagggatgtctgacttgaatggagaattgttctttcctctcttgaatcagctcactagctccctgatggtctgggttcaaggaaatggttaatgaggtagaggccacttatacaagtccttgggattgtaccattgctgtccacaaacttagtatcaacaacacatgctgtgccctgtgaacactctcctctcacctatttccagggttggtcttcctgagaaggggatggatgaggtaacacacagtttgggatacgtatctgttgaatgaatgaataagtgaaaggataatagtcctctgaggtaaaaatggccttgtcagaattttgaaaatccaacagattcctattaaagcactctgtgtaccaataacatgcatgcattgtaccaagtaatcacaatgtgaattggtcaatttatgagccttgcctactttagaaaataaagaaacctgcagtagcctctaccacacagcatgtacaaagaccagtatggacttgctatcttccctatgtattggacactgtatgcaaacaccagaagtacttaacaagtagtggtttcttgatttttagatatgtctgtagcctcttagcccttttgccgggaatcaactcattctgatgcctctgcacctcagttcctcttacaaaagcctccagatgatctaaatctagttagcaatgtcagcctgtggactgcagctgtttgggacattgtattcctttgtttgtctcttgttgttctgaaggattgtattgatcacaaagctatatgcataaagattctcattgttgtaactgttctgccattttctgagtgcaagcatggaacactgttgtgacagtcccttctcccttcttccttcttccttcacccccaaccccagaccccccttggtcacatgaaccagggaaacagcccaataagctctatctcccccagtctaatcgctgggttgcagggtggcctgtgacctgcccagcatttgcagactcgctggttcctgaatatgagtaagcacagagtttacctagagagtttacctaaaattaacctttagatctactatttatttttgtcttaataaaatgaacaataaatatagtttagctgcatggcattaaggattctgtatgaatagatgtatagttgctgccatctccccatataaaaactctctttacatcgtttctgagccactttctttgctgtctgcagcatttaaaatatattatttttcctaattagaaaagtcacaggttttagaaaattgggaaaacaaaaagagcataaagaatcatcaatactctgatatagatatagatctttccagtacgtttgtgtatgtgtgtacacgccattatctacaaaaaagttatgttgaacatggtagtttaagctgtctttctggtaaatgctcttatacaatatgatttttagtgactaatattccctaatgtgttcatgccagaattcacataaccagtaccttgtcaaataggaggtttctgattagatagtagtagagacagtatcctgttacatgtatgtacatagcccgaattattttcttaggatatgcgtatagaagtggagttgaagggtcaggaaatatgtccatttttaagatacatatatctccaaattgccattcttaaaggttggagttatacaagtagtgaatgagaatgcctgcttctctacatcctggaagaggcagcagtctctttccttttttttcctttctatgacttctagtgtggaagtgccaacagaagtgttttagaagcagtgataatgaacactcataacacccatacctcattcctgacttttaaaagaagcattaagtaagatgttgaggtttctggtaggtgcctattattaggttaagaaaattcccttttattctttgcttgctaagagttttcttcatcaacaggtattgaatttcataaaaagaactttaattgtatcttttgagaagggaatagtacttgagacttggtatcctgaactcaaagaaatagccattactaggttttgtcaaagaataccagatattttagagttggaagttatgcagtaaaagctttatgtgcaaatgttcattgaagtattaaatgtactaatggaaacctgaaaacaatataaacatctgggaataggggagatgtttggatgaattatgattcatccccaggatggaaatgtgaaggccggtgagtatttggaccattgaagtgggagttatctgttatccacatcaggcagctcagagtaaagtcagcaagtctacagtcatagagccaccaggatacagtgatggatgggaggcctttgctggacagtggctgaaggcagaactgttggagtggttcttccacaaaggcagccagtgctcacctgaatggggactggtactgtaggtattgggtcagctttcatgccgttccctgctggccatctcccaatgctgaatgtctgactcagttcaggctgctgtaacaaagtaccatagactgaggtggcttaaacacagacatttctttctcacagttctggaggctgagaagtcaaagatcaacgtgtctgcaaatttggtatctggtgaggaagggccctcttcctggtttgcagatggctaccttctcactgtgtcctcacacaatggagaaagggagtatgttttggtctcttcctcttctgataagggcactaacctcatcatgagggtcccatcctcctggtgtcatctaaacctaattacctcccaatggccccgccttcaaataccatcacgttgaaggttgcttccttcctggtcgtttgctctggtgagaccaaatgacctgcaaagtgtcacttgattccattctctccatcccttccatcccaggcaatctttatctagctacaccaacctgtgccccaggggcttcaagagttgttgttgttttaacattaaaaaaccagaaagttcacttgtttcttagtgtttacatccttgctataacaattctagttttcctttaggcaatgctgatcactgggaaggaggtggatcaattctcctatgggaccaacagttttctgggaagaaacttcctgatacctcagcctaggaatctccctatccctggagagtccaggaatctatattaaaacatgaaacaaagcaaaaaataaaaaaaaa

SEQ ID NO: 189569 - DNA, 510 bp, Homo sapiens
  Payload ID: 17433
  Gene Symbol: TBC1D30
  Gene Name: TBC1 domain family, member 30
  ENST ID: ENST00000544190
  CDS Start-End: 72-510
gcggccgcagcggtgccggcgactcccgcgtgctgcaggagctgcaggagcgaccgagccagcggcatcagatgctgtacctgcggcagaaagacgctaatgaactgaagacgatccttcgagagctaaagtacagaattggcatccagtcggccaagttacttcggcatctgaagcagaaagataggcttctgcataaagtgcagaggaactgtgatattgtgactgcctgcttgcaggctgtgtcacagaagagaagagttgataccaagttgaaattcactcttgagccatctttaggtcaaaatggttttcagcagtggtacgatgctctcaaggcagttgccaggctatccacaggaataccaaaggaatggaggagaaaggtttggttgaccttggcagatcattatttgcacagtatagccattgactgggacaaaaccatgcgcttcactttcaatgaaaggagtaatcctgatgatgactccatgggaattcagatagtca

SEQ ID NO: 189570 - DNA, 721 bp, Homo sapiens
  Payload ID: 17433
  Gene Symbol: TBC1D30
  Gene Name: TBC1 domain family, member 30
  ENST ID: ENST00000539120
  CDS Start-End: 448-721
gatgcctgctggcttccctgcgctcggcggctcccgcggtgccccgctcgcaggaagccagaccttgcgagaggtgtgtgggggcggagagtggcacaggtttgacactgcaggtcggaggaggaagacagtggctgcaaaggcaaaatcgggtgttattttcccaagagtcccttcagcgtgagtgccggggtcagctcgaactggagcctgtaatttgtgagtgcgagtggggagcagcaggagatccttttcataggagttgataccaagttgaaattcactcttgagccatctttaggtcaaaatggttttcagcagtggtacgatgctctcaaggcagttgccaggctatccacaggaataccaaaggaatggaggagaaaggtttggttgaccttggcagatcattatttgcacagtatagccattgactgggacaaaaccatgcgcttcactttcaatgaaaggagtaatcctgatgatgactccatgggaattcagatagtcaaggaccttcaccgcacaggctgtagttcttactgtggccaggaggctgagcaggacagggttgtgttgaagcgggtgctgctggcctatgcccgatggaacaaaactgttgggtactgccaaggctttaacatcctggctgcactaattctggaagtgatggaaggcaatgaaggggatgccctgaaaattatgatttaccttattgata

SEQ ID NO: 189571 - DNA, 3502 bp, Homo sapiens
  Payload ID: 17434
  Gene Symbol: TBC1D31
  Gene Name: TBC1 domain family, member 31
  Uniprot ID: Q96DN5
  ENST ID: ENST00000287380
  CDS Start-End: 91-3291
aaatttcccgggccgggagcgctgggcctgccgggaaggcgctgggacggttacccagcgggccgccggcggtcgtgggcaagcttcgccatgcagagcactgacctaggcaacaaggagagcggcaagatatggcaccgcaagccgtccccggccacgcgggacggaattatagtgaacattattcacaacacttccgattaccatccaaaagttttgcgatttttgaatgtggcttttgatggcacaggcgactgcttaattgctggggaccaccaaggaaatatttatgtttttgacttacatggaaacaggttcaatcttgttcagcgaacagcacaagcttgcacagctctggcctttaatcttcgtaggaaatctgaattccttgtggcattagctgattattctattaaatgttttgatacagtcaccaaggagctagttagctggatgagaggacatgaatcatcagtattttcgatctctgtgcatgcatcagggaaatatgccatcacaacttcttctgatacagcacaattatgggacttggatacctttcagagaaaaagaaagctgaatattcgccagtctgtgggtatacagaaggttttctttctaccattaagtaataccatcctcagctgttttaaagataattccatttttgcctgggaatgtgacacacttttttgcaaatatcaattgccagctccacctgaaagctctagtatattatacaaagtgtttgctgtaaccagagatggccgaatcctggctgctggaggcaagtcaaatcatcttcatttgtggtgcttggaagctaggcagctctttagaattatccagatgcccactaaagttcgagccattcgccatctggaatttcttcctgatagttttgatgctggttctaatcaggttcttggagtactaagtcaagatggtattatgagatttatcaatatgcagacttgtaaacttctctttgagattgggagcctcgatgaaggaattagctcatcagcaattagcccacatggacggtacattgcatctattatggaaaatggaagtctaaacatatattcagttcaggctttaacacaagaaataaataagccacctccgcctttagtgaaagttattgaagatttgcccaagaataaactgagttccagtgatcttaagatgaaagtaacatcagggagagtacagcagccagcaaaatctagggaaagcaaaatgcaaactagaatattaaaacaagacctgactggtgattttgaaagtaaaaagaatgaattaccagatggattaaacaaaaagcgtttacaaatcttattaaaaggctatggtgaatatccaacaaaatacagaatgttcatttggcgctctctgctacaactgcctgaaaatcatactgcgtttagtaccctcatagataaggggactcatgtggcatttctcaaccttcagaagaaataccccatcaaaagtaggaagctactcagagtattacagagaaccttatctgcattagctcactggtctgtcatttttagtgacacaccatatcttccactcttggcatttccatttgtaaaattattccagaacaaccaactcatctgttttgaagttattgctactctcataatcaattggtgtcaacactggtttgaatattttcctaatcctcctatcaatattcttagcatgatagaaaatgttttggcatttcatgacaaggaactgctgcaacacttcatagatcatgatataacctcccagctatatgcatggcctcttcttgaaactgtgttctcagaagtgctgacaagagaggagtggctgaaattgttcgataatatcttttccaaccatccttccttccttctgatgactgttgtagcctacaacatatgttctagaacgcctctgctcagctgtaatcttaaagatgactttgagtttttttttcaccatcggaataacctggatataaatgttgtgattagacaagtttatcatctcatggagaccacgcctactgacattcatccagacagcatgcttaatgtttttgttgcactgacaaaagggcagtatccagtatttaatcaatatccaaagtttattgtggactatcaaacacaggaacgagaaagaataaggaatgatgaattggattacttaagagagaggcagacagttgaagatatgcaagctaaagtcgaccagcaaagagttgaagatgaagcttggtaccagaaacaggagctgcttcgtaaagctgaagaaacaagaagagaaatgctcttacaagaggaggagaaaatgatacaacaaagacagaggctagctgctgtgaaaagagagctgaaagtaaaggaaatgcacttacaagatgctgcaagaaggcgttttctgaagcttcagcaagatcaacaggaaatggaactaagaagactggatgatgaaattgggagaaaggtatatatgagagatcgagaaattgctgccacagccagagacctagaaatgagacagctggaactcgaatcacaaaagagactttatgagaagaatcttactgaaaatcaagaagctcttgcaaaagaaatgcgagcagatgcagatgcctatagacgaaaagtggatcttgaagaacacatgtttcataagctgatagaagcaggtgaaacccagagccagaaaactcagaaggtgattaaagaaaatttggcaaaggctgaacaagcatgcctaaataccgactggcagattcagtctttacataaacaaaaatgtgatgatctacaacgaaacaaatgttaccaggaagtagccaaactccttagggaaaacagaaggaaagaaatagagataataaatgcaatggtggaggaggaagccaagaagtggaaggaagctgaaggaaaagagttccgtttgagatcagcaaagaaagcttctgctctttcagatgcgtctagaaagtggtttttaaagcaagagataaatgcggctgtagaacatgctgaaaatccatgtcataaagaagaacccaggttccaaaatgaacaggactcaagctgtttgcctagaacctcacaattaaatgactcttctgaaatggatccctcaacacagatttctttaaatagaagagcagtagaatgggacaccacgggacagaatcttattaagaaagtgagaaatcttcgccagagactcactgcccgggctcgtcacagatgtcaaacccctcatcttttggctgcatagaatgcatgtcaccttgagacggtcgagagagagacctattttgcaatcagtgacattgatttttagattatttatttaaaattcctataaagatcagccctttgtacagaaaaatgtgtctataaaaattatgtgttatttaattctgatactttttggcttgtaaatggcttcttgaactttttacaataaaaatgttttagaaactgtt

SEQ ID NO: 189572 - DNA, 2985 bp, Homo sapiens
  Payload ID: 17434
  Gene Symbol: TBC1D31
  Gene Name: TBC1 domain family, member 31
  Uniprot ID: Q96DN5
  ENST ID: ENST00000327098
  CDS Start-End: 58-2970
ggaaggcgctgggacggttacccagcgggccgccggcggtcgtgggcaagcttcgccatgcagagcactgacctaggcaacaaggagagcggcaagatatggcaccgcaagccgtccccggccacgcgggacggaattatagtgaacattattcacaacacttccgattaccatccaaaagttttgcgatttttgaatgtggcttttgatggcacaggcgactgcttaattgctggggaccaccaaggaaatatttatgtttttgacttacatggaaacaggttcaatcttgttcagcgaacagcacaagcttgcacagctctggcctttaatcttcgtaggaaatctgaattccttgtggcattagctgattattctattaaatgttttgatacagtcaccaaggagctagttagctggatgagaggacatgaatcatcagtattttcgatctctgtgcatgcatcagggaaatatgccatcacaacttcttctgatacagcacaattatgggacttggatacctttcagagaaaaagaaagctgaatattcgccagtctgtgggtatacagaaggttttctttctaccattaagtaataccatcctcagctgttttaaagataattccatttttgcctgggaatgtgacacacttttttgcaaatatcaattgccagctccacctgaaagctctagtatattatacaaagtgtttgctgtaaccagagatggccgaatcctggctgctggaggcaagtcaaatcatcttcatttgtggtgcttggaagctaggcagctctttagaattatccagatgcccactaaagttcgagccattcgccatctggaatttcttcctgatagttttgatgctggttctaatcaggttcttggagtactaagtcaagatggtattatgagatttatcaatatgcagacttgtaaacttctctttgagattgggagcctcgatgaaggaattagctcatcagcaattagcccacatggacggtacattgcatctattatggaaaatggaagtctaaacatatattcagttcaggctttaacacaagaaataaataagccacctccgcctttagtgaaagttattgaagatttgcccaagaataaactgagttccagtgatcttaagatgaaagtaacatcagggagagtacagcagccagcaaaatctagggaaagcaaaatgcaaactagaatattaaaacaagacctgactggtgattttgaaagtaaaaagaatgaattaccagatggattaaacaaaaagcgtttacaaatcttattaaaaggctatggtgaatatccaacaaaatacagaatgttcatttggcgctctctgctacaactgcctgaaaatcatactgcgtttagtaccctcatagataaggggactcatgtggcatttctcaaccttcagaagaaataccccatcaaaagtaggaagctactcagagtattacagagaaccttatctgcattagctcactggtctgtcatttttagtgacacaccatatcttccactcttggcatttccatttgtaaaattattccagaacaaccaactcatctgttttgaagttattgctactctcataatcaattggtgtcaacactggtttgaatattttcctaatcctcctatcaatattcttagcatgatagaaaatgttttggcatttcatgacaaggaactgctgcaacacttcatagatcatgatataacctcccagctatatgcatggcctcttcttgaaactgtgttctcagaagtgctgacaagagaggagtggctgaaattgttcgataatatcttttccaaccatccttccttccttctgatgactgttgtagcctacaacatatgttctagaacgcctctgctcagctgtaatcttaaagatgactttgagtttttttttcaccatcggaataacctggatataaatgttgtgattagacaagtttatcatctcatggagaccacgcctactgacattcatccagacagcatgcttaatgtttttgttgcactgacaaaagggcagtatccagtatttaatcaatatccaaagtttattgtggactatcaaacacaggaacgagaaagaataaggaatgatgaattggattacttaagagagaggcagacagttgaagatatgcaagctaaagtcgaccagcaaagagttgaagatgaagcttggtaccagaaacaggagctgcttcgtaaagctgaagaaacaagaagagaaatgctcttacaagaggaggagaaaatgatacaacaaagacagaggctagctgctgtgaaaagagagctgaaagtaaaggaaatgcacttacaagatgctgcaagaaggcgttttctgaagcttcagcaagatcaacaggaaatggaactaagaagactggatgatgaaattgggagaaagaatcttactgaaaatcaagaagctcttgcaaaagaaatgcgagcagatgcagatgcctatagacgaaaagtggatcttgaagaacacatgtttcataagctgatagaagcaggtgaaacccagagccagaaaactcagaagtggaaggaagctgaaggaaaagagttccgtttgagatcagcaaagaaagcttctgctctttcagatgcgtctagaaagtggtttttaaagcaagagataaatgcggctgtagaacatgctgaaaatccatgtcataaagaagaacccaggttccaaaatgaacaggactcaagctgtttgcctagaacctcacaattaaatgactcttctgaaatggatccctcaacacagatttctttaaatagaagagcagtagaatgggacaccacgggacagaatcttattaagaaagtgagaaatcttcgccagagactcactgcccgggctcgtcacagatgtcaaacccctcatcttttggctgcatagaatgcatgtcacctt

SEQ ID NO: 189573 - DNA, 605 bp, Homo sapiens
  Payload ID: 17434
  Gene Symbol: TBC1D31
  Gene Name: TBC1 domain family, member 31
  ENST ID: ENST00000518684
  CDS Start-End: 401-605
gtcaggcaatctgtgagaatctgaaaggaagttgctctaaaataaattttttacgtgtgatttatatgaaaaatcggaggggcagaatgtcactattgtgattacatctacatgaattatagtgaacattattcacaacacttccgattaccatccaaaagttttgcgatttttgaatgtggcttttgatggcacaggcgactgcttaattgctggggaccaccaaggaaatatttatgtttttgacttacatggaaacaggttcaatcttgttcagcgaacagcacaagcttgcacagctctggcctttaatcttcgtaggaaatctgaattccttgtggcattagctgattattctattaaatgttttgatacagtcaccaaggagctagttagctggatgagaggacatgaatcatcagtattttcgatctctgtgcatgcatcagggaaatatgccatcacaacttcttctgatacagcacaattatgggacttggatacctttcagagaaaaagaaagctgaatattcgccagtctgtgggtatacagaaggttttctttctaccattaagtaataccatcctcagctgttttaaagata

SEQ ID NO: 189574 - DNA, 653 bp, Homo sapiens
  Payload ID: 17434
  Gene Symbol: TBC1D31
  Gene Name: TBC1 domain family, member 31
  ENST ID: ENST00000520368
  CDS Start-End: 521-653
acctgaaagcgataaaggaaggcttcgggccagaggaagaggtaggccgggctgatgaggccgagtttgccgaccaagggcacggcgacggtggcggcgaaccaatagcgcgtgatcgccgggatgctcctgaaccagtctccgatgtccgacatcttcgacccacaggtagccaagatgcacaagaccgcccgactccccgtgccgaccccctcacgacgcggccggctccgcgactgttaggtgtctaggtggaagccgccgaagccgcgatgcagaaggcggagacgggcggacgtggcgccaccgaattcggaccagcgaggcagccttctgaggcgaaacttccccttccggcgaccgcggacgacgtgaccagaagtcccgccgcttaaaggaattatagtgaacattattcacaacacttccgattaccatccaaaagttttgcgatttttgaatgtggcttttgatggcacaggcgactgcttaattgctggggaccaccaaggaaatatttatgtttttgacttacatggaaacagtcaccaaggagctagttagctggatgagaggacatgaatcatcagtattttcgatctctgtgcatgcatcagggaaatatgccatcacaacttcttctgatacagcac

SEQ ID NO: 189575 - DNA, 879 bp, Homo sapiens
  Payload ID: 17434
  Gene Symbol: TBC1D31
  Gene Name: TBC1 domain family, member 31
  ENST ID: ENST00000522276
  CDS Start-End: 137-879
acaattctgcctcttccaaaggctgcagtttatccatccttaaatccttggatgtgtttagacgcacaagcattcatcaactatttgttgagctcctactgtgtgccaagcacgcctctaagcgctggggacggcgatggaacaaaacacacttccggttctctggagtttacatatcggcgtaattatagtgaacattattcacaacacttccgattaccatccaaaagttttgcgatttttgaatgtggcttttgatggcacaggcgactgcttaattgctggggaccaccaaggaaatatttatgtttttgacttacatggaaacaggttcaatcttgttcagcgaacagcacaagcttgcacagctctggcctttaatcttcgtaggaaatctgaattccttgtggcattagctgattattctattaaatgttttgatacagtcaccaaggagctagttagctggatgagaggacatgaatcatcagtattttcgatctctgtgcatgcatcagggaaatatgccatcacaacttcttctgatacagcacaattatgggacttggatacctttcagagaaaaagaaagctgaatattcgccagtctgtgggtatacagaaggttttctttctaccattaagtaataccatcctcagctgttttaaagataattccatttttgcctgggaatgtgacacacttttttgcaaatatcaattgccagctccacctgaaagctctagtatattatacaaagtgtttgctgtaaccagagatggccgaatcctggctgctggaggcaagtcaaatcatcttcatttgtggtgcttggaagctaggcagctctttagaattatccagatgcccactaaagt

SEQ ID NO: 189576 - DNA, 3167 bp, Homo sapiens
  Payload ID: 17434
  Gene Symbol: TBC1D31
  Gene Name: TBC1 domain family, member 31
  ENST ID: ENST00000522420
  CDS Start-End: 257-3142
ggaaggcgctgggacggttacccagcgggccgccggcggtcgtgggcaagcttcgccatgcagagcactgacctaggcaacaaggagagcggcaagatatggcaccgcaagccgtccccggccacgcgggacggaattatagtgaacattattcacaacacttccgattaccatccaaaagttttgcgatttttgaatgtggcttttgatggcacaggcgactgcttaattgctggggaccaccaaggaaatatttatgtttttgacttacatggaaacagtcaccaaggagctagttagctggatgagaggacatgaatcatcagtattttcgatctctgtgcatgcatcagggaaatatgccatcacaacttcttctgatacagcacaattatgggacttggatacctttcagagaaaaagaaagctgaatattcgccagtctgtgggtatacagaaggttttctttctaccattaagtaataccatcctcagctgttttaaagataattccatttttgcctgggaatgtgacacacttttttgcaaatatcaattgccagctccacctgaaagctctagtatattatacaaagtgtttgctgtaaccagagatggccgaatcctggctgctggaggcaagtcaaatcatcttcatttgtggtgcttggaagctaggcagctctttagaattatccagatgcccactaaagttcgagccattcgccatctggaatttcttcctgatagttttgatgctggttctaatcaggttcttggagtactaagtcaagatggtattatgagatttatcaatatgcagacttgtaaacttctctttgagattgggagcctcgatgaaggaattagctcatcagcaattagcccacatggacggtacattgcatctattatggaaaatggaagtctaaacatatattcagttcaggctttaacacaagaaataaataagccacctccgcctttagtgaaagttattgaagatttgcccaagaataaactgagttccagtgatcttaagatgaaagtaacatcagggagagtacagcagccagcaaaatctagggaaagcaaaatgcaaactagaatattaaaacaagacctgactggtgattttgaaagtaaaaagaatgaattaccagatggattaaacaaaaagcgtttacaaatcttattaaaaggctatggtgaatatccaacaaaatacagaatgttcatttggcgctctctgctacaactgcctgaaaatcatactgcgtttagtaccctcatagataaggggactcatgtggcatttctcaaccttcagaagaaataccccatcaaaagtaggaagctactcagagtattacagagaaccttatctgcattagctcactggtctgtcatttttagtgacacaccatatcttccactcttggcatttccatttgtaaaattattccagaacaaccaactcatctgttttgaagttattgctactctcataatcaattggtgtcaacactggtttgaatattttcctaatcctcctatcaatattcttagcatgatagaaaatgttttggcatttcatgacaaggaactgctgcaacacttcatagatcatgatataacctcccagctatatgcatggcctcttcttgaaactgtgttctcagaagtgctgacaagagaggagtggctgaaattgttcgataatatcttttccaaccatccttccttccttctgatgactgttgtagcctacaacatatgttctagaacgcctctgctcagctgtaatcttaaagatgactttgagtttttttttcaccatcggaataacctggatataaatgttgtgattagacaagtttatcatctcatggagaccacgcctactgacattcatccagacagcatgcttaatgtttttgttgcactgacaaaagggcagtatccagtatttaatcaatatccaaagtttattgtggactatcaaacacaggaacgagaaagaataaggaatgatgaattggattacttaagagagaggcagacagttgaagatatgcaagctaaagtcgaccagcaaagagttgaagatgaagcttggtaccagaaacaggagctgcttcgtaaagctgaagaaacaagaagagaaatgctcttacaagaggaggagaaaatgatacaacaaagacagaggctagctgctgtgaaaagagagctgaaagtaaaggaaatgcacttacaagatgctgcaagaaggcgttttctgaagcttcagcaagatcaacaggaaatggaactaagaagactggatgatgaaattgggagaaaggtatatatgagagatcgagaaattgctgccacagccagagacctagaaatgagacagctggaactcgaatcacaaaagagactttatgagaagaatcttactgaaaatcaagaagctcttgcaaaagaaatgcgagcagatgcagatgcctatagacgaaaagtggatcttgaagaacacatgtttcataagctgatagaagcaggtgaaacccagagccagaaaactcagaaggtgattaaagaaaatttggcaaaggctgaacaagcatgcctaaataccgactggcagattcagtctttacataaacaaaaatgtgatgatctacaacgaaacaaatgttaccaggaagtagccaaactccttagggaaaacagaaggaaagaaatagagataataaatgcaatggtggaggaggaagccaagaagtggaaggaagctgaaggaaaagagttccgtttgagatcagcaaagaaagcttctgctctttcagatgcgtctagaaagtggtttttaaagcaagagataaatgcggctgtagaacatgctgaaaatccatgtcataaagaagaacccaggttccaaaatgaacaggactcaagctgtttgcctagaacctcacaattaaatgactcttctgaaatggatccctcaacacagatttctttaaatagaagagcagtagaatgggacaccacgggacagaatcttattaagaaagtgagaaatcttcgccagagactcactgcccgggctcgtcacagatgtcaaacccctcatcttttggctgcatagaatgcatgtcaccttgagacggtcg

SEQ ID NO: 189577 - DNA, 2201 bp, Homo sapiens
  Payload ID: 17434
  Gene Symbol: TBC1D31
  Gene Name: TBC1 domain family, member 31
  ENST ID: ENST00000518805
  CDS Start-End: 125-1987
aaatggaagtctaaacatatattcagttcaggctttaacacaagaaataaataagccacctccgcctttagtgaaagttattgaagatttgcccaagaataaactgagttccagtgatcttaagatgaaagtaacatcagggagagtacagcagccagcaaaatctagggaaagcaaaatgcaaactagaatattaaaacaagacctgactggtgattttgaaagtaaaaagaatgaattaccagatggattaaacaaaaagcgtttacaaatcttattaaaaggctatggtgaatatccaacaaaatacagaatgttcatttggcgctctctgctacaactgcctgaaaatcatactgcgtttagtaccctcatagataaggggactcatgtggcatttctcaaccttcagaagaaataccccatcaaaagtaggaagctactcagagtattacagagaaccttatctgcattagctcactggtctgtcatttttagtgacacaccatatcttccactcttggcatttccatttgtaaaattattccagaacaaccaactcatctgttttgaagttattgctactctcataatcaattggtgtcaacactggtttgaatattttcctaatcctcctatcaatattcttagcatgatagaaaatgttttggcatttcatgacaaggaactgctgcaacacttcatagatcatgatataacctcccagctatatgcatggcctcttcttgaaactgtgttctcagaagtgctgacaagagaggagtggctgaaattgttcgataatatcttttccaaccatccttccttccttctgatgactgttgtagcctacaacatatgttctagaacgcctctgctcagctgtaatcttaaagatgactttgagacagttgaagatatgcaagctaaagtcgaccagcaaagagttgaagatgaagcttggtaccagaaacaggagctgcttcgtaaagctgaagaaacaagaagagaaatgctcttacaagaggaggagaaaatgatacaacaaagacagaggctagctgctgtgaaaagagagctgaaagtaaaggaaatgcacttacaagatgctgcaagaaggcgttttctgaagcttcagcaagatcaacaggaaatggaactaagaagactggatgatgaaattgggagaaaggtatatatgagagatcgagaaattgctgccacagccagagacctagaaatgagacagctggaactcgaatcacaaaagagactttatgagaagaatcttactgaaaatcaagaagctcttgcaaaagaaatgcgagcagatgcagatgcctatagacgaaaagtggatcttgaagaacacatgtttcataagctgatagaagcaggtgaaacccagagccagaaaactcagaaggtgattaaagaaaatttggcaaaggctgaacaagcatgcctaaataccgactggcagattcagtctttacataaacaaaaatgtgatgatctacaacgaaacaaatgttaccaggaagtagccaaactccttagggaaaacagaaggaaagaaatagagataataaatgcaatggtggaggaggaagccaagaagtggaaggaagctgaaggaaaagagttccgtttgagatcagcaaagaaagcttctgctctttcagatgcgtctagaaagtggtttttaaagcaagagataaatgcggctgtagaacatgctgaaaatccatgtcataaagaagaacccaggttccaaaatgaacaggactcaagctgtttgcctagaacctcacaattaaatgactcttctgaaatggatccctcaacacagatttctttaaatagaagagcagtagaatgggacaccacgggacagaatcttattaagaaagtgagaaatcttcgccagagactcactgcccgggctcgtcacagatgtcaaacccctcatcttttggctgcatagaatgcatgtcaccttgagacggtcgagagagagacctattttgcaatcagtgacattgatttttagattatttatttaaaattcctataaagatcagccctttgtacagaaaaatgtgtctataaaaattatgtgttatttaattctgatactttttggcttgtaaatggcttcttgaactttttacaataaaaatgttttagaaactgttaaa

SEQ ID NO: 189578 - DNA, 3256 bp, Homo sapiens
  Payload ID: 17434
  Gene Symbol: TBC1D31
  Gene Name: TBC1 domain family, member 31
  ENST ID: ENST00000521676
  CDS Start-End: 211-3042
caagcttcgccatgcagagcactgacctaggcaacaaggagagcggcaagatatggcaccgcaagccgtccccggccacgcgggacggaattatagtgaacattattcacaacacttccgattaccatccaaaagttttgcgatttttgaatgtggcttttgatggcacaggcgactgcttaattgctggggaccaccaaggaaatatttatgtttttgacttacatggaaacagtcaccaaggagctagttagctggatgagaggacatgaatcatcagtattttcgatctctgtgcatgcatcagggaaatatgccatcacaacttcttctgatacagcacaattatgggacttggatacctttcagagaaaaagaaagctgaatattcgccagtctgtgggtatacagaaggttttctttctaccattaagtaataccatcctcagctgttttaaagataattccatttttgcctgggaatgtgacacacttttttgcaaatatcaattgccagctccacctgaaagctctagtatattatacaaagtgtttgctgtaaccagagatggccgaatcctggctgctggaggcaagtcaaatcatcttcatttgtggtgcttggaagctaggcagctctttagaattatccagatgcccactaaagttcgagccattcgccatctggaatttcttcctgatagttttgatgctggttctaatcaggttcttggagtactaagtcaagatggtattatgagatttatcaatatgcagacttgtaaacttctctttgagattgggagcctcgatgaaggaattagctcatcagcaattagcccacatggacggtacattgcatctattatggaaaatggaagtctaaacatatattcagttcaggctttaacacaagaaataaataagccacctccgcctttagtgaaagttattgaagatttgcccaagaataaactgagttccagtgatcttaagatgaaagtaacatcagggagagtacagcagccagcaaaatctagggaaagcaaaatgcaaactagaatattaaaacaagacctgactggtgattttgaaagtaaaaagaatgaattaccagatggattaaacaaaaagcgtttacaaatcttattaaaaggctatggtgaatatccaacaaaatacagtaccctcatagataaggggactcatgtggcatttctcaaccttcagaagaaataccccatcaaaagtaggaagctactcagagtattacagagaaccttatctgcattagctcactggtctgtcatttttagtgacacaccatatcttccactcttggcatttccatttgtaaaattattccagaacaaccaactcatctgttttgaagttattgctactctcataatcaattggtgtcaacactggtttgaatattttcctaatcctcctatcaatattcttagcatgatagaaaatgttttggcatttcatgacaaggaactgctgcaacacttcatagatcatgatataacctcccagctatatgcatggcctcttcttgaaactgtgttctcagaagtgctgacaagagaggagtggctgaaattgttcgataatatcttttccaaccatccttccttccttctgatgactgttgtagcctacaacatatgttctagaacgcctctgctcagctgtaatcttaaagatgactttgagtttttttttcaccatcggaataacctggatataaatgttgtgattagacaagtttatcatctcatggagaccacgcctactgacattcatccagacagcatgcttaatgtttttgttgcactgacaaaagggcagtatccagtatttaatcaatatccaaagtttattgtggactatcaaacacaggaacgagaaagaataaggaatgatgaattggattacttaagagagaggcagacagttgaagatatgcaagctaaagtcgaccagcaaagagttgaagatgaagcttggtaccagaaacaggagctgcttcgtaaagctgaagaaacaagaagagaaatgctcttacaagaggaggagaaaatgatacaacaaagacagaggctagctgctgtgaaaagagagctgaaagtaaaggaaatgcacttacaagatgctgcaagaaggcgttttctgaagcttcagcaagatcaacaggaaatggaactaagaagactggatgatgaaattgggagaaaggtatatatgagagatcgagaaattgctgccacagccagagacctagaaatgagacagctggaactcgaatcacaaaagagactttatgagaagaatcttactgaaaatcaagaagctcttgcaaaagaaatgcgagcagatgcagatgcctatagacgaaaagtggatcttgaagaacacatgtttcataagctgatagaagcaggtgaaacccagagccagaaaactcagaaggtgattaaagaaaatttggcaaaggctgaacaagcatgcctaaataccgactggcagattcagtctttacataaacaaaaatgtgatgatctacaacgaaacaaatgttaccaggaagtagccaaactccttagggaaaacagaaggaaagaaatagagataataaatgcaatggtggaggaggaagccaagaagtggaaggaagctgaaggaaaagagttccgtttgagatcagcaaagaaagcttctgctctttcagatgcgtctagaaagtggtttttaaagcaagagataaatgcggctgtagaacatgctgaaaatccatgtcataaagaagaacccaggttccaaaatgaacaggactcaagctgtttgcctagaacctcacaattaaatgactcttctgaaatggatccctcaacacagatttctttaaatagaagagcagtagaatgggacaccacgggacagaatcttattaagaaagtgagaaatcttcgccagagactcactgcccgggctcgtcacagatgtcaaacccctcatcttttggctgcatagaatgcatgtcaccttgagacggtcgagagagagacctattttgcaatcagtgacattgatttttagattatttatttaaaattcctataaagatcagccctttgtacagaaaaatgtgtctataaaaattatgtgttatttaattctgatactttttggcttgtaaatggcttcttgaactttttacaataaaaatgttttagaaactgttaaa

SEQ ID NO: 189579 - DNA, 569 bp, Homo sapiens
  Payload ID: 17434
  Gene Symbol: TBC1D31
  Gene Name: TBC1 domain family, member 31
  ENST ID: ENST00000519418
  CDS Start-End: 130-569
atttcccgggccgggagcgctgggcctgccgggaaggcgctgggacggttacccagcgggccgccggcggtcgtgggcaagcttcgccatgcagagcactgacctaggcaacaaggagagcggcaagatatggcaccgcaagccgtccccggccacgcgggacggccacctccgcctttagtgaaagttattgaagatttgcccaagaataaactgagttccagtgatcttaagatgaaagtaacatcagggagagtacagcagccagcaaaatctagggaaagcaaaatgcaaactagaatattaaaacaagacctgactggtgattttgaaagtaaaaagaatgaattaccagatggattaaacaaaaagcgtttacaaatcttattaaaaggctatggtgaatatccaacaaaatacagaatgttcatttggcgctctctgctacaactgcctgaaaatcatactgcgtttagtaccctcatagataaggggactcatgtggcatttctcaaccttcagaagaaataccccatcaaaagtaggaagctactcagagtattacagag

SEQ ID NO: 189580 - DNA, 864 bp, Homo sapiens
  Payload ID: 17434
  Gene Symbol: TBC1D31
  Gene Name: TBC1 domain family, member 31
  ENST ID: ENST00000518577
  CDS Start-End: 1-235
attaaacaaaaagcgtttacaaatcttattaaaaggctatggtgaatatccaacaaaatacagaatgttcatttggcgctctctgctacaactgcctgaaaatcatactgcgtttagtaccctcatagataaggggactcatgtggcatttctcaaccttcagaagaaataccccatcaaaagtaggaagctactcagagtattacagagtcaattggtgtcaacactggtttgaatattttcctaatcctcctatcaatattcttagcatgatagaaaatgttttggcatttcatgacaaggaactgctgcaacacttcatagatcatgatataacctcccagctatatgcatggcctcttcttgaaactgtgttctcagaagtgctgacaagagaggagtggctgaaattgttcgataatatcttttccaaccatccttccttccttctgatgactgttgtagcctacaacatatgttctagaacgcctctgctcagctgtaatcttaaagatgactttgagtttttttttcaccatcggaataacctggatataaatgttgtgattagacaagtttatcatctcatggagaccacgcctactgacattcatccagacagcatgcttaatgtttttgttgcactgacaaaagggcagtatccagtatttaatcaatatccaaagtttattgtggactatcaaacacaggaacgagaaagaataaggaatgatgaattggattacttaagagagaggcagacagttgaagatatgcaagctaaagtcgaccagcaaagagttgaagatgaagcttggtaccagaaacaggagctgcttcgtaaagctgaagaaacaagaagag

SEQ ID NO: 189581 - DNA, 2398 bp, Homo sapiens
  Payload ID: 17434
  Gene Symbol: TBC1D31
  Gene Name: TBC1 domain family, member 31
  ENST ID: ENST00000521914
  CDS Start-End: 1-467
gtgacacacttttttgcaaatatcaattgccagctccacctgaaagctctagtatattatacaaagtgtttgctgtaaccagagatggccgaatcctggctgctggaggcaagtcaaatcatcttcatttgtggtgcttggaagctaggcagctctttagaattatccagatgcccactaaagttcgagccattcgccatctggaatttcttcctgatagttttgatgctggttctaatcaggttcttggagtactaagtcaagatggtattatgagatttatcaatatgcagacttgtaaacttctctttgagattgggagcctcgatgaaggaattagctcatcagcaattagcccacatggacggtacattgcatctattatggaaaatggaagtctaaacatatattcagttcaggctttaacacaagaaataaataaggaagaagttcgtgctcaaaattaatcacacagcgagtaactagcagttctgggtgttccaattcttccaagattacatgagattgggtgcatttggagtggcgtttgccacctttttttattctaaaaaaaagtttgtgcctcctcctttttgttttatcttttaaaaaattatacaagtagtgtcttattgcagaaaaaaataagaatgtacagaatagcaaacagacaaatacaaatcactgaaagtctcaccattctcagaagattctgatttatatgttcccaatttcttttctatgtgtgtaaatatatatagtcactcctcattatttgtgcattctatacatgagaattcacctgctcactaaaatttatttgtaacttcaaaattaatagttgcagtgctttcatggtcattcagggacatgcacagagcagtgaaaatttgagtcaccagataccctttttcccagctgaagtcaaatgaggcaacactctgtcttcttatttcagctctcatagtgtaaacaagtatcctttttgtgatctacttaataccatttatttttttgcattttgaagctttttgttaagattctactgcttaaagtggtccccaagcgtagcgctgaagcgctatttattgtttctaaatacaggaaggctgtggcttaccttacagagaaaatacatgtgttaaataaactcattcaggaatgagttatagtgctaagctgtgagttcaatgataaggaatcagcaatgtgtattaaataagatgtctttaaacagaaacacacatatatgtattgattgattaatgaggctctcaggaacctgactctgtgtttcccctaggagcagtgtttcagtattcactaatcgagtgttcatggtgactttatagaaccactgcaaatagtgagaattaactatacatatatgtttctgtgtgtacgcacatgtgtgtgtatgcatacttgtctctaaacatatgggattatactctgctgctgttttgctctttatgtcattatgtatactatataagtatatttttacattataatatgtgctatatattaataaatttttttaaatgtattaatatctgctcttactgagagagttttcagcctgctgaatagtcagttttacagtactagctaaaccttcttttctttttttttttgagatggagtctcactctgtcttccaggctggagtgcagtggtgtgatcttggctcactgcagcctccgcctcccgagttcaaacaattctcctgcctcagcctccctagcagctgggattacaggcgcgtgccaccacgcccagctaatttttgtacttttagtagagatggtgtttcaccatgttggccaggctgctcttgaactcctgaccttggtgatccacccgccttggcctcccaaagtgctgggattacaggcatgagccaccgtgtccagccttgcaaaccttcttaatagaggcaggcagagagctgagaaaaactatggtaagaatgagtcattgagttcctttctgcttgttatctgttgagcaaattgatatcacatgaatagaaaagctagcttggaagtagaatgatcttttttattttttgacacattcccagtaccatcagtgtctttatggctgttccaggctacattaatgttcaattctatattctctataaatcataactcacctttgtctcatttttaccagttttattttcttgtcattggagaatttctggtattgtggtaatagagtaaatgaattcttaagtgttgaaggtttaacactacaaaggtatgtcaagtcaggttgtttctcaggttcttttttgggaggttatacttcatggtagaggataaggctcaaacgggaaattgtgacattttaataaattttaattttaataaaattttagtaaatttca

SEQ ID NO: 189582 - DNA, 3101 bp, Homo sapiens
  Payload ID: 17434
  Gene Symbol: TBC1D31
  Gene Name: TBC1 domain family, member 31
  ENST ID: ENST00000524307
  CDS Start-End: 5-247
cgccatgcagagcactgacctaggcaacaaggagagcggcaagatatggcaccgcaagccgtccccggccacgcgggacggaattatagtgaacattattcacaacacttccgattaccatccaaaagttttgcgatttttgaatgtggcttttgatggcacaggcgactgcttaattgctggggaccaccaaggaaatatttatgtttttgacttacatggaaacagtcaccaaggagctagttagctggatgagaggacatgaatcatcagtattttcgatctctgtgcatgcatcagggaaatatgccatcacaacttcttctgatacagcacaattatgggacttggatacctttcagagaaaaagaaagctgaatattcgccagtctgtgggtatacagaaggttttctttctaccattaagtaataccatcctcagctgttttaaagataattccatttttgcctgggaatgtgacacacttttttgcaaatatcaattgccagctccacctgaaagctctagtatattatacaaagtgtttgctgtaaccagagatggccgaatcctggctgctggaggcaagtcaaatcatcttcatttgtggtgcttggaagctaggcagctctttagaattatccagatgcccactaaagttcgagccattcgccatctggaatttcttcctgatagttttgatgctggttctaatcaggttcttggagtactaagtcaagatggtattatgagatttatcaatatgcagacttgtaaacttctctttgagattgggagcctcgatgaaggaattagctcatcagcaattagcccacatggacggtacattgcatctattatggaaaatggaagtctaaacatatattcagttcaggctttaacacaagaaataaataagccacctccgcctttagtgaaagttattgaagatttgcccaagaataaactgagttccagtgatcttaagatgaaagtaacatcagggagagtacagcagccagcaaaatctagggaaagcaaaatgcaaactagaatattaaaacaagacctgactggtgattttgaaagtaaaaagaatgaattaccagatggattaaacaaaaagcgtttacaaatcttattaaaaggctatggtgaatatccaacaaaatacagaatgttcatttggcgctctctgctacaactgcctgaaaatcatactgcgtttagtaccctcatagataaggggactcatgtggcatttctcaaccttcagaagaaataccccatcaaaagtaggaagctactcagagtattacagagaaccttatctgcattagctcactggtctgtcatttttagtgacacaccatatcttccactcttggcatttccatttgtaaaattattccagaacaaccaactcatctgttttgaagttattgctactctcataatcaattggtgtcaacactggtttgaatattttcctaatcctcctatcaatattcttagcatgatagaaaatgttttggcatttcatgacaaggaactgctgcaacacttcatagatcatgatataacctcccagctatatgcatggcctcttcttgaaactgtgttctcagaagtgctgacaagagaggagtggctgaaattgttcgataatatcttttccaaccatccttccttccttctgatgactgttgtagcctacaacatatgttctagaacgcctctgctcagctgtaatcttaaagatgactttgagtttttttttcaccatcggaataacctggatataaatgttgtgattagacaagtttatcatctcatggagaccacgcctactgacattcatccagacagcatgcttaatgtttttgttgcactgacaaaagggcagtatccagtatttaatcaatatccaaagtttattgtggactatcaaacacaggaacgagaaagaataaggaatgatgaattggattacttaagagagagacagttgaagatatgcaagctaaagtcgaccagcaaagagttgaagatgaagcttggtaccagaaacaggagctgcttcgtaaagctgaagaaacaagaagagaaatgctcttacaagaggaggagaaaatgatacaacaaagacagaggctagctgctgtgaaaagagagctgaaagtaaaggaaatgcacttacaagatgctgcaagaaggcgttttctgaagcttcagcaagatcaacaggaaatggaactaagaagactggatgatgaaattgggagaaaggtatatatgagagatcgagaaattgctgccacagccagagacctagaaatgagacagctggaactcgaatcacaaaagagactttatgagaagaatcttactgaaaatcaagaagctcttgcaaaagaaatgcgagcagatgcagatgcctatagacgaaaagtggatcttgaagaacacatgtttcataagctgatagaagcaggtgaaacccagagccagaaaactcagaagtggaaggaagctgaaggaaaagagttccgtttgagatcagcaaagaaagcttctgctctttcagatgcgtctagaaagtggtttttaaagcaagagataaatgcggctgtagaacatgctgaaaatccatgtcataaagaagaacccaggttccaaaatgaacaggactcaagctgtttgcctagaacctcacaattaaatgactcttctgaaatggatccctcaacacagatttctttaaatagaagagcagtagaatgggacaccacgggacagaatcttattaagaaagtgagaaatcttcgccagagactcactgcccgggctcgtcacagatgtcaaacccctcatcttttggctgcatagaatgcatgtcaccttgagacggtcgagagagagacctattttgcaatcagtgacattgatttttagattatttatttaaaattcctataaagatcagccctttgtacagaaaaatgtgtctataaaaattatgtgttatttaattctgatactttttggcttgtaaatggcttcttgaactttttacaataaaaatgttttagaaactgtt

SEQ ID NO: 189583 - DNA, 4431 bp, Homo sapiens
  Payload ID: 17435
  Gene Symbol: TBC1D32
  Gene Name: TBC1 domain family, member 32
  Uniprot ID: Q96NH3
  ENST ID: ENST00000275159
  CDS Start-End: 1-3897
atggcccatttctccagcgaggaccaggcgatgctgcaggcgatgctgaggcggttgttccagagcgtgaaggagaaaatcacgggtgccccttccctggagtgtgccgaagagattcttttacatctggaggaaactgatgaaaattttcacaactatgaatttgtgaaatacctcaggcagcatataggcaacactttgggttctatgattgaagaagaaatggaaaaatgcacatctgatcggaatcagggtgaagaatgcggctatgatacagttgtacagcaggtcactaaaagaactcaagaatctaaagagtacaaagaaatgatgcattacctgaagaacattatgatagctgtggtcgagtctatgattaacaagtttgaagaagatgagacacgaaatcaagaaaggcagaaaaaaatccaaaaggagaaaagccatagttaccgcacagacaattgctctgatagtgattcatcattgaatcagagttacaaattttgtcaaggaaaattacaattgattttagaccagttggatcctgggcaacctaaagaggtgagatatgaagccttgcaaacattatgttcagctcctccatctgatgtcctcaactgtgaaaattggactactctctgcgaaaaactgaccgtgtctctttcagatcctgatcctgtgtttagtgaccggattttaaaattctgtgcacagacatttttgctttctccattacatatgaccaaggaaatttatacaagcttagctaagtatttggagtcatactttctttctagggaaaatcatattcctactctttcagctggtgtagatataactaatcctaatatgactcgcttacttaaaaaggttcgtcttctaaatgaatatcagaaagaagctccatctttctggattcgtcatccagagaagtatatggaagaaattgtggagagtactttgtccttgttaacagttaaacataatcaaagccatgttgtctcacaaaagattttggatccgatctacttttttgcattagttgataccaaggctgtgtggttcaaaaagtggatgcatgcacattatagcagaactacagtattaagacttcttgaaacgaaatataagtctctggtaactacagccattcaacagtgtgttcagtactttgaaatgtgtaagactaggaaagctgatgaaactttgggacattcaaagcattgcagaaacaagcagaaaactttctactacttaggacaagaattacaatatatttatttcattcactcactgtgccttttaggaagattattgatctataaacaaggcagaaaactatttcctattaagctgaagaataaaaaaggtttggtatccctcatagatctgcttgttctttttacccaacttatctattactcaccaagttgtccaaagatgacatcagctgcccattcagagaattactctcctgcaagtatggtgactgaagttctgtggatactcagtgatcaaaaagaatgtgcagtggaatgcttatataacaacattgtaatagagacacttcttcagcctattcacaatttaatgaaaggaaatgaggcatctccaaattgctctgagacagctttaattcatatagctggtattttggcaagaattgcatctgtagaagaagggcttattttactcctttatggagcaaatatgaactcttctgaagaaagtcctacaggtgctcatataattgcccagttttcgaaaaaacttctcgatgaagatatttctatattttctggatcagaaatgttgcctgtggttaaaggagcttttatttctgtgtgtcgtcacatatatagtacatgtgaaggtttgcaggtgttaatcacttataatttgcatgaatctatagcaaaggcatggaaaaagacaagtttgctatcagaaagaattcctactccagtagagggttctgattctgtttcttcagtaagccaggaatcccaaaacattatggcttgggaagataatttgttagatgatttactacattttgctgccacccccaaaggattactacttcttcaaagaacaggtgctatcaatgaatgtgtgacatttatattcaatcgatatgcaaaaaaattacaggtcagcaggcataaaaaatttggctatggagttttggttacacgagtggcatcaacagcagcaggtggcattgcactaaaaaagtcagggtttattaatgaacttataactgaattatggtccaatctggaatatggaagagatgatgttagggtaacccatcccagaactactccagtggatcctattgaccgaagctgtcaaaagtcttttttagcactggtgaacttgttatcctatcctgctatttatgagcttgtaaggaatcaagatcttcctaataaaacagaatattctcttcgtgaagtcccaacatgtgttattgatattattgatagacttataattttgaattctgaagctaagattcgttctttattcaactatgaacaatcacatatctttggtctaaggttattaagtgtgatatgctgtgatctggacactcttctcctgttagaggctcagtatcaggtatctgaaatgttactaaatgctcaagaagaaaatatcttggagatttctgagagccacagggactttataattgatggcttatcagtggagagaaatcatgttcttgttagaataaatcttgttggtgggccattggaacggattttgcctccgaggttactcgaaaagagtgataatccatatccttggccaatgttttcatcatatccattgccaaactgctatctgtcagacattacaagaaatgctggtataaaacaagacaatgatcttgacaagcttttattatgcctcaaaatatctgataaacaaactgaatggatagaaaactgccaaagacaattttgcaaaatgatgaaagccaaacctgatataatcagtggagaggccttaatagaattacttgaaaaatttgtgcttcatctcactgaaagcccatctgaatgctacttcccttcagtggagtatacagctactgatgcaaatgtgaagaatgaaagtctttcatctgtgcagcagcttggcattaaaatgactgtcaggtatggcaaattcctcagtctcttaaaagatggtgcagaaaatgatcttacctgggttttaaagcattgtgagagattcctgaaacagcagcaaacttccataaaatcttctcttctctgcctgcaagggaattatgctggccatgactggtttgtatcttctctgttcatgataatgttgggagacaaagaaaaaacattccaatttcttcatcaattctccaggcttctgacttctgcttttctttggttgccaaggctacatatttctagttaccttcctaatgacactgtagaatctggcatccatccagtatatttttgcagcacccattatattgaaatgctactgaaggctgagttgcctcttgtgttttcagcttttcacatgtctggttttgcaccatcacagatttgcctgcaatggataacccagtgtttttggaattacttagattggatagaaatctgccattatattgctacttgtgttttccttggtcctgattatcaagtgtatatctgtatagctgtattcaaacatttacagcaagacattctacagcacactcagactcaagatctgcaagttttcctaaaagaagaagcactgcatgggtttcgagtgagtgattattttgaatacatggaaattttggaacaaaactaccgaacagtgctgctgagagacatgcggaacattagactgcagagcacatagatcatgagacacacggtttaaatttaggttttatttatttttaaacacagcaggggggcttgatgtttttctgtgtctgtaacaacatttactttgtgaatatacatattgtaaatactgagaagtataacgatatatttaagtaggtatgagctcaatttgtgaattcatttttgtaaatttgttgttttgtaaggttattatagaatcagatctagcttacttttagttcttattcatgtttaagagttagtcctggccaggcgcggtggctcatgcctgtaatcccagcactttgggagtctgaggtgggcggatcacgaggtcaagagatcgagaccatcctggccaaaatggtgaaacctcgtctctgctaacaatactgaaattagctgggtgcagtgatgcgcctgtagtccctgctacttgggaggctgaggcaggagaatcgcttgaacccgggaggcggaggttgcagtgagccaagattgtgccactgtactccagccaggccacagagtgagactctgtctc

SEQ ID NO: 189584 - DNA, 3824 bp, Homo sapiens
  Payload ID: 17435
  Gene Symbol: TBC1D32
  Gene Name: TBC1 domain family, member 32
  Uniprot ID: Q96NH3
  ENST ID: ENST00000398212
  CDS Start-End: 51-3824
gcttttgctcggacctggagtaatgagagtggacgtttgattccaacaggatggcccatttctccagcgaggaccaggcgatgctgcaggcgatgctgaggcggttgttccagagcgtgaaggagaaaatcacgggtgccccttccctggagtgtgccgaagagattcttttacatctggaggaaactgatgaaaattttcacaactatgaatttgtgaaatacctcaggcagcatataggcaacactttgggttctatgattgaagaagaaatggaaaaatgcacatctgatcggaatcagggtgaagaatgcggctatgatacagttgtacagcaggtcactaaaagaactcaagaatctaaagagtacaaagaaatgatgcattacctgaagaacattatgatagctgtggtcgagtctatgattaacaagtttgaagaagatgagacacgaaatcaagaaaggcagaaaaaaatccaaaaggagaaaagccatagttaccgcacagacaattgctctgatagtgattcatcattgaatcagagttacaaattttgtcaaggaaaattacaattgattttagaccagttggatcctgggcaacctaaagaggtgagatatgaagccttgcaaacattatgttcagctcctccatctgatgtcctcaactgtgaaaattggactactctctgcgaaaaactgaccgtgtctctttcagatcctgatcctgtgtttagtgaccggattttaaaattctgtgcacagacatttttgctttctccattacatatgaccaaggaaatttatacaagcttagctaagtatttggagtcatactttctttctagggaaaatcatattcctactctttcagctggtgtagatataactaatcctaatatgactcgcttacttaaaaaggttcgtcttctaaatgaatatcagaaagaagctccatctttctggattcgtcatccagagaagtatatggaagaaattgtggagagtactttgtccttgttaacagttaaacataatcaaagccatgttgtctcacaaaagattttggatccgatctacttttttgcattagttgataccaaggctgtgtggttcaaaaagtggatgcatgcacattatagcagaactacagtattaagacttcttgaaacgaaatataagtctctggtaactacagccattcaacagtgtgttcagtactttgaaatgtgtaagactaggaaagctgatgaaactttgggacattcaaagcattgcagaaacaagcagaaaactttctactacttaggacaagaattacaatatatttatttcattcactcactgtgccttttaggaagattattgatctataaacaaggcagaaaactatttcctattaagctgaagaataaaaaaggtttggtatccctcatagatctgcttgttctttttacccaacttatctattactcaccaagttgtccaaagatgacatcagctgcccattcagagaattactctcctgcaagtatggtgactgaagttctgtggatactcagtgatcaaaaagaatgtgcagtggaatgcttatataacaacattgtaatagagacacttcttcagcctattcacaatttaatgaaaggaaatgaggcatctccaaattgctctgagacagctttaattcatatagctggtattttggcaagaattgcatctgtagaagaagggcttattttactcctttatggagcaaatatgaactcttctgaagaaagtcctacaggtgctcatataattgcccagttttcgaaaaaacttctcgatgaagatatttctatattttctggatcagaaatgttgcctgtggttaaaggagcttttatttctgtgtgtcgtcacatatatagtacatgtgaaggtttgcaggtgttaatcacttataatttgcatgaatctatagcaaaggcatggaaaaagacaagtttgctatcagaaagaattcctactccagtagagggttctgattctgtttcttcagtaagccaggaatcccaaaacattatggcttgggaagataatttgttagatgatttactacattttgctgccacccccaaaggattactacttcttcaaagaacaggtgctatcaatgaatgtgtgacatttatattcaatcgatatgcaaaaaaattacaggtcagcaggcataaaaaatttggctatggagttttggttacacgagtggcatcaacagcagcaggtggcattgcactaaaaaagtcagggtttattaatgaacttataactgaattatggtccaatctggaatatggaagagatgatgttagggtaacccatcccagaactactccagtggatcctattgaccgaagctgtcaaaagtcttttttagcactggtgaacttgttatcctatcctgctatttatgagcttgtaaggaatcaagatcttcctaataaaacagaatattctcttcgtgaagtcccaacatgtgttattgatattattgatagacttataattttgaattctgaagctaagattcgttctttattcaactatgaacaatcacatatctttggtctaagggactttataattgatggcttatcagtggagagaaatcatgttcttgttagaataaatcttgttggtgggccattggaacggattttgcctccgaggttactcgaaaagagtgataatccatatccttggccaatgttttcatcatatccattgccaaactgctatctgtcagacattacaagaaatgctggtataaaacaagacaatgatcttgacaagcttttattatgcctcaaaatatctgataaacaaactgaatggatagaaaactgccaaagacaattttgcaaaatgatgaaagccaaacctgatataatcagtggagaggccttaatagaattacttgaaaaatttgtgcttcatctcactgaaagcccatctgaatgctacttcccttcagtggagtatacagctactgatgcaaatgtgaagaatgaaagtctttcatctgtgcagcagcttggcattaaaatgactgtcaggtatggcaaattcctcagtctcttaaaagatggtgcagaaaatgatcttacctgggttttaaagcattgtgagagattcctgaaacagcagcaaacttccataaaatcttctcttctctgcctgcaagggaattatgctggccatgactggtttgtatcttctctgttcatgataatgttgggagacaaagaaaaaacattccaatttcttcatcaattctccaggcttctgacttctgcttttctttggttgccaaggctacatatttctagttaccttcctaatgacactgtagaatctggcatccatccagtatatttttgcagcacccattatattgaaatgctactgaaggctgagttgcctcttgtgttttcagcttttcacatgtctggttttgcaccatcacagatttgcctgcaatggataacccagtgtttttggaattacttagattggatagaaatctgccattatattgctacttgtgttttccttggtcctgattatcaagtgtatatctgtatagctgtattcaaacatttacagcaagacattctacagcacactcagactcaagatctgcaagttttcctaaaagaagaagcactgcatgggtttcgagtgagtgattattttgaatacatggaaattttggaacaaaactaccgaacagtgctgctgagagacatgcggaacattagactgcagagcacatag

SEQ ID NO: 189585 - DNA, 770 bp, Homo sapiens
  Payload ID: 17435
  Gene Symbol: TBC1D32
  Gene Name: TBC1 domain family, member 32
  ENST ID: ENST00000422369
  CDS Start-End: 130-770
gtcctcccatcagatcattcctgatgtctcttttgttgttagtcgggagagcctgaggtctgctggtactgaaggctagcaactaagagtaccagaggcgagacctcgcggacccctgcttccccaaagatggcccatttctccagcgaggaccaggcgatgctgcaggcgatgctgaggcggttgttccagagcgtgaaggagaaaatcacgggtgccccttccctggagtgtgccgaagagattcttttacatctggaggaaactgatgaaaattttcacaactatgaatttgtgaaatacctcaggcagcatataggcaacactttgggttctatgattgaagaagaaatggaaaaatgcacatctgatcggaatcagggtgaagaatgcggctatgatacagttgtacagcaggtcactaaaagaactcaagaatctaaagagtacaaagaaatgatgcattacctgaagaacattatgatagctgtggtcgagtctatgattaacaagtttgaagaagatgagacacgaaatcaagaaaggcagaaaaaaatccaaaaggagaaaagccatagttaccgcacagacaattgctctgatagtgattcatcattgaatcagagttacaaattttgtcaaggaaaattacaattgattttagaccagttggatcctgggcaacctaaagaggtgagatatgaagccttgcaaacattatgttcagctcctccatctgatgtcctcaactgtgaaaattggactactct

SEQ ID NO: 189586 - DNA, 5323 bp, Homo sapiens
  Payload ID: 17435
  Gene Symbol: TBC1D32
  Gene Name: TBC1 domain family, member 32
  Uniprot ID: Q96NH3
  ENST ID: ENST00000464622
  CDS Start-End: 49-375
ttttgctcggacctggagtaatgagagtggacgtttgattccaacaggatggcccatttctccagcgaggaccaggcgatgctgcaggcgatgctgaggcggttgttccagagcgtgaaggagaaaatcacgggtgccccttccctggagtgtgccgaagagattcttttacatctggaggaaactgatgaaaattttcacaactatgaatttgtgaaatacctcaggcagcatataggcaacactttgggttctatgattgaagaagaaatggaaaaatgcacatctgatcggaatcagggtgaagaatgcggctatgatacagttgtacagcaggtcactaaaagaactcaagaatctaaagaactaccttgaatttaaaggtacaaagaaatgatgcattacctgaagaacattatgatagctgtggtcgagtctatgattaacaagtttgaagaagatgagacacgaaatcaagaaaggcagaaaaaaatccaaaaggagaaaagccatagttaccgcacagacaattgctctgatagtgattcatcattgaatcagagttacaaattttgtcaaggaaaattacaattgattttagaccagttggatcctgggcaacctaaagaggtgagatatgaagccttgcaaacattatgttcagctcctccatctgatgtcctcaactgtgaaaattggactactctctgcgaaaaactgaccgtgtctctttcagatcctgatcctgtgtttagtgaccggattttaaaattctgtgcacagacatttttgctttctccattacatatgaccaaggaaatttatacaagcttagctaagtatttggagtcatactttctttctagggaaaatcatattcctactctttcagctggtgtagatataactaatcctaatatgactcgcttacttaaaaaggttcgtcttctaaatgaatatcagaaagaagctccatctttctggattcgtcatccagagaagtatatggaagaaattgtggagagtactttgtccttgttaacagttaaacataatcaaagccatgttgtctcacaaaagattttggatccgatctacttttttgcattagttgataccaaggctgtgtggttcaaaaagtggatgcatgcacattatagcagaactacagtattaagacttcttgaaacgaaatataagtctctggtaactacagccattcaacagtgtgttcagtactttgaaatgtgtaagactaggaaagctgatgaaactttgggacattcaaagcattgcagaaacaagcagaaaactttctactacttaggacaagaattacaatatatttatttcattcactcactgtgccttttaggaagattattgatctataaacaaggcagaaaactatttcctattaagctgaagaataaaaaaggtttggtatccctcatagatctgcttgttctttttacccaacttatctattactcaccaagttgtccaaagatgacatcagctgcccattcagagaattactctcctgcaagtatggtgactgaagttctgtggatactcagtgatcaaaaagaatgtgcagtggaatgcttatataacaacattgtaatagagacacttcttcagcctattcacaatttaatgaaaggaaatgaggcatctccaaattgctctgagacagctttaattcatatagctggtattttggcaagaattgcatctgtagaagaagggcttattttactcctttatggagcaaatatgaactcttctgaagaaagtcctacaggtgctcatataattgcccagttttcgaaaaaacttctcgatgaagatatttctatattttctggatcagaaatgttgcctgtggttaaaggagcttttatttctgtgtgtcgtcacatatatagtacatgtgaaggtttgcaggtgttaatcacttataatttgcatgaatctatagcaaaggcatggaaaaagacaagtttgctatcagaaagaattcctactccagtagagggttctgattctgtttcttcagtaagccaggaatcccaaaacattatggcttgggaagataatttgttagatgatttactacattttgctgccacccccaaaggattactacttcttcaaagaacaggtgctatcaatgaatgtgtgacatttatattcaatcgatatgcaaaaaaattacaggtcagcaggcataaaaaatttggctatggagttttggttacacgagtggcatcaacagcagcaggtggcattgcactaaaaaagtcagggtttattaatgaacttataactgaattatggtccaatctggaatatggaagagatgatgttagggtaacccatcccagaactactccagtggatcctattgaccgaagctgtcaaaagtgaaatatctcagtatgtctggttctccaagtttctgactctagtgaaaatttttagaaaatgtaaagcagtaaactttacagttgcaatcttttttagcactggtgaacttgttatcctatcctgctatttatgagcttgtaaggaatcaagatcttcctaataaaacagaatattctcttcgtgaagtcccaacatgtgttattgatattattgatagacttataattttgaattctgaagctaagattcgttctttattcaactatgaacaatcacatatctttggtctaaggaaataagccactcactatgggcaatcttagcggatttgagcctcagcttctgaagccaggagacagaatcccagagttcatcattttctttcattactttgtccactgaacttaggagcaaccaaccaacttcattatgttccttggttctccacatatggtcaaaggttattaagtgtgatatgctgtgatctggacactcttctcctgttagaggctcagtatcaggtatctgaaatgttactaaatgctcaagaagaaaatatcttggagatttctgagagccacagggactttataattgatggcttatcagtggagagaaatcatgttcttgttagaataaatcttgttggtgggccattggaacggattttgcctccgaggttactcgaaaagagtgataatccatatccttggccaatgttttcatcatatccattgccaaactgctatctgtcagacattacaagaaatgctggtataaaacaagagatggggccaaagaacaagaataccatattctgtgtctctggagctatgcagcgttcagtgaacaatgatcttgacaagcttttattatgcctcaaaatatctgataaacaaactgaatggatagaaaactgccaaagacaattttgcaaaatgatgaaagccaaacctgatataatcagtggagaggccttaatagaattacttgaaaaatttgtgcttcatctcactgaaagcccatctgaatgctacttcccttcagtggagtatacagatgattacaacaactacttcgcaaagaaaacttggcctgcaggaagaaattcattcattctaccctcatacgttaccatacattaaaagtggaacactgattacttaaagattagtatcaggaacgaaataaccattcttgtatatatttgtaattcagagttttatgtatgcattgcatgatgaaagtagtatttctagaccactttttgggtcaatggctctttttattctgagagccaagtaaaatagattgttttaaaactactattgttatgtatttaatatgttttccaatgctttttatgggaaaaagttatttgtaaaaagttttctgttaattcctttgaaaatgtaactgacagttcctaaaagaataaattcatcagtgttttcaaaattcacattaaaatatgtaaaaatattgctttcatcaattttcaattaaaatgtgattattatgcaaacttttctgcactttataactcagttttctgttgtctttagctactgatgcaaatgtgaagaatgaaagtctttcatctgtgcagcagcttggcattaaaatgactgtcaggtatggcaaattcctcagtctcttaaaagatggtgcagaaaatgatcttacctgggttttaaagcattgtgagagattcctgaaacagcagcaaacttccataaaatcttctcttctctgcctgcaagggaattatgctggccatgactggtttgtatcttctctgttcatgataatgttgggagacaaagaaaaaacattccaatttcttcatcaattctccaggcttctgacttctgcttttctttggttgccaaggctacatatttctagttaccttcctaatgacactgtagaatctggcatccatccagtatatttttgcagcacccattatattgaaatgctactgaaggctgagttgcctcttgtgttttcagcttttcacatgtctggttttgcaccatcacagatttgcctgcaatggataacccagtgtttttggaattacttagattggatagaaatctgccattatattgctacttgtgttttccttggtcctgattatcaagtgtatatctgtatagctgtattcaaacatttacagcaagacattctacagcacactcagactcaagatctgcaagttttcctaaaagaagaagcactgcatgggtttcgagtgagtgattattttgaatacatggaaattttggaacaaaactaccgaacagtgctgctgagagacatgcggaacattagactgcagagcacatagatcatgagacacacggtttaaatttaggttttatttatttttaaacacagcaggggggcttgatgtttttctgtgtctgtaacaacatttactttgtgaatatacatattgtaaatactgagaagtataacgatatatttaagtaggtatgagctcaatttgtgaattcatttttgtaaatttgttgttttgtaaggttattatagaatcagatctagcttacttttagttcttattcatgtttaagagttagtcctggccaggcgcggtggctcatgcctgtaatcccagcactttgggagtctgaggtgggcggatcacgaggtcaagagatcgagaccatcctggccaaaatggtgaaacctcgtctctgctaacaatactgaaattagctgggtgcagtgatgcgcctgtagtccctgctacttgggaggctgaggcaggagaatcgcttgaacccgggaggcggaggttgcagtgagccaagattgtgccactgtactccagccaggccacagagtgagactctgtctc

SEQ ID NO: 189587 - DNA, 754 bp, Homo sapiens
  Payload ID: 17435
  Gene Symbol: TBC1D32
  Gene Name: TBC1 domain family, member 32
  ENST ID: ENST00000509492
  CDS Start-End: 1-204
attacaagaaatgctggtataaaacaagacaatgatcttgacaagcttttattatgcctcaaaatatctgataaacaaactgaatggatagaaaactgccaaagacaattttgcaaaatgatgaaagccaaacctgatataatcagtggagaggtgctcccaatttttaggtttttcctgtgtgagataccatcgagagtataaaatgaaccttaatagaattacttgaaaaatttgtgcttcatctcactgaaagcccatctgaatgctacttcccttcagtggagtatacagctactgatgcaaatgtgaagaatgaaagtctttcatctgtgcagcagcttggcattaaaatgactgtcaggtatggcaaattcctcagtctcttaaaagatggtgcagaaaatgatcttacctgggttttaaagcattgtgagagattcctgaaacagcagcaaacttccataaaatcttctcttctctgcctgcaagggaattatgctggccatgactggtttgtatcttctctgttcatgataatgttgggagacaaagaaaaaacattccaatttcttcatcaattctccaggcttctgacttctgcttttctttggttgccaaggctacatatttctgtaagacttcaatctgtttttaaaggagggtttgaaattttaagaacattatacttacattcactggggcataattttatttgtgaaggactttgtaataaattatactcatttttcta

SEQ ID NO: 189588 - DNA, 1800 bp, Homo sapiens
  Payload ID: 17436
  Gene Symbol: TBC1D3B
  Gene Name: TBC1 domain family, member 3B
  ENST ID: ENST00000611413
  CDS Start-End: 151-1800
actggtgcttagcacctatctgctctctggtctgcctcagtggtctacagcagttacacacaggcagtggtatctgtgagcagctctgtggactcaaaggttttctccctgagaggcatgacccaggccagctgattcatcagaatcaggatggacgtggtagaggtcgcgggtagttggtgggcacaagagcgagaggacatcattatgaaatacgaaaagggacaccgagctgggctgccagaggacaaggggcctaagccttttcgaagctacaacaacaacgtcgatcatttggggattgtacatgagacggagctgcctcctctgactgcgcgggaggcgaagcaaattcggcgggagatcagccgaaagagcaagtgggtggatatgctgggagactgggagaaatacaaaagcagcagaaagctcatagatcgagcgtacaagggaatgcccatgaacatccggggcccgatgtggtcagtcctcctgaacattgaggaaatgaagttgaaaaaccccggaagataccagatcatgaaggagaagggcaagaggtcatctgagcacatccagcgcatcgaccgggacataagcgggacattaaggaagcatatgttcttcagggatcgatacggaaccaagcagcgggaactactccacatcctcctggcatatgaggagtataacccggaggtgggctactgcagggacctgagccacatcgccgccttgttcctcctctatcttcctgaggaggatgcattctgggcactggtgcagctgctggccagtgagaggcactccctgcagggatttcacagcccaaatggcgggaccgtccaggggctccaagaccaacaggagcatgtggtagccacgtcacaatccaagaccatggggcatcaggacaagaaagatctatgtgggcagtgttccccgttaggctgcctcatccggatattgattgacgggatctctctcgggctcaccctgcgcctgtgggacgtgtatctggtagaaggcgaacaggcgttgatgccgataacaagaatcgcctttaaggttcagcagaagcgcctcacgaagacgtccaggtgtggcccgtgggcacgtttttgcaaccggttcgttgatacctgggccagggatgaggacactgtgctcaagcatcttagggcctctatgaagaaactaacaagaaagcagggggacctgccacccccagccaaacccgagcaagggtcgtcggcatccaggcctgtgccggcttcacgtggcgggaagaccctctgcaagggggacaggcaggcccctccaggcccaccagcctggttcccgcggcccatttggtcagcttccccgccacgggcacctcgttcttccacaccctgtcctggtggggctgtccgggaagacacctaccctgtgggcactcagggtgtgcccagcccggccctggctcagggaggacctcagggttcctggagattcctgcagtggaactccatgccccgcctcccaacggacctggacgtagagggcccttggttccgccattatgatttcagacagagctgctgggtccgtgccatatcccaggaggaccagctggccccctgctggcaggctgaacaccctgcggagcgggtgagatcggctttcgctgcacccagcactgattccgaccagggcacccccttcagagctagggacgaacagcagtgtgctcccacctcagggccttgcctctgcggcctccacttggaaagttctcagttccctccaggcttctag

SEQ ID NO: 189589 - DNA, 569 bp, Homo sapiens
  Payload ID: 17436
  Gene Symbol: TBC1D3B
  Gene Name: TBC1 domain family, member 3B
  ENST ID: ENST00000616006
  CDS Start-End: 423-569
agaatgtcactggtgcttagcacctatctgctctctggcctgcctcagtggtctacagcagttacacacaggcagtggtatctgtgagcagctctgtggactcaaaggttttctccctgagaggcatgacccaggccagctgattcatcagaatcaggtcctgcccctcctgggagtcagccccacaggaaggcccttgtcctcccttccctgtgccttctcctgggctgagccctgagctggaaagggacagagccagtcctttctgggggtcggcacccaggctggggccgctccaggccccgtgcagttcctcagctctgcctgggttgccttacagtgagacggagctgcctcctctgactgcgcgggaggcgaagcaaattcggcgggagatcagccgaaagagcaagtgggtggatatgctgggagactgggagaaatacaaaagcagcagaaagctcatagatcgagcgtacaagggaatgcccatgaacatccggggcccgatgtggtcagtcctcctgaacattgaggaaatgaagttgaaaaaccccggaagataccag

SEQ ID NO: 189590 - DNA, 2081 bp, Homo sapiens
  Payload ID: 17436
  Gene Symbol: TBC1D3B
  Gene Name: TBC1 domain family, member 3B
  Uniprot ID: A6NDS4
  ENST ID: ENST00000611257
  CDS Start-End: 118-1767
gcctcagtggtctacagcagttacacacaggcagtggtatctgtgagcagctctgtggactcaaaggttttctccctgagaggcatgacccaggccagctgattcatcagaatcaggatggacgtggtagaggtcgcgggtagttggtgggcacaagagcgagaggacatcattatgaaatacgaaaagggacaccgagctgggctgccagaggacaaggggcctaagccttttcgaagctacaacaacaacgtcgatcatttggggattgtacatgagacggagctgcctcctctgactgcgcgggaggcgaagcaaattcggcgggagatcagccgaaagagcaagtgggtggatatgctgggagactgggagaaatacaaaagcagcagaaagctcatagatcgagcgtacaagggaatgcccatgaacatccggggcccgatgtggtcagtcctcctgaacattgaggaaatgaagttgaaaaaccccggaagataccagatcatgaaggagaagggcaagaggtcatctgagcacatccagcgcatcgaccgggacataagcgggacattaaggaagcatatgttcttcagggatcgatacggaaccaagcagcgggaactactccacatcctcctggcatatgaggagtataacccggaggtgggctactgcagggacctgagccacatcgccgccttgttcctcctctatcttcctgaggaggatgcattctgggcactggtgcagctgctggccagtgagaggcactccctgcagggatttcacagcccaaatggcgggaccgtccaggggctccaagaccaacaggagcatgtggtagccacgtcacaatccaagaccatggggcatcaggacaagaaagatctatgtgggcagtgttccccgttaggctgcctcatccggatattgattgacgggatctctctcgggctcaccctgcgcctgtgggacgtgtatctggtagaaggcgaacaggcgttgatgccgataacaagaatcgcctttaaggttcagcagaagcgcctcacgaagacgtccaggtgtggcccgtgggcacgtttttgcaaccggttcgttgatacctgggccagggatgaggacactgtgctcaagcatcttagggcctctatgaagaaactaacaagaaagcagggggacctgccacccccagccaaacccgagcaagggtcgtcggcatccaggcctgtgccggcttcacgtggcaggaagaccctctgcaagggggacaggcaggcccctccaggcccaccagcccggttcccgcggcccatttggtcagcttccccgccacgggcacctcgttcttccacaccctgtcctggtggggctgtccgggaagacacctaccctgtgggcactcagggtgtgcccagcccggccctggctcagggaggacctcagggttcctggagattcctgcagtggaactccatgccccgcctcccaacggacctggacgtagaggggccttggttccgccattatgatttcagacagagctgctgggtccgtgccatatcccaggaggaccagctggccccctgctggcaggctgaacaccctgcggagcgggtgagatcggctttcgctgcacccagcactgattccgaccagggcacccccttcagagctagggacgaacagcagtgtgctcccacctcagggccttgcctctgcggcctccacttggaaagttctcagttccctccaggcttctagaagcatctgggccagggctcatggctggataatttccctaggcttaacaacccaagcaagcttcgcgtcctcgttttatttttggttaaacttatgaatatgtattaagaaagagtgcagcttgagagacattcagagatggaacacaccagaccccagatcacaaagccaaccatgcccagcccctcccagcaccccaagccccacgaccatcgttctgaattctgacgacaccgtgagcctgcctttgtactttaaactcatggaaggataactaccttcacgttttgaaataaatgtttcctgttgaaatg

SEQ ID NO: 189591 - DNA, 2082 bp, Homo sapiens
  Payload ID: 17436
  Gene Symbol: TBC1D3B
  Gene Name: TBC1 domain family, member 3B
  ENST ID: ENST00000617942
  CDS Start-End: 118-1767
gcctcagtggtctacagcagttacacacaggcagtggtatctgtgagcagctctgtggactcaaaggttttctccctgagaggcatgacccaggccagctgattcatcagaatcaggatggacgtggtagaggtcgcgggtagttggtgggcacaagagcgagaggacatcattatgaaatacgaaaagggacaccgagctgggctgccagaggacaaggggcctaagccttttcgaagctacaacaacaacgtcgatcatttggggattgtacatgagacggagctgcctcctctgactgcgcgggaggcgaagcaaattcggcgggagatcagccgaaagagcaagtgggtggatatgctgggagactgggagaaatacaaaagcagcagaaagctcatagatcgagcgtacaagggaatgcccatgaacatccggggcccgatgtggtcagtcctcctgaacattgaggaaatgaagttgaaaaaccccggaagataccagatcatgaaggagaagggcaagaggtcatctgagcacatccagcgcatcgaccgggacataagcgggacattaaggaagcatatgttcttcagggatcgatacggaaccaagcagcgggaactactccacatcctcctggcatatgaggagtataacccggaggtgggctactgcagggacctgagccacatcgccgccttgttcctcctctatcttcctgaggaggatgcattctgggcactggtgcagctgctggccagtgagaggcactccctgcagggatttcacagcccaaatggcgggaccgtccaggggctccaagaccaacaggagcatgtggtagccacgtcacaatccaagaccatggggcatcaggacaagaaagatctatgtgggcagtgttccccgttaggctgcctcatccggatattgattgacgggatctctctcgggctcaccctgcgcctgtgggacgtgtatctggtagaaggcgaacaggcgttgatgccgataacaagaatcgcctttaaggttcagcagaagcgcctcacgaagacgtccaggtgtggcccgtgggcacgtttttgcaaccggttcgttgatacctgggccagggatgaggacactgtgctcaagcatcttagggcctctatgaagaaactaacaagaaagcagggggacctgccacccccagccaaacccgagcaagggtcgtcggcatccaggcctgtgccggcttcacgtggcgggaagaccctctgcaagggggacaggcaggcccctccaggcccaccagcctggttcccgcggcccatttggtcagcttccccgccacgggcacctcgttcttccacaccctgtcctggtggggctgtccgggaagacacctaccctgtgggcactcagggtgtgcccagcccggccctggctcagggaggacctcagggttcctggagattcctgcagtggaactccatgccccgcctcccaacggacctggacgtagagggcccttggttccgccattatgatttcagacagagctgctgggtccgtgccatatcccaggaggaccagctggccccctgctggcaggctgaacaccctgcggagcgggtgagatcggctttcgctgcacccagcactgattccgaccagggcacccccttcagagctagggacgaacagcagtgtgctcccacctcagggccttgcctctgcggcctccacttggaaagttctcagttccctccaggcttctagaagcatctgggccagggctcatggctggataatttccctaggcttaacaacccaagcaagcttcgcatcctcgttttatttttggttaaacttatgaaaatgtattaagaaagagtgcagctcgagagagattcagagatggaacacaccagaccccagatcacaaagccaaccatgcccagcccctcccagcacccccagccccacgaccatcgttctgaattctgacgacaccgtgagcctgcctttgtacttcaaactcatggaaggataaccaccttcatgttttgaaataaatgtttcctgttgaaatga

SEQ ID NO: 189592 - DNA, 1959 bp, Homo sapiens
  Payload ID: 17436
  Gene Symbol: TBC1D3B
  Gene Name: TBC1 domain family, member 3B
  ENST ID: ENST00000611172
  CDS Start-End: 1-1650
atggacgtggtagaggtcgcgggtagttggtgggcacaagagcgagaggacatcattatgaaatacgaaaagggacaccgagctgggctgccagaggacaaggggcctaagccttttcgaagctacaacaacaacgtcgatcatttggggattgtacatgagacggagctgcctcctctgactgcgcgggaggcgaagcaaattcggcgggagatcagccgaaagagcaagtgggtggatatgctgggagactgggagaaatacaaaagcagcagaaagctcatagatcgagcgtacaagggaatgcccatgaacatccggggcccgatgtggtcagtcctcctgaacattgaggaaatgaagttgaaaaaccccggaagataccagatcatgaaggagaagggcaagaggtcatctgagcacatccagcgcatcgaccgggacataagcgggacattaaggaagcatatgttcttcagggatcgatacggaaccaagcagcgggaactactccacatcctcctggcatatgaggagtataacccggaggtgggctactgcagggacctgagccacatcgccgccttgttcctcctctattttcctgaggaggatgcattctgggcactggtgcagctgctggccagtgagaggcactccctgcagggatttcacagcccaaatggcgggaccgtccaggggctccaagaccaacaggagcatgtggtagccacgtcacaatccaagaccatggggcatcaggacaagaaagatctatgtgggcagtgttccccgttaggctgcctcatccggatattgattgacgggatctctctcgggctcaccctgcgcctgtgggacgtgtatctggtagaaggcgaacaggcgttgatgccgataacaagaatcgcctttaaggttcagcagaagcgcctcacgaagacgtccaggtgtggcccgtgggcacgtttttgcaaccggttcgttgatacctgggccagggatgaggacactgtgctcaagcatcttagggcctctatgaagaaactaacaagaaagcagggggacctgccacccccagccaaacccgagcaagggtcgtcggcatccaggcctgtgccggcttcacgtggcgggaagaccctctgcaagggggacaggcaggcccctccaggcccaccagcccggttcccgcggcccatttggtcagcttccccgccacgggcacctcgttcttccacaccctgtcctggtggggctgtccgggaagacacctaccctgtgggcactcagggtgtgcccagcccggccctggctcagggaggacctcagggttcctggagattcctgcagtggaactccatgccccgcctcccaacggacctggacgtagagggcccttggttccgccattatgatttcagacagagctgctgggtccgtgccatatcccaggaggaccagctggccccctgctggcaggctgaacaccctgcggagcgggtgagatcggctttcgctgcacccagcactgattccgaccagggcacccccttcagagctagggacgaacagcagtatgctcccacctcagggccttgcctctgcggcctccacttggaaagttctcagttccctccaggcttctagaagcatctgggccagggctcatggctggataatttccctaggcttaacaacccaagcaagcttcgcgtcctcgttttatttttggttaaacttatgaaaatgtattaagaaagagtgcagctcgagagagattcagagatggaacacaccagaccccagatcacaaagccaaccatgcccagcccctcccagcacccccagccccacgaccatcgttctgaattctgacgacaccgtgagcctgcctttgtactttaaactcatggaaggataactaccttcacgttttgaaataaatgtttcctgttg

SEQ ID NO: 189593 - DNA, 575 bp, Homo sapiens
  Payload ID: 17436
  Gene Symbol: TBC1D3B
  Gene Name: TBC1 domain family, member 3B
  ENST ID: ENST00000610580
  CDS Start-End: 115-462
tcagtggtctacagcagttacacacaggcagtggtatctgtgagcagctctgtggactcaaaggttttctccctgagaggcatgacccaggccagctgattcatcagaatcaggatggacgtggtagaggtcgcgggtagttggtgggcacaagagcgagaggacatcattatgaaatacgaaaagggacaccgagctgggctgccagaggacaaggggcctaagccttttcgaagctacaacaacaacgtcgatcatttggggattgtacagtcgggtcaacctcctttccagggacagaactcctccctgactcccctgcaggtccagcccgaggttgttaggccagaggtgtggggcccatctagggagccggtgggaatggagactgggctaggtcaggcccctgggcgctcagcagttctgtcggcaagtgagcacaagaggagcggggcagcctgagggtctggccctgtctacttggagacaaccccgtgagacggagctgcctcctctgactgcgcgggaggcgaagcaaattcggcgggagatcagccgaaagagcaagtgggtgg

SEQ ID NO: 189594 - DNA, 2135 bp, Homo sapiens
  Payload ID: 17436
  Gene Symbol: TBC1D3B
  Gene Name: TBC1 domain family, member 3B
  Uniprot ID: A6NDS4
  ENST ID: ENST00000615673
  CDS Start-End: 115-1764
tcagtggtctacagcagttacacacaggcagtggtatctgtgagcagctctgtggactcaaaggttttctccctgagaggcatgacccaggccagctgattcatcagaatcaggatggacgtggtagaggtcgcgggtagttggtgggcacaagagcgagaggacatcattatgaaatacgaaaagggacaccgagctgggctgccagaggacaaggggcctaagccttttcgaagctacaacaacaacgtcgatcatttggggattgtacatgagacggagctgcctcctctgactgcgcgggaggcgaagcaaattcggcgggagatcagccgaaagagcaagtgggtggatatgctgggagactgggagaaatacaaaagcagcagaaagctcatagatcgagcgtacaagggaatgcccatgaacatccggggcccgatgtggtcagtcctcctgaacattgaggaaatgaagttgaaaaaccccggaagataccagatcatgaaggagaagggcaagaggtcatctgagcacatccagcgcatcgaccgggacataagcgggacattaaggaagcatatgttcttcagggatcgatacggaaccaagcagcgggaactactccacatcctcctggcatatgaggagtataacccggaggtgggctactgcagggacctgagccacatcgccgccttgttcctcctctatcttcctgaggaggatgcattctgggcactggtgcagctgctggccagtgagaggcactccctgcagggatttcacagcccaaatggcgggaccgtccaggggctccaagaccaacaggagcatgtggtagccacgtcacaatccaagaccatggggcatcaggacaagaaagatctatgtgggcagtgttccccgttaggctgcctcatccggatattgattgacgggatctctctcgggctcaccctgcgcctgtgggacgtgtatctggtagaaggcgaacaggcgttgatgccgataacaagaatcgcctttaaggttcagcagaagcgcctcacgaagacgtccaggtgtggcccgtgggcacgtttttgcaaccggttcgttgatacctgggccagggatgaggacactgtgctcaagcatcttagggcctctatgaagaaactaacaagaaagcagggggacctgccacccccagccaaacccgagcaagggtcgtcggcatccaggcctgtgccggcttcacgtggcaggaagaccctctgcaagggggacaggcaggcccctccaggcccaccagcccggttcccgcggcccatttggtcagcttccccgccacgggcacctcgttcttccacaccctgtcctggtggggctgtccgggaagacacctaccctgtgggcactcagggtgtgcccagcccggccctggctcagggaggacctcagggttcctggagattcctgcagtggaactccatgccccgcctcccaacggacctggacgtagaggggccttggttccgccattatgatttcagacagagctgctgggtccgtgccatatcccaggaggaccagctggccccctgctggcaggctgaacaccctgcggagcgggtgagatcggctttcgctgcacccagcactgattccgaccagggcacccccttcagagctagggacgaacagcagtgtgctcccacctcagggccttgcctctgcggcctccacttggaaagttctcagttccctccaggcttctagaagcatctgggccagggctcatggctggataatttccctaggcttaacaacccaagcaagcttcgcgtcctcgttttatttttggttaaacttatgaatatgtattaagaaagagtgcagcttgagagacattcagagatggaacacaccagaccccagatcacaaagccaaccatgcccagcccctcccagcaccccaagccccacgaccatcgttctgaattctgacgacaccgtgagcctgcctttgtactttaaactcatggaaggataactaccttcacgttttgaaataaatgtttcctgttgaaatgcttttagattttagacagaaatattgaaaaggcactatagtgtcctcctataccttc

SEQ ID NO: 189595 - DNA, 575 bp, Homo sapiens
  Payload ID: 17436
  Gene Symbol: TBC1D3B
  Gene Name: TBC1 domain family, member 3B
  ENST ID: ENST00000633360
  CDS Start-End: 115-462
tcagtggtctacagcagttacacacaggcagtggtatctgtgagcagctctgtggactcaaaggttttctccctgagaggcatgacccaggccagctgattcatcagaatcaggatggacgtggtagaggtcgcgggtagttggtgggcacaagagcgagaggacatcattatgaaatacgaaaagggacaccgagctgggctgccagaggacaaggggcctaagccttttcgaagctacaacaacaacgtcgatcatttggggattgtacagtcgggtcaacctcctttccagggacagaactcctccctgactcccctgcaggtccagcccgaggttgttaggccagaggtgtggggcccatctagggagccggtgggaatggagactgggctaggtcaggcccctgggcgctcagcagttctgtcggcaagtgagcacaagaggagcggggcagcctgagggtctggccctgtctacctggagacaaccccgtgagacggagctgcctcctctgactgcgcgggaggcgaagcaaattcggcgggagatcagccgaaagagcaagtgggtgg

SEQ ID NO: 189596 - DNA, 2081 bp, Homo sapiens
  Payload ID: 17436
  Gene Symbol: TBC1D3B
  Gene Name: TBC1 domain family, member 3B
  ENST ID: ENST00000632779
  CDS Start-End: 118-1767
gcgtcagtggtctacagcagttacacacaggcagtggtatctgtgagcagctctgtggactcaaaggttttctccctgagaggcatgacccaggccagctgattcatcagaatcaggatggacgtggtagaggtcgcgggtagttggtgggcacaagagcgagaggacatcattatgaaatacgaaaagggacaccgagctgggctgccagaggacaaggggcctaagccttttcgaagctacaacaacaacgtcgatcatttggggattgtacatgagacggagctgcctcctctgactgcgcgggaggcgaagcaaattcggcgggagatcagccgaaagagcaagtgggtggatatgctgggagactgggagaaatacaaaagcagcagaaagctcatagatcgagcgtacaagggaatgcccatgaacatccggggcccgatgtggtcagtcctcctgaacattgaggaaatgaagttgaaaaaccccggaagataccagatcatgaaggagaagggcaagaggtcatctgagcacatccagcgcatcgaccgggacataagcgggacattaaggaagcatatgttcttcagggatcgatacggaaccaagcagcgggaactactccacatcctcctggcatatgaggagtataacccggaggtgggctactgcagggacctgagccacatcgccgccttgttcctcctctattttcctgaggaggatgcattctgggcactggtgcagctgctggccagtgagaggcactccctgcagggatttcacagcccaaatggcgggaccgtccaggggctccaagaccaacaggagcatgtggtagccacgtcacaatccaagaccatggggcatcaggacaagaaagatctatgtgggcagtgttccccgttaggctgcctcatccggatattgattgacgggatctctctcgggctcaccctgcgcctgtgggacgtgtatctggtagaaggcgaacaggcgttgatgccgataacaagaatcgcctttaaggttcagcagaagcgcctcacgaagacgtccaggtgtggcccgtgggcacgtttttgcaaccggttcgttgatacctgggccagggatgaggacactgtgctcaagcatcttagggcctctatgaagaaactaacaagaaagcagggggacctgccacccccagccaaacccgagcaagggtcgtcggcatccaggcctgtgccggcttcacgtggcgggaagaccctctgcaagggggacaggcaggcccctccaggcccaccagcccggttcccgcggcccatttggtcagcttccccgccacgggcacctcgttcttccacaccctgtcctggtggggctgtccgggaagacacctaccctgtgggcactcagggtgtgcccagcccggccctggctcagggaggacctcagggttcctggagattcctgcagtggaactccatgccccgcctcccaacggacctggacgtagagggcccttggttccgccattatgatttcagacagagctgctgggtccgtgccatatcccaggaggaccagctggccccctgctggcaggctgaacaccctgcggagcgggtgagatcggctttcgctgcacccagcactgattccgaccagggcacccccttcagagctagggacgaacagcagtatgctcccacctcagggccttgcctctgcggcctccacttggaaagttctcagttccctccaggcttctagaagcatctgggccagggctcatggctggataatttccctaggcttaacaacccaagcaagcttcgcgtcctcgttttatttttggttaaacttatgaaaatgtattaagaaagagtgcagctcgagagagattcagagatggaacacaccagaccccagatcacaaagccaaccatgcccagcccctcccagcacccccagccccacgaccatcgttctgaattctgacgacaccgtgagcctgcctttgtactttaaactcatggaaggataactaccttcacgttttgaaataaatgtttcctgttgaaatg

SEQ ID NO: 189597 - DNA, 569 bp, Homo sapiens
  Payload ID: 17436
  Gene Symbol: TBC1D3B
  Gene Name: TBC1 domain family, member 3B
  ENST ID: ENST00000631380
  CDS Start-End: 423-569
agaatgtcactgctgcttagcacctatctgctctctggcctgcctcagtggtctacagcagttacacacaggcagtggtatctgtgagcagctctgtggactcaaaggttttctccctgagaggcatgacccaggccagctgattcatcagaatcaggtcctgcccctcctgggagtcagccccacaggaaggcccttgtcctcccttccctgtgccttctcctgggctgagccctgagctggaaagggacagagccagtcctttctgggggtcggcacccaggctggggccgctccaggccccgtgcagttcctcagctctgcctgggttgccttacagtgagacggagctgcctcctctgactgcgcgggaggcgaagcaaattcggcgggagatcagccgaaagagcaagtgggtggatatgctgggagactgggagaaatacaaaagcagcagaaagctcatagatcgagcgtacaagggaatgcccatgaacatccggggcccgatgtggtcagtcctcctgaacattgaggaaatgaagttgaaaaaccccggaagataccag

SEQ ID NO: 189598 - DNA, 575 bp, Homo sapiens; identical to SEQ ID NO: 189593
  Payload ID: 17436
  Gene Symbol: TBC1D3B
  Gene Name: TBC1 domain family, member 3B
  ENST ID: ENST00000632876
  CDS Start-End: 115-462

SEQ ID NO: 189599 - DNA, 569 bp, Homo sapiens
  Payload ID: 17436
  Gene Symbol: TBC1D3B
  Gene Name: TBC1 domain family, member 3B
  ENST ID: ENST00000631669
  CDS Start-End: 423-569
agaatgtcactggtgcttagcacctatctgctctctggcctgcgtcagtggtctacagcagttacacacaggcagtggtatctgtgagcagctctgtggactcaaaggttttctccctgagaggcatgacccaggccagctgattcatcagaatcaggtcctgcccctcctgggagtcagccccacaggaaggcccttgtcctcccttccctgtgccttctcctgggctgagccctgagctggaaagggacagagccagtcctttctgggggtcggcacccaggctggggccgctccaggccccgtgcagttcctcagctctgcctgggttgccttacagtgagacggagctgcctcctctgactgcgcgggaggcgaagcaaattcggcgggagatcagccgaaagagcaagtgggtggatatgctgggagactgggagaaatacaaaagcagcagaaagctcatagatcgagcgtacaagggaatgcccatgaacatccggggcccgatgtggtcagtcctcctgaacattgaggaaatgaagttgaaaaaccccggaagataccag

SEQ ID NO: 189600 - DNA, 1650 bp, Homo sapiens
  Payload ID: 17437
  Gene Symbol: TBC1D3C
  Gene Name: TBC1 domain family, member 3C
  ENST ID: ENST00000617125
  CDS Start-End: 1-1650
atggacgtggtagaggtcgcgggcagttggtgggcacaagagcgagaggacatcattatgaaatacgaaaagggacaccgagctgggctgccagaggacaaggggcctaagccttttcgaagctacaacaacaacgtcgatcatttggggattgtacatgagacggagctgcctcctctgactgcgcgggaggcgaagcaaattcggcgggagatcagccgaaagagcaagtgggtggatatgctgggagactgggagaaatacaaaagcagcagaaagctcatagatcgagcgtacaagggaatgcccatgaacatccggggcccgatgtggtcagtcctcctgaacactgaggaaatgaagttgaaaaaccccggaagataccagatcatgaaggagaagggcaagaggtcatctgagcacatccagcgcatcgaccgggacgtaagcgggacattaaggaagcatatattcttcagggatcgatacggaaccaagcagcgggaactactccacatcctcctggcatatgaggagtacaacccggaggtgggctactgcagggacctgagccacatcgccgccttgttcctcctctatcttcctgaggaggatgcattctgggcactggtgcagctgctggccagtgagaggcactccctgcagggatttcacagcccaaatggcgggaccgtccaggggctccaagaccaacaggagcatgtggtagccacgtcacaacccaagaccatggggcatcaggacaagaaagatctatgtgggcagtgttccccgttaggctgcctcatccggatattgattgacgggatctctctcgggctcaccctgcgcctgtgggacgtgtatctggtagaaggcgaacaggcgttgatgccgataacaagaatcgcctttaaggttcagcagaagcgcctcacgaagacgtccaggtgtggcccgtgggcacgtttttgcaaccggttcgttgatacctgggccagggatgaggacactgtgctcaagcatcttagggcctctatgaagaaactaacaagaaagcagggggacctgcaacccccagccaaacccgagcaagggtcgtcggcatccaggcctgtgccggcttcacgtggcgggaagaccctctgcaagggggacaggcaggcccctccaggcccaccagcccggttcccgcggcccatttggtcagcttccccgccacgggcacctcgttcttccacaccctgtcctggtggggctgtccgggaagacacctaccctgtgggcactcagggtgtgcccagcccggccctggctcagggaggacctcagggttcctggagattcctgcagtggaactccatgccccgcctcccaacggacctggacgtagagggcccttggttccgccattatgatttcagacagagctgctgggtccgtgccatatcccaggaggaccagctggccccctgctggcaggctgaacaccctgcggagcgggtgagatcggctttcgctgcacccagcactgattccgaccagggcacccccttcagagctagggacgaacagccgtgtgctcccacctcagggccttgcctctgcggcctccacttggaaagttctcagttccctccaggcttctag

SEQ ID NO: 189601 - DNA, 2063 bp, Homo sapiens
  Payload ID: 17437
  Gene Symbol: TBC1D3C
  Gene Name: TBC1 domain family, member 3C
  Uniprot ID: Q6IPX1
  ENST ID: ENST00000622206
  CDS Start-End: 99-1748
gttacacacaggcagtggtatctgtgagcagctctgtggactcaaaggttttctccctgagaggcacgacccaggccagctgattcatcagaatcaggatggacgtggtagaggtcgcgggcagttggtgggcacaagagcgagaggacatcattatgaaatacgaaaagggacaccgagctgggctgccagaggacaaggggcctaagccttttcgaagctacaacaacaacgtcgatcatttggggattgtacatgagacggagctgcctcctctgactgcgcgggaggcgaagcaaattcggcgggagatcagccgaaagagcaagtgggtggatatgctgggagactgggagaaatacaaaagcagcagaaagctcatagatcgagcgtacaagggaatgcccatgaacatccggggcccgatgtggtcagtcctcctgaacactgaggaaatgaagttgaaaaaccccggaagataccagatcatgaaggagaagggcaagaggtcatctgagcacatccagcgcatcgaccgggacgtaagcgggacattaaggaagcatatattcttcagggatcgatacggaaccaagcagcgggaactactccacatcctcctggcatatgaggagtacaacccggaggtgggctactgcagggacctgagccacatcgccgccttgttcctcctctatcttcctgaggaggatgcattctgggcactggtgcagctgctggccagtgagaggcactccctgcagggatttcacagcccaaatggcgggaccgtccaggggctccaagaccaacaggagcatgtggtagccacgtcacaacccaagaccatggggcatcaggacaagaaagatctatgtgggcagtgttccccgttaggctgcctcatccggatattgattgacgggatctctctcgggctcaccctgcgcctgtgggacgtgtatctggtagaaggcgaacaggcgttgatgccgataacaagaatcgcctttaaggttcagcagaagcgcctcacgaagacgtccaggtgtggcccgtgggcacgtttttgcaaccggttcgttgatacctgggccagggatgaggacactgtgctcaagcatcttagggcctctatgaagaaactaacaagaaagaagggggacctgccacccccagccaaacccgagcaagggtcgtcggcatccaggcctgtgccggcttcacgtggcgggaagaccctctgcaagggggacaggcaggcccctccaggcccaccagcccggttcccgcggcccatttggtcagcttccccgccacgggcacctcgttcttccacaccctgtcctggtggggctgtccgggaagacacctaccctgtgggcactcagggtgtgcccagcccggccctggctcagggaggacctcagggttcctggagattcctgcagtggaactccatgccccgcctcccaacggacctggacgtagagggcccttggttccgccattatgatttcagacagagctgctgggtccgtgccatatcccaggaggaccagctggccccctgctggcaggctgaacaccctgcggagcgggtgagatcggctttcgctgcacccagcactgattccgaccagggcacccccttcagagctagggacgaacagcagtgtgctcccacctcagggccttgcctctgcggcctccacttggaaagttctcagttccctccaggcttctagaagcatctgggccagggctcatggctggataatttccctaggcttaacaacccaagcaagcttcgcatcctcgttttatttttggttaaacttatgaaaatgtattaagaaagagtgcagctcgagagagattcagagatggaacacaccagaccccagatcacaaagccaaccatgcccagcccctcccagcacccccagccccacgaccatcgttctgaattctgacgacaccgtgagcctacctttgtacttcaaactcatggaaggataaccaccttcatgttttgaaataaatgtttcctgttgaaatga

SEQ ID NO: 189602 - DNA, 2116 bp, Homo sapiens
  Payload ID: 17438
  Gene Symbol: TBC1D3D
  Gene Name: TBC1 domain family, member 3D
  Uniprot ID: A0A087WVF3
  ENST ID: ENST00000616101
  CDS Start-End: 158-1807
gaatgtcactggtgcttagcacctatctgctctctggtctgcctcagtggtctacagcagttacacacaggcagtggtatctgtgagcagctctgtggactcaaaggttttctccctgagaggcacgacccaggccagctgattcatcagaatcaggatggacgtggtagaggtcgcgggcagttggtgggcacaagagcgagaggacatcattatgaaatacgaaaagggacaccgagctgggctgccagaggacaaggggcctaagccttttcgaagctacaacaacaacgtcgatcatttggggattgtacatgagacggagctgcctcctctgactgcgcgggaggcgaagcaaattcggcgggagatcagccgaaagagcaagtgggtggatatgctgggagactgggagaaatacaaaagcagcagaaagctcatagatcgagcgtacaagggaatgcccatgaacatccggggcccgatgtggtcagtcctcctgaacactgaggaaatgaagttgaaaaaccccggaagataccagatcatgaaggagaagggcaagaggtcatctgagcacatccagcgcatcgaccgggacgtaagcgggacattaaggaagcatatattcttcagggatcgatacggaaccaagcagcgggaactactccacatcctcctggcatatgaggagtataacccggaggtgggctactgcagggacctgagccacatcgccgccttgttcctcctctatcttcctgaggaggatgcattctgggcactggtgcagctgctggccagtgagaggcactccctgcagggatttcacagcccaaatggcgggaccgtccaggggctccaagaccaacaggagcatgtggtagccacgtcacaacccaagaccatggggcatcaggacaagaaagatctatgtgggcagtgttccccgttaggctgcctcatccggatattgattgacgggatctctctcgggctcaccctgcgcctgtgggacgtgtatctggtagaaggcgaacaggcgttgatgccgataacaagaatcgcctttaaggttcagcagaagcgcctcacgaagacgtccaggtgtggcccgtgggcacgtttttgcaaccggttcgttgatacctgggccagggatgaggacactgtgctcaagcatcttagggcctctatgaagaaactaacaagaaagcagggggacctgccacccccagccaaacccgagcaagggtcgtcggcatccaggcctgtgccggcttcacgtggcgggaagaccctctgcaagggggacaggcaggcccctccaggcccaccagcccggttcccgcggcccatttggtcagcttccccgccacgggcacctcgttcttccacaccctgtcctggtggggctgtccgggaagacacctaccctgtgggcactcagggtgtgcccagcccggccctggctcagggaggacctcagggttcctggagattcctgcagtggaactccatgccccgcctcccaacggacctggacgtagagggcccttggttccgccattatgatttcagacagagctgctgggtccgtgccatatcccaggaggaccagctggccccctgctggcaggctgaacaccctgcggagcgggtgagatcggctttcgctgcacccagcactgattccgaccagggcacccccttcagagctagggacgaacagcagtgtgctcccacctcagggccttgcctctgcggcctccacttggaaagttctcagttccctccaggcttctagaagcatctgggccagggctcatggctggataatttccctaggcttaacaacccaagcaagcttcgcatcctcgttttatttttggttaaacttatgaaaatgtattaagaaagagtgcagctcgagagagattcagagatggaacacaccagaccccagatcacaaagccaaccatgcccggcccctcccagcacccccagccccacgaccatcgttctgaattctgacgacaccgtgagcctgcctttgtacttcaaactcatggaaggataaccaccttcatgttttgaaataaatgtttcctgttg

SEQ ID NO: 189603 - DNA, 2305 bp, Homo sapiens
  Payload ID: 17438
  Gene Symbol: TBC1D3D
  Gene Name: TBC1 domain family, member 3D
  Uniprot ID: A0A087WVF3
  ENST ID: ENST00000618737
  CDS Start-End: 158-1807
gaatgtcactggtgcttagcacctatctgctctctggtctgcctcagtggtctacagcagttacacacaggcagtggtatctgtgagcagctctgtggactcaaaggttttctccctgagaggcacgacccaggccagctgattcatcagaatcaggatggacgtggtagaggtcgcgggcagttggtgggcacaagagcgagaggacatcattatgaaatacgaaaagggacaccgagctgggctgccagaggacaaggggcctaagccttttcgaagctacaacaacaacgtcgatcatttggggattgtacatgagacggagctgcctcctctgactgcgcgggaggcgaagcaaattcggcgggagatcagccgaaagagcaagtgggtggatatgctgggagactgggagaaatacaaaagcagcagaaagctcatagatcgagcgtacaagggaatgcccatgaacatccggggcccgatgtggtcagtcctcctgaacactgaggaaatgaagttgaaaaaccccggaagataccagatcatgaaggagaagggcaagaggtcatctgagcacatccagcgcatcgaccgggacgtaagcgggacattaaggaagcatatattcttcagggatcgatacggaaccaagcagcgggaactactccacatcctcctggcatatgaggagtataacccggaggtgggctactgcagggacctgagccacatcgccgccttgttcctcctctatcttcctgaggaggatgcattctgggcactggtgcagctgctggccagtgagaggcactccctgcagggatttcacagcccaaatggcgggaccgtccaggggctccaagaccaacaggagcatgtggtagccacgtcacaacccaagaccatggggcatcaggacaagaaagatctatgtgggcagtgttccccgttaggctgcctcatccggatattgattgacgggatctctctcgggctcaccctgcgcctgtgggacgtgtatctggtagaaggcgaacaggcgttgatgccgataacaagaatcgcctttaaggttcagcagaagcgcctcacgaagacgtccaggtgtggcccgtgggcacgtttttgcaaccggttcgttgatacctgggccagggatgaggacactgtgctcaagcatcttagggcctctatgaagaaactaacaagaaagcagggggacctgccacccccagccaaacccgagcaagggtcgtcggcatccaggcctgtgccggcttcacgtggcgggaagaccctctgcaagggggacaggcaggcccctccaggcccaccagcccggttcccgcggcccatttggtcagcttccccgccacgggcacctcgttcttccacaccctgtcctggtggggctgtccgggaagacacctaccctgtgggcactcagggtgtgcccagcccggccctggctcagggaggacctcagggttcctggagattcctgcagtggaactccatgccccgcctcccaacggacctggacgtagagggcccttggttccgccattatgatttcagacagagctgctgggtccgtgccatatcccaggaggaccagctggccccctgctggcaggctgaacaccctgcggagcgggtgagatcggctttcgctgcacccagcactgattccgaccagggcacccccttcagagctagggacgaacagcagtgtgctcccacctcagggccttgcctctgcggcctccacttggaaagttctcagttccctccaggcttctagaagcatctgggccagggctcatggctggataatttccctaggcttaacaacccaagcaagcttcgcatcctcgttttatttttggttaaacttatgaaaatgtattaagaaagagtgcagctcgagagagattcagagatggaacacaccagaccccagatcacaaagccaaccatgcccagcccctcccagcacccccagccccacgaccatcgttctgaattctgacgacaccgtgagcctgcctttgtacttcaaactcatggaaggataaccaccttcatgttttgaaataaatgtttcctgttgaaatgattttagattttagacagaaatattgaaaaggcactatagtatcctcctataccttccatccagctgcccctaataatgatgttttgcagtcccatggcacataagaaatttaggccgggtgtggtggctcacacctgtaatcccagcaatttgagaggtcgaggcgggaggttcaggttcact

SEQ ID NO: 189604 - DNA, 2076 bp, Homo sapiens
  Payload ID: 17439
  Gene Symbol: TBC1D3E
  Gene Name: TBC1 domain family, member 3E
  Uniprot ID: A0A087X179
  ENST ID: ENST00000621587
  CDS Start-End: 118-1767
gcctcagtggtctacagcagttacacacaggcagtggtatctgtgagcagctctgtggactcaaaggttttctccctgagaggcatgacccaggccagctgattcatcagaatcaggatggacgtggtagaggtcgcgggcagttggtgggcacaagagcgagaggacatcattatgaaatacgaaaagggacaccgagctgggctgccagaggacaaggggcctaagccttttcgaagctacaacaacaacgtcgatcatttggggattgtacatgagacggagctgcctcctctgactgcgcgggaggcgaagcaaattcggcgggagatcagccgaaagagcaagtgggtggatatgctgggagactgggagaaatacaaaagcagcagaaagctcatagatcaagcgtacaagggaatgcccatgaacatccggggcccgatgtggtcagtcctcctgaacactgaggaaatgaagttgaaaaaccccggaagataccagatcatgaaggagaagggcaagaagtcatctgagcacatccagcgcatcgaccgggacgtaagcgggacattaaggaagcatatattcttcagggatcgatacggaaccaagcagcgggaactactccacatcctcctggcatatgaggagtacaacccggaggtgggctactgcagggacctgagccacatcgccgccttgttcctcctctatcttcctgaggaggatgcattctgggcactggtgcagctgctggccagtgagaggcactccctgcagggatttcacagcccaaatggcgggaccgtccaggggctccaagaccaacaggagcatgtggtagccacgtcacaacccaagaccatggggcatcaggacaagaaagatctatgtgggcagtgttccccgttaggctgcctcatccggatattgattgacgggatctctctcgggctcaccctgcgcctgtgggacgtgtatctggtagaaggcgaacaggcgctgatgccgataacaagaatcgcctttaaggttcagcagaagcgcctcacgaagacgtccaggtgtggcccgtgggcacgtttttgcaaccggttcgttgatacctgggccagggatgaggacactgtgctcaagcatcttagggcctctatgaagaaactaacaagaaagaagggggacctgccacccccagccaaacccgagcaagggtcgtcggcatccaggcctgtgccggcttcacgtggcgggaagaccctctgcaagggggacaggcaggcccctccaggcccaccagcccggttcccgcggcccatttggtcagcttccccgccacgggcacctcgttcttccacaccctgtcctggtggggctgtccgggaagacacctaccctgtgggcactcagggtgtgcccagcccggccctggctcagggaggacctcagggttcctggagattcctgcagtggaactccatgccccgcctcccaacggacctggacgtagagggcccttggttccgccattatgatttcagacagagctgctgggtccgtgccatatcccaggaggaccagctggccccctgctggcaggctgaacaccctgcggagcgggtgagatcggctttcgctgcacccagcactgattccgaccagggcacccccttcagagctagggacgaacagcagtgtgctcccacctcagggccttgcctctgcggcctccacttggaaagttctcagttccctccaggcttctagaagcatctgggccagggctcatggctggataatttccctaggcttaacaacccaagcaagcttcgcatcctcgttttatttttggttaaacttatgaaaatgtattaagaaagagtgcagctcgagagagattcagagatggaacacaccagaccccagatcacaaagccaaccatgcccagcccctcccagcacccccagccccacgaccatcgttctgaattctgacgacaccgtgagcctgcctttgtacttcaaactcatggaaggataaccaccttcatgttttgaaataaatgtttcctgttg

SEQ ID NO: 189605 - DNA, 1650 bp, Homo sapiens
  Payload ID: 17439
  Gene Symbol: TBC1D3E
  Gene Name: TBC1 domain family, member 3E
  ENST ID: ENST00000617226
  CDS Start-End: 1-1650
atggacgtggtagaggtcgcgggcagttggtgggcacaagagcgagaggacatcattatgaaatacgaaaagggacaccgagctgggctgccagaggacaaggggcctaagccttttcgaagctacaacaacaacgtcgatcatttggggattgtacatgagacggagctgcctcctctgactgcgcgggaggcgaagcaaattcggcgggagatcagccgaaagagcaagtgggtggatatgctgggagactgggagaaatacaaaagcagcagaaagctcatagatcgagcgtacaagggaatgcccatgaacatccggggcccgatgtggtcagtcctcctgaacactgaggaaatgaagttgaaaaaccccggaagataccagatcatgaaggagaagggcaagaggtcatctgagcacatccagcgcatcgaccgggacgtaagcgggacattaaggaagcatatattcttcagggatcgatacggaaccaagcagcgggaactactccacatcctcctggcatatgaggagtacaacccggaggtgggctactgcagggacctgagccacatcgccgccttgttcctcctctatcttcctgaggaggatgcattctgggcactggtgcagctgctggccagtgagaggcactccctgcagggatttcacagcccaaatggcgggaccgtccaggggctccaagaccaacaggagcatgtggtagccacgtcacaacccaagaccatggggcatcaggacaagaaagatctatgtgggcagtgttccccgttaggctgcctcatccggatattgattgacgggatctctctcgggctcaccctgcgcctgtgggacgtgtatctggtagaaggcgaacaggcgctgatgccgataacaagaatcgcctttaaggttcagcagaagcgcctcacgaagacgtccaggtgtggcccgtgggcacgtttttgcaaccggttcgttgatacctgggccagggatgaggacactgtgctcaagcatcttagggcctctatgaagaaactaacaagaaagaagggggacctgccacccccagccaaacccgagcaagggtcgtcggcatccaggcctgtgccggcttcacgtggcgggaagaccctctgcaagggggacaggcaggcccctccaggcccaccagcccggttcccgcggcccatttggtcagcttccccgccacgggcacctcgttcttccacaccctgtcctggtggggctgtccgggaagacacctaccctgtgggcactcagggtgtgcccagcccggccctggctcagggaggacctcagggttcctggagattcctgcagtggaactccatgccccgcctcccaacggacctggacgtagagggcccttggttccgccattatgatttcagacagagctgctgggtccgtgccatatcccaggaggaccagctggccccctgctggcaggctgaacaccctgcggagcgggtgagatcggctttcgctgcacccagcactgattccgaccagggcacccccttcagagctagggacgaacagcagtgtgctcccacctcagggccttgcctctgcggcctccacttggaaagttctcagttccctccaggcttctag

SEQ ID NO: 189606 - DNA, 2117 bp, Homo sapiens
  Payload ID: 17440
  Gene Symbol: TBC1D3F
  Gene Name: TBC1 domain family, member 3F
  ENST ID: ENST00000620210
  CDS Start-End: 158-1645
gaatgtcactggtgcttagcacctatctgctctctggcctgcgtcagtggtctacagcagttacacacaggcagtggtatctgtgagcagctctgtggactcaaaggttttctccctgagaggcatgacccaggccagctgattcatcagaatcaggatggacgtggtagaggtcgcgggtagttggtgggcacaagagcgagaggacatcattatgaaatacgaaaagggacaccgagctgggctgccagaggacaaggggcctaagccttttcgaagctacaacaacaacgtcgatcatttggggattgtacatgagacggagctgcctcctctgactgcgcgggaggcgaagcaaattcggcgggagatcagccgaaagagcaagtgggtggatatgctgggagactgggagaaatacaaaagcagcagaaagctcatagatcgagcgtacaagggaatgcccatgaacatccggggcccgatgtggtcagtcctcctgaacattgaggaaatgaagttgaaaaaccccggaagataccagatcatgaaggagaagggcaagaggtcatctgagcacatccagcgcatcgaccgggacgtaagcgggacattaaggaagcatatattcttcagggatcgatacggaaccaagcagcgggaactactccacatcctcctggcatatgaggagtacaacccggaggtgggctactgcagggacctgagccacatcgccgccttgttcctcctctatcttcctgaggaggatgcattctgggcactggtgcagctgctggccagtgagaggcactccctgcagggatttcacagcccaaatggcgggaccgtccaggggctccaagaccaacaggagcatgtggtagccacgtcacaacccaagaccatggggcatcaggacaagaaagatctatgtgggcagtgttccccgttaggctgcctcatccggatattgattgacgggatctctctcgggctcaccctgcgcctgtgggacgtgtatctggtagaaggcgaacaggcgttgatgccgataacaagaatcgcctttaaggttcagcagaagcgcctcacgaagacgtccaggtgtggcccgtgggcacgtttttgcaaccggttcgttgatacctgggccagggatgaggacactgtgctcaagcatcttagggcctctatgaagaaactaacaagaaagaagggggacgtgccacccccagccaaacccgagcaagggtcgtcggcatccaggcctgtgccggcttcacgtggcgggaagaccctctgcaagggggacagacaggcccctccaggcccaccagcccggttcccgcggcccatttggtcagcttccccgccacgggcacctcgttcttccacaccctgtcctggtggggctgtccgggaagacacctaccctgtgggcactcagggtgtgcccagcccggccctggctcagggaggacctcagggttcctggagattcctgcagtggaactccatgccccgcctcccaaccgacctggacgtagagggcccttggttccgccattatgatttcagacagagctgctgggtccgtgccatatcccaggaggaccagctggccccctgctggcaggcctgaacaccctgcggagcgggtgagatcggctttcgctgcacccagcactgattccgaccagggcacccccttcagagctagggacgaacagcagtgtgctcccacctcagggccttgcctctgcggcctccacttggaaagttctcagttccctccaggcttctagaagcatctgggccagggctcatggctggataatttccctaggcttaacaacccaagcaagcttcgcatcctcgttttatttttggttaaacttatgaaaatgtattaagaaagagtgcagctcgagagagattcagagatggaacacaccagaccccagatcacaaagccaaccatgcccagcccctcccagcacccccagccccacgaccatcgttctgaattctgacgacaccgtgagcctgcctttgtacttcaaactcatggaaggataaccaccttcatgttttgaaataaatgtttcctgttg

SEQ ID NO: 189607 - DNA, 2115 bp, Homo sapiens
  Payload ID: 17440
  Gene Symbol: TBC1D3F
  Gene Name: TBC1 domain family, member 3F
  Uniprot ID: A6NER0
  ENST ID: ENST00000614193
  CDS Start-End: 151-1800
actggtgcttagcacctatctgctctctggcctgcgtcagtggtctacagcagttacacacaggcagtggtatctgtgagcagctctgtggactcaaaggttttctccctgagaggcatgacccaggccagctgattcatcagaatcaggatggacgtggtagaggtcgcgggtagttggtgggcacaagagcgagaggacatcattatgaaatacgaaaagggacaccgagctgggctgccagaggacaaggggcctaagccttttcgaagctacaacaacaacgtcgatcatttggggattgtacatgagacggagctgcctcctctgactgcgcgggaggcgaagcaaattcggcgggagatcagccgaaagagcaagtgggtggatatgctgggagactgggagaaatacaaaagcagcagaaagctcatagatcgagcgtacaagggaatgcccatgaacatccggggcccgatgtggtcagtcctcctgaacattgaggaaatgaagttgaaaaaccccggaagataccagatcatgaaggagaagggcaagaggtcatctgagcacatccagcgcatcgaccgggacgtaagcgggacattaaggaagcatatattcttcagggatcgatacggaaccaagcagcgggaactactccacatcctcctggcatatgaggagtacaacccggaggtgggctactgcagggacctgagccacatcgccgccttgttcctcctctatcttcctgaggaggatgcattctgggcactggtgcagctgctggccagtgagaggcactccctgcagggatttcacagcccaaatggcgggaccgtccaggggctccaagaccaacaggagcatgtggtagccacgtcacaacccaagaccatggggcatcaggacaagaaagatctatgtgggcagtgttccccgttaggctgcctcatccggatattgattgacgggatctctctcgggctcaccctgcgcctgtgggacgtgtatctggtagaaggcgaacaggcgttgatgccgataacaagaatcgcctttaaggttcagcagaagcgcctcacgaagacgtccaggtgtggcccgtgggcacgtttttgcaaccggttcgttgatacctgggccagggatgaggacactgtgctcaagcatcttagggcctctatgaagaaactaacaagaaagaagggggacgtgccacccccagccaaacccgagcaagggtcgtcggcatccaggcctgtgccggcttcacgtggcgggaagaccctctgcaagggggacagacaggcccctccaggcccaccagcccggttcccgcggcccatttggtcagcttccccgccacgggcacctcgttcttccacaccctgtcctggtggggctgtccgggaagacacctaccctgtgggcactcagggtgtgcccagcccggccctggctcagggaggacctcagggttcctggagattcctgcagtggaactccatgccccgcctcccaaccgacctggacgtagagggcccttggttccgccattatgatttcagacagagctgctgggtccgtgccatatcccaggaggaccagctggccccctgctggcaggccgaacaccctgcggagcgggtgagatcggctttcgctgcacccagcactgattccgaccagggcacccccttcagagctagggacgaacagcagtgtgctcccacctcagggccttgcctctgcggcctccacttggaaagttctcagttccctccaggcttctagaagcatctgggccagggctcatggctggataatttccctaggcttaacaacccaagcaagcttcgcatcctcgttttatttttggttaaacttatgaaaatgtattaagaaagagtgcagctcgagagagattcagagatggaacacaccagaccccagatcacaaagccaaccatgcccagcccctcccagcacccccagccccacgaccatcgttctgaattctgacgacaccgtgagcctgcctttgtacttcaaactcatggaaggataaccaccttcatgttttgaaataaatgtttcctgttgaaatga

SEQ ID NO: 189608 - DNA, 1650 bp, Homo sapiens
  Payload ID: 17440
  Gene Symbol: TBC1D3F
  Gene Name: TBC1 domain family, member 3F
  ENST ID: ENST00000613793
  CDS Start-End: 1-1650
atggacgtggtagaggtcgcgggtagttggtgggcacaagagcgagaggacatcattatgaaatacgaaaagggacaccgagctgggctgccagaggacaaggggcctaagccttttcgaagctacaacaacaacgtcgatcatttggggattgtacatgagacggagctgcctcctctgactgcgcgggaggcgaagcaaattcggcgggagatcagccgaaagagcaagtgggtggatatgctgggagactgggagaaatacaaaagcagcagaaagctcatagatcgagcgtacaagggaatgcccatgaacatccggggcccgatgtggtcagtcctcctgaacattgaggaaatgaagttgaaaaaccccggaagataccagatcatgaaggagaagggcaagaggtcatctgagcacatccagcgcatcgaccgggacgtaagcgggacattaaggaagcatatattcttcagggatcgatacggaaccaagcagcgggaactactccacatcctcctggcatatgaggagtacaacccggaggtgggctactgcagggacctgagccacatcgccgccttgttcctcctctatcttcctgaggaggatgcattctgggcactggtgcagctgctggccagtgagaggcactccctgcagggatttcacagcccaaatggcgggaccgtccaggggctccaagaccaacaggagcatgtggtagccacgtcacaacccaagaccatggggcatcaggacaagaaagatctatgtgggcagtgttccccgttaggctgcctcatccggatattgattgacgggatctctctcgggctcaccctgcgcctgtgggacgtgtatctggtagaaggcgaacaggcgttgatgccgataacaagaatcgcctttaaggttcagcagaagcgcctcacgaagacgtccaggtgtggcccgtgggcacgtttttgcaaccggttcgttgatacctgggccagggatgaggacactgtgctcaagcatcttagggcctctatgaagaaactaacaagaaagcagggggacctgccacccccagccaaacccgagcaagggtcgtcggcatccaggcctgtgccggcttcacgtggcgggaagaccctctgcaagggggacaggcaggcccctccaggcccaccagcccggttcccgcggcccatttggtcagcttccccgccacgggcacctcgttcttccacaccctgtcctggtggggctgtccgggaagacacctaccctgtgggcactcagggtgtgcccagcccggccctggctcagggaggacctcagggttcctggagattcctgcagtggaactccatgccccgcctcccaacggacctggacgtagagggcccttggttccgccattatgatttcagacagagctgctgggtccgtgccatatcccaggaggaccagctggccccctgctggcaggctgaacaccctgcggagcgggtgagatcggctttcgctgcacccagcactgattccgaccagggcacccccttcagagctagggacgaacagcagtgtgctcccacctcagggccttgcctctgcggcctccacttggaaagttctcagttccctccaggcttctag

SEQ ID NO: 189609 - DNA, 2117 bp, Homo sapiens; identical to SEQ ID NO: 189606
  Payload ID: 17440
  Gene Symbol: TBC1D3F
  Gene Name: TBC1 domain family, member 3F
  ENST ID: ENST00000634036
  CDS Start-End: 158-1645

SEQ ID NO: 189610 - DNA, 2065 bp, Homo sapiens
  Payload ID: 17441
  Gene Symbol: TBC1D3G
  Gene Name: TBC1 domain family, member 3G
  Uniprot ID: Q6DHY5
  ENST ID: ENST00000569055
  CDS Start-End: 101-1750
cagttacacacaggcagtggtatctgtgagcagctctgtggactcaaaggttttctccctgagaggcatgacccaggccagctgattcatcagaatcaggatggacgtggtagaggtcgcgggcagttggtgggcacaagagcgagaggacatcattatgaaatacgaaaagggacaccgagctgggctgccagaggacaaggggcctaagccttttcgaagctacaacaacaacgtcgatcatttggggattgtacatgagacggagctgcctcctctgactgcgcgggaggcgaagcaaattcggcgggagatcagccgaaagagcaagtgggtggatatgctgggagactgggagaaatacaaaagcagcagaaagctcatagatcgagcgtacaagggaatgcccatgaacatccggggcccgatgtggtcagtcctcctgaacattgaggaaatgaagttgaaaaaccccggaagataccagatcatgaaggagaagggcaagaggtcatctgagcacatccagcgcatcgaccgggacataagcgggacattaaggaagcatatgttcttcagggatcgatacggaaccaagcagcgggaactactccacatcctcctggcatatgaggagtataacccggaggtgggctactgcagggacctgagccacatcgccgccttgttcctcctctatcttcctgaggaggatgcattctgggcactggtgcagctgctggccagtgagaggcactccctgcagggatttcacagcccaaatggcgggaccgtccaggggctccaagaccaacaggagcatgtggtagccacgtcacaacccaagaccatggggcatcaggacaagaaagatctatgtgggcagtgttccccgttaggctgcctcatccggatattgattgacgggatctctctcgggctcaccctgcgcctgtgggacgtgtatctggtagaaggcgaacaggcgttgatgccgataacaagaatcgcctttaaggttcagcagaagcgcctcacgaagacgtccaggtgtggcccgtgggcacgtttttgcaaccggttcgttgatacctgggccagggatgaggacactgtgctcaagcatcttagggcctctatgaagaaactaacaagaaagcagggggacctgccacccccagccaaacccgagcaagggtcgtcggcatccaggcctgtgccggcttcacgtggcgggaagaccctctgcaagggggacaggcaggcccctccaggcccaccagcccggttcccgcggcccatttggtcagcttccccgccacgggcacctcgttcttccacaccctgtcctggtggggctgtccgggaagacacctaccctgtgggcactcagggtgtgcccagcccggccctggctcagggaggacctcagggttcctggagattcctgcagtggaactccatgccccgcctcccaacggacctggacgtagagggcccttggttccgccattatgatttcagacagagctgctgggtccgtgccatatcccaggaggaccagctggccccctgctggcaggctgaacaccctgcggagcgggtgagatcggctttcgctgcacccagcactgattccgaccagggcacccccttcagagctagggacgaacagcagtgtgctcccacctcagggccttgcctctgcggcctccacttggaaagttctcagttccctccaggcttctagaagcatctgggccagggctcatggctggataatttccctaggcttaacaacccaagcaagcttcgcatcctcgttttatttttggttaaacttatgaaaatgtattaagaaagagtgcagctcgagagagattcagagatggaacacaccagaccccagatcacaaagccaaccatgcccagcccctcccagcacccccagccccacgaccatcgttctgaattctgacgacaccgtgagcctgcctttgtacttcaaactcatggaaggataaccaccttcatgttttgaaataaatgtttcctgttgaaatga

SEQ ID NO: 189611 - DNA, 2065 bp, Homo sapiens; identical to SEQ ID NO: 189610
  Payload ID: 17441
  Gene Symbol: TBC1D3G
  Gene Name: TBC1 domain family, member 3G
  Uniprot ID: Q6DHY5
  ENST ID: ENST00000617387
  CDS Start-End: 101-1750

SEQ ID NO: 189612 - DNA, 2114 bp, Homo sapiens
  Payload ID: 17442
  Gene Symbol: TBC1D3H
  Gene Name: TBC1 domain family, member 3H
  Uniprot ID: P0C7X1
  ENST ID: ENST00000622584
  CDS Start-End: 151-1800
actggtgcttagcacctgtctgctctctggcctgcctcagtggtctacagcagttacacacaggcagtggtatctgtgagcagctctgtggactcaaaggttttctccctgagaggcatgacccaggccagctgattcatcagaatcaggatggacgtggtagaggtcgcgggcagttggtgggcacaagagcgagaggacatcattatgaaatacgaaaagggacaccgagctgggctgccagaggacaaggggcctaagccttttcgaagctacaacaacaacgtcgatcatttggggattgtacatgagacggagctgcctcctctgactgcgcgggaggcgaagcaaattcggcgggagatcagccgaaagagcaagtgggtggatatgctgggagactgggagaaatacaaaagcagcagaaagctcatagatcgagcgtacaagggaatgcccatgaacatccggggcccgatgtggtcagtcctcctgaacactgaggaaatgaagttgaaaaaccccggaagataccagatcatgaaggagaagggcaagaggtcatctgagcacatccagcgcatcgaccgggacataagcgggacattaaggaagcatatgttcttcagggatcgatacggaaccaagcagcgggaactactccacatcctcctggcatatgaggagtataacccggaggtgggctactgcagggacctgagccacatcgccgccttgttcctcctctatcttcctgaggaggatgcattctgggcactggtgcagctgctggccagtgagaggcactccctgcagggatttcacagcccaaatggcgggaccgtccaggggctccaagaccaacaggagcatgtggtagccacgtcacaacccaagaccatggggcatcaggacaagaaagatctatgtgggcagtgttccccgttaggctgcctcatccggatattgattgacgggatctctctcgggctcaccctgcgcctgtgggacgtgtatctggtagaaggcgaacaggcgttgatgccgataacaagaatcgcctttaaggttcagcagaagcgcctcacgaagacgtccaggtgtggcccgtgggcacgtttttgcaaccggttcgttgatacctgggccagggatgaggacactgtgctcaagcatcttagggcctctatgaagaaactaacaagaaagcagggggacctgccacccccagccaaacccgagcaagggtcgtcggcatccaggcctgtgccggcttcacgtggcgggaagaccctctgcaagggggacaggcaggcccctccaggcccaccagcccggttcccgcggcccatttggtcagcttccccgccacgggcacctcgttcttccacaccctgtcctggtggggctgtccgggaagacacctaccctgtgggcactcagggtgtgcccagcccggccctggctcagggaggacctcagggttcctggagattcctgcagtggaactccatgccccgcctcccaacggacctggacgtagagggcccttggttccgccattatgatttcagacagagctgctgggtccgtgccatatcccaggaggaccagctggccccctgctggcaggctgaacaccctgcggagcgggtgagatcggctttcgctgcacccagcactgattccgaccagggcacccccttcagagctagggacgaacagcagtgtgctcccacctcagggccttgcctctgcggcctccacttggaaagttctcagttccctccaggcttctagaagcatctgggccagggctcatggctggataatttccctaggcttaacaacccaagcaagcttcgcgtcctcgttttatttttggttaaacttatgaaaatgtattaagaaagagtgcagctcgagagagattcagagatggaacacaccagaccccagatcacaaagccaaccatgcccagcccctcccagcacccccagccccacgaccatcgttctgaattctgacgacaccgtgagcctgcctttgtacttcaaactcatggaaggataaccaccttcatgttttgaaataaatgtttcctgttgaaatg

SEQ ID NO: 189613 - DNA, 2305 bp, Homo sapiens
  Payload ID: 17442
  Gene Symbol: TBC1D3H
  Gene Name: TBC1 domain family, member 3H
  ENST ID: ENST00000618732
  CDS Start-End: 158-1807
gaatgtcactggtgcttagcacctatctgctctctggcctgcgtcagtggtctacagcagttacacacaggcagtggtatctgtgagcagctctgtggactcaaaggttttctccctgagaggcatgacccaggccagctgattcatcagaatcaggatggacgtggtagaggtcgcgggtagttggtgggcacaagagcgagaggacatcattatgaaatacgaaaagggacaccgagctgggctgccagaggacaaggggcctaagccttttcgaagctacaacaacaacgtcgatcatttggggattgtacatgagacggagctgcctcctctgactgcgcgggaggcgaagcaaattcggcgggagatcagccgaaagagcaagtgggtggatatgctgggagactgggagaaatacaaaagcagcagaaagctcatagatcgagcgtacaagggaatgcccatgaacatccggggcccgatgtggtcagtcctcctgaacattgaggaaatgaagttgaaaaaccccggaagataccagatcatgaaggagaagggcaagaggtcatctgagcacatccagcgcatcgaccgggacgtaagcgggacattaaggaagcatatattcttcagggatcgatacggaaccaagcagcgggaactactccacatcctcctggcatatgaggagtataacccggaggtgggctactgcagggacctgagccacatcgccgccttgttcctcctctatcttcctgaggaggatgcattctgggcactggtgcagctgctggccagtgagaggcactccctgcagggatttcacagcccaaatggcgggaccgtccaggggctccaagaccaacaggagcatgtggtagccacgtcacaacccaagaccatggggcatcaggacaagaaagatctatgtgggcagtgttccccgttaggctgcctcatccggatattgattgacgggatctctctcgggctcaccctgcgcctgtgggacgtgtatctggtagaaggcgaacaggcgttgatgccgataacaagaatcgcctttaaggttcagcagaagcgcctcacgaagacgtccaggtgtggcccgtgggcacgtttttgcaaccggttcgttgatacctgggccagggatgaggacactgtgctcaagcatcttagggcctctatgaagaaactaacaagaaagcagggggacctgccacccccagccaaacccgagcaagggtcgtcggcatccaggcctgtgccggcttcacgtggcgggaagaccctctgcaagggggacaggcaggcccctccaggcccaccagcccggttcccgcggcccatttggtcagcttccccgccacgggcacctcgttcttccacaccctgtcctggtggggctgtccgggaagacacctaccctgtgggcactcagggtgtgcccagcccggccctggctcagggaggacctcagggttcctggagattcctgcagtggaactccatgccccgcctcccaacggacctggacgtagagggcccttggttccgccattatgatttcagacagagctgctgggtccgtgccatatcccaggaggaccagctggccccctgctggcaggctgaacaccctgcggagcgggtgagatcggctttcgctgcacccagcactgattccgaccagggcacccccttcagagctagggacgaacagcagtgtgctcccacctcagggccttgcctctgcggcctccacttggaaagttctcagttccctccaggcttctagaagcatctgggccagggctcatggctggataatttccctaggcttaacaacccaagcaagcttcgcatcctcgttttatttttggttaaacttatgaaaatgtattaagaaagagtgcagctcgagagagattcagagatggaacacaccagaccccagatcacaaagccaaccatgcccagcccctcccagcacccccagccccacgaccatcgttctgaattctgacgacaccgtgagcctgcctttgtacttcaaactcatggaaggataaccaccttcatgttttgaaataaatgtttcctgttgaaatgattttagattttagacagaaatattgaaaaggcactatagtatcctcctataccttccatccagctgcccctaataatgatgttttgcagtcccatggcacataagaaatttaggccgggtgtggtggctcacacctgtaatcccagcaatttgagaggtcgaggcgggaggttcaggttcact

SEQ ID NO: 189614 - DNA, 2065 bp, Homo sapiens
  Payload ID: 17442
  Gene Symbol: TBC1D3H
  Gene Name: TBC1 domain family, member 3H
  Uniprot ID: P0C7X1
  ENST ID: ENST00000619743
  CDS Start-End: 101-1750
cagttacacacaggcagtggtatctgtgagcagctctgtggactcaaaggttttctccctgagaggcatgacccaggccagctgattcatcagaatcaggatggacgtggtagaggtcgcgggcagttggtgggcacaagagcgagaggacatcattatgaaatacgaaaagggacaccgagctgggctgccagaggacaaggggcctaagccttttcgaagctacaacaacaacgtcgatcatttggggattgtacatgagacggagctgcctcctctgactgcgcgggaggcgaagcaaattcggcgggagatcagccgaaagagcaagtgggtggatatgctgggagactgggagaaatacaaaagcagcagaaagctcatagatcgagcgtacaagggaatgcccatgaacatccggggcccgatgtggtcagtcctcctgaacactgaggaaatgaagttgaaaaaccccggaagataccagatcatgaaggagaagggcaagaggtcatctgagcacatccagcgcatcgaccgggacataagcgggacattaaggaagcatatgttcttcagggatcgatacggaaccaagcagcgggaactactccacatcctcctggcatatgaggagtataacccggaggtgggctactgcagggacctgagccacatcgccgccttgttcctcctctatcttcctgaggaggatgcattctgggcactggtgcagctgctggccagtgagaggcactccctgcagggatttcacagcccaaatggcgggaccgtccaggggctccaagaccaacaggagcatgtggtagccacgtcacaacccaagaccatggggcatcaggacaagaaagatctatgtgggcagtgttccccgttaggctgcctcatccggatattgattgacgggatctctctcgggctcaccctgcgcctgtgggacgtgtatctggtagaaggcgaacaggcgttgatgccgataacaagaatcgcctttaaggttcagcagaagcgcctcacgaagacgtccaggtgtggcccgtgggcacgtttttgcaaccggttcgttgatacctgggccagggatgaggacactgtgctcaagcatcttagggcctctatgaagaaactaacaagaaagcagggggacctgccacccccagccaaacccgagcaagggtcgtcggcatccaggcctgtgccggcttcacgtggcgggaagaccctctgcaagggggacaggcaggcccctccaggcccaccagcccggttcccgcggcccatttggtcagcttccccgccacgggcacctcgttcttccacaccctgtcctggtggggctgtccgggaagacacctaccctgtgggcactcagggtgtgcccagcccggccctggctcagggaggacctcagggttcctggagattcctgcagtggaactccatgccccgcctcccaacggacctggacgtagagggcccttggttccgccattatgatttcagacagagctgctgggtccgtgccatatcccaggaggaccagctggccccctgctggcaggctgaacaccctgcggagcgggtgagatcggctttcgctgcacccagcactgattccgaccagggcacccccttcagagctagggacgaacagcagtgtgctcccacctcagggccttgcctctgcggcctccacttggaaagttctcagttccctccaggcttctagaagcatctgggccagggctcatggctggataatttccctaggcttaacaacccaagcaagcttcgcatcctcgttttatttttggttaaacttatgaaaatgtattaagaaagagtgcagctcgagagagattcagagatggaacacaccagaccccagatcacaaagccaaccatgcccagcccctcccagcacccccagccccacgaccatcgttctgaattctgacgacaccgtgagcctgcctttgtacttcaaactcatggaaggataaccaccttcatgttttgaaataaatgtttcctgttgaaatga

SEQ ID NO: 189615 - DNA, 2065 bp, Homo sapiens; identical to SEQ ID NO: 189614
  Payload ID: 17442
  Gene Symbol: TBC1D3H
  Gene Name: TBC1 domain family, member 3H
  Uniprot ID: P0C7X1
  ENST ID: ENST00000610350
  CDS Start-End: 101-1750

SEQ ID NO: 189616 - DNA, 2122 bp, Homo sapiens
  Payload ID: 17443
  Gene Symbol: TBC1D3I
  Gene Name: TBC1 domain family, member 3I
  ENST ID: ENST00000619234
  CDS Start-End: 158-1807
gaatgtcactggtgcttagcacctatctgctctctggtctgcctcagtggtctacagcagttacacacaggcagtggtatctgtgagcagctctgtggactcaaaggttttctccctgagaggcatgacccaggccagctgattcatcagaatcaggatggacgtggtagaggtcgcgggcagttggtgggcacaagagcgagaggacatcattatgaaatacgaaaagggacaccgagctgggctgccagaggacaaggggcctaagccttttcgaagctacaacaacaacgtcgatcatttggggattgtacatgagacggagctgcctcctctgactgcgcgggaggcgaagcaaattcggcgggagatcagccgaaagagcaagtgggtggatatgctgggagactgggagaaatacaaaagcagcagaaagctcatagatcgagcgtacaagggaatgcccatgaacatccggggcccgatgtggtcagtcctcctgaacactgaggaaatgaagatgaaaaaccccggaagataccagatcatgaaggagaagggcaagaggtcatctgagcacatccagcgcatcgaccgggacgtaagcgggacattaaggaagcatatattcttcagggatcgatacggaaccaagcagcgggaactactccacatcctcctggcatatgaggagtataacccggaggtgggctactgcagggacctgagccacatcgccgccttgttcctcctctatcttcctgaggaggatgcattctgggcactggtgcagctgctggccagtgagaggcactccctgcagggatttcacagcccaaatggcgggaccgtccaggggctccaagaccaacaggagcatgtggtagccacgtcacaacccaagaccatggggcatcaggacaagaaagatctatgtgggcagtgttccccgttaggctgcctcatccggatattgattgacgggatctctctcgggctcaccctgcgcctgtgggacgtgtatctggtagaaggcgaacaggcgttgatgccgataacaagaatcgcctttaaggttcagcagaagcgcctcacgaagacgtccaggtgtggcccgtgggcacgtttttgcaaccggttcgttgatacctgggccagggatgaggacactgtgctcaagcatcttagggcctctatgaagaaactaacaagaaagcagggggacctgccacccccagccaaacccgagcaagggtcgtcggcatccaggcctgtgccggcttcacgtggcgggaagaccctctgcaagggggacaggcaggcccctccaggcccaccagcccggttcccgcggcccatttggtcagcttccccgccacgggcacctcgttcttccacaccctgtcctggtggggctgtccgggaagacacctaccctgtgggcactcagggtgtgcccagcccggccctggctcagggaggacctcagggttcctggagattcctgcagtggaactccatgccccgcctcccaacggacctggacgtagagggcccttggttccgccattatgatttcagacagagctgctgggtccgtgccatatcccaggaggaccagctggccccctgctggcaggctgaacaccctgcggagcgggtgagatcggctttcgctgcacccagcactgattccgaccagggcacccccttcagagctagggacgaacagcagtgtgctcccacctcagggccttgcctctgcggcctccacttggaaagttctcagttccctccaggcttctagaagcatctgggccagggctcatggctggataatttccctaggcttaacaacccaagcaagcttcgcgtcctcgttttatttttggttaaacttatgaaaatgtattaagaaagagtgcagctcgagagagattcagagatggaacacaccagaccccagatcacaaagccaaccatgcccagcccctcccagcacccccagccccacgaccatcgttctgaattctgacgacaccgtgagcctgcctttgtacttcaaactcatggaaggataaccaccttcatgttttgaaataaatgtttcctgttgaaatga

SEQ ID NO: 189617 - DNA, 1790 bp, Homo sapiens
  Payload ID: 17443
  Gene Symbol: TBC1D3I
  Gene Name: TBC1 domain family, member 3I
  ENST ID: ENST00000618421
  CDS Start-End: 141-1790
agcacctatctgctctctggtctgcctcagtggtctacagcagttacacacaggcagtggtatctgtgagcagctctgtggactcaaaggttttctccctgagaggcatgacccaggccagctgattcatcagaatcaggatggacgtggtagaggtcgcgggcagttggtgggcacaagagcgagaggacatcattatgaaatacgaaaagggacaccgagctgggctgccagaggacaaggggcctaagccttttcgaagctacaacaacaacgtcgatcatttggggattgtacatgagacggagctgcctcctctgactgcgcgggaggcgaagcaaattcggcgggagatcagccgaaagagcaagtgggtggatatgctgggagactgggagaaatacaaaagcagcagaaagctcatagatcgagcgtacaagggaatgcccatgaacatccggggcccgatgtggtcagtcctcctgaacactgaggaaatgaagatgaaaaaccccggaagataccagatcatgaaggagaagggcaagaggtcatctgagcacatccagcgcatcgaccgggacgtaagcgggacattaaggaagcatatattcttcagggatcgatacggaaccaagcagcgggaactactccacatcctcctggcatatgaggagtataacccggaggtgggctactgcagggacctgagccacatcgccgccttgttcctcctctatcttcctgaggaggatgcattctgggcactggtgcagctgctggccagtgagaggcactccctgcagggatttcacagcccaaatggcgggaccgtccaggggctccaagaccaacaggagcatgtggtagccacgtcacaacccaagaccatggggcatcaggacaagaaagatctatgtgggcagtgttccccgttaggctgcctcatccggatattgattgacgggatctctctcgggctcaccctgcgcctgtgggacgtgtatctggtagaaggcgaacaggcgttgatgccgataacaagaatcgcctttaaggttcagcagaagcgcctcacgaagacgtccaggtgtggcccgtgggcacgtttttgcaaccggttcgttgatacctgggccagggatgaggacactgtgctcaagcatcttagggcctctatgaagaaactaacaagaaagcagggggacctgccacccccagccaaacccgagcaagggtcgtcggcatccaggcctgtgccggcttcacgtggcgggaagaccctctgcaagggggacaggcaggcccctccaggcccaccagcccggttcccgcggcccatttggtcagcttccccgccacgggcacctcgttcttccacaccctgtcctggtggggctgtccgggaagacacctaccctgtgggcactcagggtgtgcccagcccggccctggctcagggaggacctcagggttcctggagattcctgcagtggaactccatgccccgcctcccaacggacctggacgtagagggcccttggttccgccattatgatttcagacagagctgctgggtccgtgccatatcccaggaggaccagctggccccctgctggcaggctgaacaccctgcggagcgggtgagatcggctttcgctgcacccagcactgattccgaccagggcacccccttcagagctagggacgaacagcagtgtgctcccacctcagggccttgcctctgcggcctccacttggaaagttctcagttccctccaggcttctag

SEQ ID NO: 189618 - DNA, 1033 bp, Homo sapiens
  Payload ID: 17443
  Gene Symbol: TBC1D3I
  Gene Name: TBC1 domain family, member 3I
  ENST ID: ENST00000618709
  CDS Start-End: 158-1033
gaatgtcactggtgcttagcacctatctgctctctggtctgcctcagtggtctacagcagttacacacaggcagtggtatctgtgagcagctctgtggactcaaaggttttctccctgagaggcatgacccaggccagctgattcatcagaatcaggatggacgtggtagaggtcgcgggcagttggtgggcacaagagcgagaggacatcattatgaaatacgaaaagggacaccgagctgggctgccagaggacaaggggcctaagccttttcgaagctacaacaacaacgtcgatcatttggggattgtacatgagacggagctgcctcctctgactgcgcgggaggcgaagcaaattcggcgggagatcagccgaaagagcaagtgggtggatatgctgggagactgggagaaatacaaaagcagcagaaagctcatagatcgagcgtacaagggaatgcccatgaacatccggggcccgatgtggtcagtcctcctgaacactgaggaaatgaagatgaaaaaccccggaagataccagatcatgaaggagaagggcaagaggtcatctgagcacatccagcgcatcgaccgggacgtaagcgggacattaaggaagcatatattcttcagggatcgatacggaaccaagcagcgggaactactccacatcctcctggcatatgaggagtataacccggaggtgggctactgcagggacctgagccacatcgccgccttgttcctcctctatcttcctgaggaggatgcattctgggcactggtgcagctgctggccagtgagaggcactccctgcagggatttcacagcccaaatggcgggaccgtccaggggctccaagaccaacaggagcatgtggtagccacgtcacaacccaagaccatggggcatcagagcgcctcacgaagacgtccaggtgtggcccgtgggcacgtttttgcaaccggttcgttgatacctgggccagggatgaggacactgtgctcaagcatcttagggcctctatga

SEQ ID NO: 189619 - DNA, 1900 bp, Homo sapiens
  Payload ID: 17443
  Gene Symbol: TBC1D3I
  Gene Name: TBC1 domain family, member 3I
  ENST ID: ENST00000618620
  CDS Start-End: 102-977
gcagttacacacaggcagtggtatctgtgagcagctctgtggactcaaaggttttctccctgagaggcatgacccaggccagctgattcatcagaatcaggatggacgtggtagaggtcgcgggcagttggtgggcacaagagcgagaggacatcattatgaaatacgaaaagggacaccgagctgggctgccagaggacaaggggcctaagccttttcgaagctacaacaacaacgtcgatcatttggggattgtacatgagacggagctgcctcctctgactgcgcgggaggcgaagcaaattcggcgggagatcagccgaaagagcaagtgggtggatatgctgggagactgggagaaatacaaaagcagcagaaagctcatagatcgagcgtacaagggaatgcccatgaacatccggggcccgatgtggtcagtcctcctgaacactgaggaaatgaagatgaaaaaccccggaagataccagatcatgaaggagaagggcaagaggtcatctgagcacatccagcgcatcgaccgggacgtaagcgggacattaaggaagcatatattcttcagggatcgatacggaaccaagcagcgggaactactccacatcctcctggcatatgaggagtataacccggaggtgggctactgcagggacctgagccacatcgccgccttgttcctcctctatcttcctgaggaggatgcattctgggcactggtgcagctgctggccagtgagaggcactccctgcagggatttcacagcccaaatggcgggaccgtccaggggctccaagaccaacaggagcatgtggtagccacgtcacaacccaagaccatggggcatcagagcgcctcacgaagacgtccaggtgtggcccgtgggcacgtttttgcaaccggttcgttgatacctgggccagggatgaggacactgtgctcaagcatcttagggcctctatgaagaaactaacaagaaagcagggggacctgccacccccagccaaacccgagcaagggtcgtcggcatccaggcctgtgccggcttcacgtggcgggaagaccctctgcaagggggacaggcaggcccctccaggcccaccagcccggttcccgcggcccatttggtcagcttccccgccacgggcacctcgttcttccacaccctgtcctggtggggctgtccgggaagacacctaccctgtgggcactcagggtgtgcccagcccggccctggctcagggaggacctcagggttcctggagattcctgcagtggaactccatgccccgcctcccaacggacctggacgtagagggcccttggttccgccattatgatttcagacagagctgctgggtccgtgccatatcccaggaggaccagctggccccctgctggcaggctgaacaccctgcggagcgggtgagatcggctttcgctgcacccagcactgattccgaccagggcacccccttcagagctagggacgaacagcagtgtgctcccacctcagggccttgcctctgcggcctccacttggaaagttctcagttccctccaggcttctagaagcatctgggccagggctcatggctggataatttccctaggcttaacaacccaagcaagcttcgcgtcctcgttttatttttggttaaacttatgaaaatgtattaagaaagagtgcagctcgagagagattcagagatggaacacaccagaccccagatcacaaagccaaccatgcccagcccctcccagcacccccagccccacgaccatcgttctgaattctgacgacaccgtgagcctgcctttgtacttcaaactcatggaaggataaccaccttcatgttttgaaataaatgtttcctgttgaaatga

SEQ ID NO: 189620 - DNA, 990 bp, Homo sapiens
  Payload ID: 17443
  Gene Symbol: TBC1D3I
  Gene Name: TBC1 domain family, member 3I
  ENST ID: ENST00000619628
  CDS Start-End: 115-990
tcagtggtctacagcagttacacacaggcagtggtatctgtgagcagctctgtggactcaaaggttttctccctgagaggcatgacccaggccagctgattcatcagaatcaggatggacgtggtagaggtcgcgggcagttggtgggcacaagagcgagaggacatcattatgaaatacgaaaagggacaccgagctgggctgccagaggacaaggggcctaagccttttcgaagctacaacaacaacgtcgatcatttggggattgtacatgagacggagctgcctcctctgactgcgcgggaggcgaagcaaattcggcgggagatcagccgaaagagcaagtgggtggatatgctgggagactgggagaaatacaaaagcagcagaaagctcatagatcgagcgtacaagggaatgcccatgaacatccggggcccgatgtggtcagtcctcctgaacactgaggaaatgaagatgaaaaaccccggaagataccagatcatgaaggagaagggcaagaggtcatctgagcacatccagcgcatcgaccgggacgtaagcgggacattaaggaagcatatattcttcagggatcgatacggaaccaagcagcgggaactactccacatcctcctggcatatgaggagtataacccggaggtgggctactgcagggacctgagccacatcgccgccttgttcctcctctatcttcctgaggaggatgcattctgggcactggtgcagctgctggccagtgagaggcactccctgcagggatttcacagcccaaatggcgggaccgtccaggggctccaagaccaacaggagcatgtggtagccacgtcacaacccaagaccatggggcatcagagcgcctcacgaagacgtccaggtgtggcccgtgggcacgtttttgcaaccggttcgttgatacctgggccagggatgaggacactgtgctcaagcatcttagggcctctatga

SEQ ID NO: 189621 - DNA, 1900 bp, Homo sapiens; identical to SEQ ID NO: 189619
  Payload ID: 17443
  Gene Symbol: TBC1D3I
  Gene Name: TBC1 domain family, member 3I
  ENST ID: ENST00000621187
  CDS Start-End: 102-977

SEQ ID NO: 189622 - DNA, 1790 bp, Homo sapiens; identical to SEQ ID NO: 189617
  Payload ID: 17443
  Gene Symbol: TBC1D3I
  Gene Name: TBC1 domain family, member 3I
  Uniprot ID: A0A087WXS9
  ENST ID: ENST00000621034
  CDS Start-End: 141-1790

SEQ ID NO: 189623 - DNA, 1982 bp, Homo sapiens
  Payload ID: 17443
  Gene Symbol: TBC1D3I
  Gene Name: TBC1 domain family, member 3I
  ENST ID: ENST00000616671
  CDS Start-End: 1-876
atggacgtggtagaggtcgcgggcagttggtgggcacaagagcgagaggacatcattatgaaatacgaaaagggacaccgagctgggctgccagaggacaaggggcctaagccttttcgaagctacaacaacaacgtcgatcatttggggattgtacatgagacggagctgcctcctctgactgcgcgggaggcgaagcaaattcggcgggagatcagccgaaagagcaagtgggtggatatgctgggagactgggagaaatacaaaagcagcagaaagctcatagatcgagcgtacaagggaatgcccatgaacatccggggcccgatgtggtcagtcctcctgaacactgaggaaatgaagatgaaaaaccccggaagataccagatcatgaaggagaagggcaagaggtcatctgagcacatccagcgcatcgaccgggacgtaagcgggacattaaggaagcatatattcttcagggatcgatacggaaccaagcagcgggaactactccacatcctcctggcatatgaggagtataacccggaggtgggctactgcagggacctgagccacatcgccgccttgttcctcctctatcttcctgaggaggatgcattctgggcactggtgcagctgctggccagtgagaggcactccctgcagggatttcacagcccaaatggcgggaccgtccaggggctccaagaccaacaggagcatgtggtagccacgtcacaacccaagaccatggggcatcagagcgcctcacgaagacgtccaggtgtggcccgtgggcacgtttttgcaaccggttcgttgatacctgggccagggatgaggacactgtgctcaagcatcttagggcctctatgaagaaactaacaagaaagcagggggacctgccacccccagccaaacccgagcaagggtcgtcggcatccaggcctgtgccggcttcacgtggcgggaagaccctctgcaagggggacaggcaggcccctccaggcccaccagcccggttcccgcggcccatttggtcagcttccccgccacgggcacctcgttcttccacaccctgtcctggtggggctgtccgggaagacacctaccctgtgggcactcagggtgtgcccagcccggccctggctcagggaggacctcagggttcctggagattcctgcagtggaactccatgccccgcctcccaacggacctggacgtagagggcccttggttccgccattatgatttcagacagagctgctgggtccgtgccatatcccaggaggaccagctggccccctgctggcaggctgaacaccctgcggagcgggtgagatcggctttcgctgcacccagcactgattccgaccagggcacccccttcagagctagggacgaacagcagtgtgctcccacctcagggccttgcctctgcggcctccacttggaaagttctcagttccctccaggcttctagaagcatctgggccagggctcatggctggataatttccctaggcttaacaacccaagcaagcttcgcgtcctcgttttatttttggttaaacttatgaaaatgtattaagaaagagtgcagctcgagagagattcagagatggaacacaccagaccccagatcacaaagccaaccatgcccagcccctcccagcacccccagccccacgaccatcgttctgaattctgacgacaccgtgagcctgcctttgtacttcaaactcatggaaggataaccaccttcatgttttgaaataaatgtttcctgttgaaatgattttagattttagacagaaatattgaaaaggcactatagtatcctcctataccttccatccagctgcccctaataatgatgttttgcagtcccatggcacataagaaatttaggccgggtgtggtggctcacacctgtaatcccagcaatttgagaggtcgaggcgggaggttcaggttcact

SEQ ID NO: 189624 - DNA, 2105 bp, Homo sapiens
  Payload ID: 17443
  Gene Symbol: TBC1D3I
  Gene Name: TBC1 domain family, member 3I
  ENST ID: ENST00000620899
  CDS Start-End: 147-1796
gtgcttagcacctatctgctctctggcctgcgtcagtggtctacagcagttacacacaggcagtggtatctgtgagcagctctgtggactcaaaggttttctccctgagaggcatgacccaggccagctgattcatcagaatcaggatggacgtggtagaggtcgcgggtagttggtgggcacaagagcgagaggacatcattatgaaatacgaaaagggacaccgagctgggctgccagaggacaaggggcctaagccttttcgaagctacaacaacaacgtcgatcatttggggattgtacatgagacggagctgcctcctctgactgcgcgggaggcgaagcaaattcggcgggagatcagccgaaagagcaagtgggtggatatgctgggagactgggagaaatacaaaagcagcagaaagctcatagatcgagcgtacaagggaatgcccatgaacatccggggcccgatgtggtcagtcctcctgaacattgaggaaatgaagttgaaaaaccccggaagataccagatcatgaaggagaagggcaagaggtcatctgagcacatccagcgcatcgaccgggacataagcgggacattaaggaagcatatgttcttcagggatcgatacggaaccaagcagcgggaactactccacatcctcctggcatatgaggagtataacccggaggtgggctactgcagggacctgagccacatcgccgccttgttcctcctctatcttcctgaggaggatgcattctgggcactggtgcagctgctggccagtgagaggcactccctgcagggatttcacagcccaaatggcgggaccgtccaggggctccaagaccaacaggagcatgtggtagccacgtcacaacccaagaccatggggcatcaggacaagaaagatctatgtgggcagtgttccccgttaggctgcctcatccggatattgattgacgggatctctctcgggctcaccctgcgcctgtgggacgtgtatctggtagaaggcgaacaggcgttgatgccgataacaagaatcgcctttaaggttcagcagaagcgcctcacgaagacgtccaggtgtggcccgtgggcacgtttttgcaaccggttcgttgatacctgggccagggatgaggacactgtgctcaagcatcttagggcctctatgaagaaactaacaagaaagcagggggacctgccacccccagccaaacccgagcaagggtcgtcggcatccaggcctgtgccggcttcacgtggcgggaagaccctctgcaagggggacaggcaggcccctccaggcccaccagcccggttcccgcggcccatttggtcagcttccccgccacgggcacctcgttcttccacaccctgtcctggtggggctgtccgggaagacacctaccctgtgggcactcagggtgtgcccagcccggccctggctcagggaggacctcagggttcctggagattcctgcagtggaactccatgccccgcctcccaacggacctggacgtagagggcccttggttccgccattatgatttcagacagagctgctgggtccgtgccatatcccaggaggaccagctggccccctgctggcaggctgaacaccctgcggagcgggtgagatcggctttcgctgcacccagcactgattccgaccagggcacccccttcagagctagggacgaacagcagtgtgctcccacctcagggccttgcctctgcggcctccacttggaaagttctcagttccctccaggcttctagaagcatctgggccagggctcatggctggataatttccctaggcttaacaacccaagcaagcttcgcgtcctcgttttatttttggttaaacttatgaaaatgtattaagaaagagtgcagctcgagagagattcagagatggaacacaccagaccccagatcacaaagccaaccatgcccagcccctcccagcacccccagccccacgaccatcgttctgaattctgacgacaccgtgagcctgcctttgtacttcaaactcatggaaggataaccaccttcatgttttgaaataaatgtttcctgttg

SEQ ID NO: 189625 - DNA, 1900 bp, Homo sapiens; identical to SEQ ID NO: 189619
  Payload ID: 17443
  Gene Symbol: TBC1D3I
  Gene Name: TBC1 domain family, member 3I
  ENST ID: ENST00000633066
  CDS Start-End: 102-977

SEQ ID NO: 189626 - DNA, 2116 bp, Homo sapiens
  Payload ID: 17444
  Gene Symbol: TBC1D3K
  Gene Name: TBC1 domain family, member 3K
  Uniprot ID: A0A087X1G2
  ENST ID: ENST00000620247
  CDS Start-End: 158-1807
gaatgtcactggtgcttagcacctatctgctctctggcctgcgtcagtggtctacagcagttacacacaggcagtggtatctgtgagcagctctgtggactcaaaggttttctccctgagaggcatgacccaggccagctgattcatcagaatcaggatggacgtggtagaggtcgcgggcagttggtgggcacaagagcgagaggacatcattatgaaatacgaaaagggacaccgagctgggctgccagaggacaaggggcctaagccttttcgaagctacaacaacaacgtcgatcatttggggattgtacatgagacggagctgcctcctctgactgcgcgggaggcgaagcaaattcggcgggagatcagccgaaagagcaagtgggtggatatgctgggagactgggagaaatacaaaagcagcagaaagctcatagatcgagcgtacaagggaatgcccatgaacatccggggcccgatgtggtcagtcctcctgaacattgaggaaatgaagttgaaaaaccccggaagataccagatcatgaaggagaagggcaagaagtcatctgagcacatccagcgcatcgaccgggacgtaagcgggacattaaggaagcatatattcttcagggatcgatacggaaccaagcagcgggaactactccacatcctcctggcatatgaggagtataacccggaggtgggctactgcagggacctgagccacatcgccgccttgttcctcctctatcttcctgaggaggatgcattctgggcactggtgcagctgctggccagtgagaggcactccctgcagggatttcacagcccaaatggcgggaccgtccaggggctccaagaccaacaggagcatgtggtagccacgtcacaacccaagaccatggggcatcaggacaagaaagatctatgtgggcagtgttccccgttaggctgcctcatccggatattgattgacgggatctctctcgggctcaccctgcgcctgtgggacgtgtatctggtagaaggcgaacaggcgttgatgccgataacaagaatcgcctttaaggttcagcagaagcgcctcacgaagacgtccaggtgtggcccgtgggcacgtttttgcaaccggttcgttgatacctgggccagggatgaggacactgtgctcaagcatcttagggcctctatgaagaaactaacaagaaagaagggggacctgccacccccagccaaacccgagcaagggtcgtcggcatccaggcctgtgccggcttcacgtggcgggaagaccctctgcaagggggacaggcaggcccctccaggcccaccagcccggttcccgcggcccatttggtcagcttccccgccacgggcacctcgttcttccacaccctgtcctggtggggctgtccgggaagacacctaccctgtgggcactcagggtgtgcccagcccggccctggctcagggaggacctcagggttcctggagattcctgcagtggaactccatgccccgcctcccaacggacctggacgtagagggcccttggttccgccattatgatttcaggcagagctgctgggtccgtgccatatcccaggaggaccagctggccccctgctggcaggctgaacaccctgcggagcgggtgagatcggctttcgctgcacccagcactgattccgaccagggcacccccttcagagctagggacgaacagcagtgtgctcccacctcagggccttgcctctgcggcctccacttggaaagttctcagttccctccaggcttctagaagcatctgggccagggctcatggctggataatttccctaggcttaacaacccaagcaagcttcgcatcctcgttttatttttggttaaacttatgaaaatgtattaagaaagagtgcagctcgagagagattcagagatggaacacaccagaccccagatcacaaagccaaccatgcccagcccctcccagcacccccagccccacgaccatcgttctgaattctgacgacaccgtgagcctgcctttgtacttcaaactcatggaaggataaccaccttcatgttttgaaataaatgtttcctgttg

SEQ ID NO: 189627 - DNA, 2116 bp, Homo sapiens
  Payload ID: 17444
  Gene Symbol: TBC1D3K
  Gene Name: TBC1 domain family, member 3K
  ENST ID: ENST00000618095
  CDS Start-End: 158-1807
gaatgtcactggtgcttagcacctatctgctctctggcctgcctcagtggtctacagcagttacacacaggcagtggtatctgtgagcagctctgtggactcaaaggttttctccctgagaggcatgacccaggccagctgattcatcagaatcaggatggacgtggtagaggtcgcgggcagttggtgggcacaagagcgagaggacatcattatgaaatacgaaaagggacaccgagctgggctgccagaggacaaggggcctaagccttttcgaagctacaacaacaacgtcgatcatttggggattgtacatgagacggagctgcctcctctgactgcgcgggaggcgaagcaaattcggcgggagatcagccgaaagagcaagtgggtggatatgctgggagactgggagaaatacaaaagcagcagaaagctcatagatcgagcgtacaagggaatgcccatgaacatccggggcccgatgtggtcagtcctcctgaacactgaggaaatgaagttgaaaaaccccggaagataccagatcatgaaggagaagggcaagaggtcatctgagcacatccagcgcatcgaccgggacgtaagcgggacattaaggaagcatatattcttcagggatcgatacggaaccaagcagcgggaactactccacatcctcctggcatatgaggagtataacccggaggtgggctactgcagggacctgagccacatcgccgccttgttcctcctctatcttcctgaggaggatgcattctgggcactggtgcagctgctggccagtgagaggcactccctgcagggatttcacagcccaaatggcgggaccgtccaggggctccaagaccaacaggagcatgtggtagccacgtcacaacccaagaccatggggcatcaggacaagaaagatctatgtgggcagtgttccccgttaggctgcctcatccggatattgattgacgggatctctctcgggctcaccctgcgcctgtgggacgtgtatctggtagaaggcgaacaggcgttgatgccgataacaagaatcgcctttaaggttcagcagaagcgcctcacgaagacgtccaggtgtggcccgtgggcacgtttttgcaaccggttcgttgatacctgggccagggatgaggacactgtgctcaagcatcttagggcctctatgaagaaactaacaagaaagcagggggacctgccacccccagccaaacccgagcaagggtcgtcggcatccaggcctgtgccggcttcacgtggcgggaagaccctctgcaagggggacaggcaggcccctccaggcccaccagcccggttcccgcggcccatttggtcagcttccccgccacgggcacctcgttcttccacaccctgtcctggtggggctgtccgggaagacacctaccctgtgggcactcagggtgtgcccagcccggccctggctcagggaggacctcagggttcctggagattcctgcagtggaactccatgccccgcctcccaacggacctggacgtagagggcccttggttccgccattatgatttcagacagagctgctgggtccgtgccatatcccaggaggaccagctggccccctgctggcaggctgaacaccctgcggagcgggtgagatcggctttcgctgcacccagcactgattccgaccagggcacccccttcagagctagggacgaacagccgtgtgctcccacctcagggccttgcctctgcggcctccacttggaaagttctcagttccctccaggcttctagaagcatctgggccagggctcatggctggataatttccctaggcttaacaacccaagcaagcttcgcatcctcgttttatttttggttaaacttatgaaaatgtattaagaaagagtgcagctcgagagagattcagagatggaacacaccagaccccagatcacaaagccaaccatgcccagcccctcccagcacccccagccccacgaccatcgttctgaattctgacgacaccgtgagcctgcctttgtacttcaaactcatggaaggataaccaccttcatgttttgaaataaatgtttcctgttg

SEQ ID NO: 189628 - DNA, 2065 bp, Homo sapiens
  Payload ID: 17445
  Gene Symbol: TBC1D3L
  Gene Name: TBC1 domain family, member 3L
  Uniprot ID: B9A6J9
  ENST ID: ENST00000617678
  CDS Start-End: 101-1750
cagttacacacaggcagtggtatctgtgagcagctctgtggactcaaaggttttctccctgagaggcacgacccaggccagctgattcatcagaatcaggatggacgtggtagaggtcgcgggcagttggtgggcacaagagcgagaggacatcattatgaaatacgaaaagggacaccgagctgggctgccagaggacaaggggcctaagccttttcgaagctacaacaacaacgtcgatcatttggggattgtacatgagacggagctgcctcctctgactgcgcgggaggcgaagcaaattcggcgggagatcagccgaaagagcaagtgggtggatatgctgggagactgggagaaatacaaaagcagcagaaagctcatagatcgagcgtacaagggaatgcccatgaacatccggggcccgatgtggtcagtcctcctgaacactgaggaaatgaagttgaaaaaccccggaagataccagatcatgaaggagaagggcaagaggtcatctgagcacatccagcgcatcgaccgggacgtaagcgggacattaaggaagcatatattcttcagggatcgatacggaaccaagcagcgggaactactccacatcctcctggcatatgaggagtataacccggaggtgggctactgcagggacctgagccacatcgccgccttgttcctcctctatcttcctgaggaggatgcattctgggcactggtgcagctgctggccagtgagaggcactccctgcagggatttcacagcccaaatggcgggaccgtccaggggctccaagaccaacaggagcatgtggtagccacgtcacaacccaagaccatggggcatcaggacaagaaagatctatgtgggcagtgttccccgttaggctgcctcatccggatattgattgacgggatctctctcgggctcaccctgcgcctgtgggacgtgtatctggtagaaggcgaacaggcgttgatgccgataacaagaatcgcctttaaggttcagcagaagcgcctcacgaagacgtccaggtgtggcccgtgggcacgtttttgcaaccggttcgttgatacctgggccagggatgaggacactgtgctcaagcatcttagggcctctatgaagaaactaacaagaaagcagggggacctgcaacccccagccaaacccgagcaagggtcgtcggcatccaggcctgtgccggcttcacgtggcgggaagaccctctgcaagggggacaggcaggcccctccaggcccaccagcccggttcccgcggcccatttggtcagcttccccgccacgggcacctcgttcttccacaccctgtcctggtggggctgtccgggaagacacctaccctgtgggcactcagggtgtgcccagcccggccctggctcagggaggacctcagggttcctggagattcctgcagtggaactccatgccccgcctcccaacggacctggacgtagagggcccttggttccgccattatgatttcagacagagctgctgggtccgtgccatatcccaggaggaccagctggccccctgctggcaggctgaacaccctgcggagcgggtgagatcggctttcgctgcacccagcactgattccgaccagggcacccccttcagagctagggacgaacagccgtgtgctcccacctcagggccttgcctctgcggcctccacttggaaagttctcagttccctccaggcttctagaagcatctgggccagggctcatggctggataatttccctaggcttaacaacccaagcaagcttcgcatcctcgttttatttttggttaaacttatgaaaatgtattaagaaagagtgcagctcgagagagattcagagatggaacacaccagaccccagatcacaaagccaaccatgcccagcccctcccagcacccccagccccacgaccatcgttctgaattctgacgacaccgtgagcctgcctttgtacttcaaactcatggaaggataaccaccttcatgttttgaaataaatgtttcctgttgaaatga

SEQ ID NO: 189629 - DNA, 2305 bp, Homo sapiens
  Payload ID: 17445
  Gene Symbol: TBC1D3L
  Gene Name: TBC1 domain family, member 3L
  Uniprot ID: B9A6J9
  ENST ID: ENST00000618047
  CDS Start-End: 158-1807
gaatgtcactggtgcttagcacctatctgctctctggtctgcctcagtggtctacagcagttacacacaggcagtggtatctgtgagcagctctgtggactcaaaggttttctccctgagaggcacgacccaggccagctgattcatcagaatcaggatggacgtggtagaggtcgcgggcagttggtgggcacaagagcgagaggacatcattatgaaatacgaaaagggacaccgagctgggctgccagaggacaaggggcctaagccttttcgaagctacaacaacaacgtcgatcatttggggattgtacatgagacggagctgcctcctctgactgcgcgggaggcgaagcaaattcggcgggagatcagccgaaagagcaagtgggtggatatgctgggagactgggagaaatacaaaagcagcagaaagctcatagatcgagcgtacaagggaatgcccatgaacatccggggcccgatgtggtcagtcctcctgaacactgaggaaatgaagttgaaaaaccccggaagataccagatcatgaaggagaagggcaagaggtcatctgagcacatccagcgcatcgaccgggacgtaagcgggacattaaggaagcatatattcttcagggatcgatacggaaccaagcagcgggaactactccacatcctcctggcatatgaggagtataacccggaggtgggctactgcagggacctgagccacatcgccgccttgttcctcctctatcttcctgaggaggatgcattctgggcactggtgcagctgctggccagtgagaggcactccctgcagggatttcacagcccaaatggcgggaccgtccaggggctccaagaccaacaggagcatgtggtagccacgtcacaacccaagaccatggggcatcaggacaagaaagatctatgtgggcagtgttccccgttaggctgcctcatccggatattgattgacgggatctctctcgggctcaccctgcgcctgtgggacgtgtatctggtagaaggcgaacaggcgttgatgccgataacaagaatcgcctttaaggttcagcagaagcgcctcacgaagacgtccaggtgtggcccgtgggcacgtttttgcaaccggttcgttgatacctgggccagggatgaggacactgtgctcaagcatcttagggcctctatgaagaaactaacaagaaagcagggggacctgcaacccccagccaaacccgagcaagggtcgtcggcatccaggcctgtgccggcttcacgtggcgggaagaccctctgcaagggggacaggcaggcccctccaggcccaccagcccggttcccgcggcccatttggtcagcttccccgccacgggcacctcgttcttccacaccctgtcctggtggggctgtccgggaagacacctaccctgtgggcactcagggtgtgcccagcccggccctggctcagggaggacctcagggttcctggagattcctgcagtggaactccatgccccgcctcccaacggacctggacgtagagggcccttggttccgccattatgatttcagacagagctgctgggtccgtgccatatcccaggaggaccagctggccccctgctggcaggctgaacaccctgcggagcgggtgagatcggctttcgctgcacccagcactgattccgaccagggcacccccttcagagctagggacgaacagccgtgtgctcccacctcagggccttgcctctgcggcctccacttggaaagttctcagttccctccaggcttctagaagcatctgggccagggctcatggctggataatttccctaggcttaacaacccaagcaagcttcgcatcctcgttttatttttggttaaacttatgaaaatgtattaagaaagagtgcagctcgagagagattcagagatggaacacaccagaccccagatcacaaagccaaccatgcccagcccctcccagcacccccagccccacgaccatcgttctgaattctgacgacaccgtgagcctgcctttgtacttcaaactcatggaaggataaccaccttcatgttttgaaataaatgtttcctgttgaaatgattttagattttagacagaaatattgaaaaggcactatagtatcctcctataccttccatccagctgcccctaataatgatgttttgcagtcccatggcacataagaaatttaggccgggtgtggtggctcacacctgtaatcccagcaatttgagaggtcgaggcgggaggttcaggttcact

SEQ ID NO: 189630 - DNA, 2148 bp, Homo sapiens
  Payload ID: 17445
  Gene Symbol: TBC1D3L
  Gene Name: TBC1 domain family, member 3L
  Uniprot ID: B9A6J9
  ENST ID: ENST00000612727
  CDS Start-End: 1-1650
atggacgtggtagaggtcgcgggcagttggtgggcacaagagcgagaggacatcattatgaaatacgaaaagggacaccgagctgggctgccagaggacaaggggcctaagccttttcgaagctacaacaacaacgtcgatcatttggggattgtacatgagacggagctgcctcctctgactgcgcgggaggcgaagcaaattcggcgggagatcagccgaaagagcaagtgggtggatatgctgggagactgggagaaatacaaaagcagcagaaagctcatagatcgagcgtacaagggaatgcccatgaacatccggggcccgatgtggtcagtcctcctgaacactgaggaaatgaagttgaaaaaccccggaagataccagatcatgaaggagaagggcaagaggtcatctgagcacatccagcgcatcgaccgggacgtaagcgggacattaaggaagcatatattcttcagggatcgatacggaaccaagcagcgggaactactccacatcctcctggcatatgaggagtataacccggaggtgggctactgcagggacctgagccacatcgccgccttgttcctcctctatcttcctgaggaggatgcattctgggcactggtgcagctgctggccagtgagaggcactccctgcagggatttcacagcccaaatggcgggaccgtccaggggctccaagaccaacaggagcatgtggtagccacgtcacaacccaagaccatggggcatcaggacaagaaagatctatgtgggcagtgttccccgttaggctgcctcatccggatattgattgacgggatctctctcgggctcaccctgcgcctgtgggacgtgtatctggtagaaggcgaacaggcgttgatgccgataacaagaatcgcctttaaggttcagcagaagcgcctcacgaagacgtccaggtgtggcccgtgggcacgtttttgcaaccggttcgttgatacctgggccagggatgaggacactgtgctcaagcatcttagggcctctatgaagaaactaacaagaaagcagggggacctgcaacccccagccaaacccgagcaagggtcgtcggcatccaggcctgtgccggcttcacgtggcgggaagaccctctgcaagggggacaggcaggcccctccaggcccaccagcccggttcccgcggcccatttggtcagcttccccgccacgggcacctcgttcttccacaccctgtcctggtggggctgtccgggaagacacctaccctgtgggcactcagggtgtgcccagcccggccctggctcagggaggacctcagggttcctggagattcctgcagtggaactccatgccccgcctcccaacggacctggacgtagagggcccttggttccgccattatgatttcagacagagctgctgggtccgtgccatatcccaggaggaccagctggccccctgctggcaggctgaacaccctgcggagcgggtgagatcggctttcgctgcacccagcactgattccgaccagggcacccccttcagagctagggacgaacagccgtgtgctcccacctcagggccttgcctctgcggcctccacttggaaagttctcagttccctccaggcttctagaagcatctgggccagggctcatggctggataatttccctaggcttaacaacccaagcaagcttcgcatcctcgttttatttttggttaaacttatgaaaatgtattaagaaagagtgcagctcgagagagattcagagatggaacacaccagaccccagatcacaaagccaaccatgcccagcccctcccagcacccccagccccacgaccatcgttctgaattctgacgacaccgtgagcctgcctttgtacttcaaactcatggaaggataaccaccttcatgttttgaaataaatgtttcctgttgaaatgattttagattttagacagaaatattgaaaaggcactatagtatcctcctataccttccatccagctgcccctaataatgatgttttgcagtcccatggcacataagaaatttaggccgggtgtggtggctcacacctgtaatcccagcaatttgagaggtcgaggcgggaggttcaggttcact

SEQ ID NO: 189631 - DNA, 2116 bp, Homo sapiens
  Payload ID: 17445
  Gene Symbol: TBC1D3L
  Gene Name: TBC1 domain family, member 3L
  ENST ID: ENST00000617279
  CDS Start-End: 158-1807
gaatgtcactggtgcttagcacctatctgctctctggcctgcctcagtggtctacagcagttacacacaggcagtggtatctgtgagcagctctgtggactcaaaggttttctccctgagaggcatgacccaggccagctgattcatcagaatcaggatggacgtggtagaggtcgcgggcagttggtgggcacaagagcgagaggacatcattatgaaatacgaaaagggacaccgagctgggctgccagaggacaaggggcctaagccttttcgaagctacaacaacaacgtcgatcatttggggattgtacatgagacggagctgcctcctctgactgcgcgggaggcgaagcaaattcggcgggagatcagccgaaagagcaagtgggtggatatgctgggagactgggagaaatacaaaagcagcagaaagctcatagatcgagcgtacaagggaatgcccatgaacatccggggcccgatgtggtcagtcctcctgaacattgaggaaatgaagttgaaaaaccccggaagataccagatcatgaaggagaagggcaagaggtcatctgagcacatccagcgcatcgaccgggacgtaagcgggacattaaggaagcatatattcttcagggatcgatacggaaccaagcagcgggaactactccacatcctcctggcatatgaggagtataacccggaggtgggctactgcagggacctgagccacatcgccgccttgttcctcctctatcttcctgaggaggatgcattctgggcactggtgcagctgctggccagtgagaggcactccctgcagggatttcacagcccaaatggcgggaccgtccaggggctccaagaccaacaggagcatgtggtagccacgtcacaacccaagaccatggggcatcaggacaagaaagatctatgtgggcagtgttccccgttaggctgcctcatccggatattgattgacgggatctctctcgggctcaccctgcgcctgtgggacgtgtatctggtagaaggcgaacaggcgttgatgccgataacaagaatcgcctttaaggttcagcagaagcgcctcacgaagacgtccaggtgtggcccgtgggcacgtttttgcaaccggttcgttgatacctgggccagggatgaggacactgtgctcaagcatcttagggcctctatgaagaaactaacaagaaagcagggggacctgccacccccagccaaacccgagcaagggtcgtcggcatccaggcctgtgccggcttcacgtggcgggaagaccctctgcaagggggacaggcaggcccctccaggcccaccagcccggttcccgcggcccatttggtcagcttccccgccacgggcacctcgttcttccacaccctgtcctggtggggctgtccgggaagacacctaccctgtgggcactcagggtgtgcccagcccggccctggctcagggaggacctcagggttcctggagattcctgcagtggaactccatgccccgcctcccaacggacctggacgtagagggcccttggttccgccattatgatttcagacagagctgctgggtccgtgccatatcccaggaggaccagctggccccctgctggcaggctgaacaccctgcggagcgggtgagatcggctttcgctgcacccagcactgattccgaccagggcacccccttcagagctagggacgaacagccgtgtgctcccacctcagggccttgcctctgcggcctccacttggaaagttctcagttccctccaggcttctagaagcatctgggccagggctcatggctggataatttccctaggcttaacaacccaagcaagcttcgcatcctcgttttatttttggttaaacttatgaaaatgtattaagaaagagtgcagctcgagagagattcagagatggaacacaccagaccccagatcacaaagccaaccatgcccagcccctcccagcacccccagccccacgaccatcgttctgaattctgacgacaccgtgagcctgcctttgtacttcaaactcatggaaggataaccaccttcatgttttgaaataaatgtttcctgttg

SEQ ID NO: 189632 - DNA, 6182 bp, Homo sapiens
  Payload ID: 17446
  Gene Symbol: TBC1D4
  Gene Name: TBC1 domain family, member 4
  Uniprot ID: O60343
  ENST ID: ENST00000377625
  CDS Start-End: 348-4055
gcggccgcggggaccctcggcgtggtcctctgaccctgcaaacccgcgacggaggaaggggaggtcctgcccgaggcgccagcccaaggaggaggatgcccatttaacccgccctcgcctgccgggcgcttgcctcggtgcccgccgccggagcctccgagccgcgcccgtggaagtgctgcatggggcagggctgctgaagcgcggagttcggggtcgcgccgctcccaggcaggcgcgggagcccggtgcggcagttggcacagtttcggcggcgccttctgcgcgggagtggggggcgcggtgcgcccggccggcctccgcggtgccctggtgaggcgagagttatggagccgcccagctgcattcaggatgagccgttcccgcaccccctggagcccgagccgggcgtctcagctcagcccggccccgggaagccaagcgataagcggttccggctgtggtacgttggggggtcgtgcctggaccacaggaccacgctgcctatgctgccctggctcatggccgagatccgcaggcgcagccagaagcccgaggcgggcggctgcggggcgccggcggcccgagaggtgatcctggtgctcagcgcgcccttcctgcgttgcgtccccgcgccgggcgctggggcctcggggggcactagtccgtcggccacgcagcccaacccggcggtattcatcttcgagcacaaggcgcagcatatctcgcgcttcatccacaacagccacgacctcacctactttgcctacctgatcaaggcgcagcccgacgaccccgagtcgcagatggcctgccacgttttccgcgccacagaccccagccaggttcctgatgttattagcagcataaggcaattatctaaagcggccatgaaagaggatgccaaacccagcaaagataatgaggacgccttttacaactctcagaagttcgaagtcctgtactgtggaaaggtgaccgtgacccacaagaaggccccctcaagcctcatcgatgactgcatggagaagttcagcctgcacgaacagcagcgcctgaagatccaaggggagcagcgcggtccggacccaggagaggacctggctgacttggaggtggtggtgcccgggtcccccggagactgcctgccggaggaggctgacggcaccgacacccaccttggcttacctgccggggccagccagcctgccctgaccagctctcgggtctgcttccctgagcggattttggaagattctggctttgatgagcagcaggagtttcggtctcggtgcagcagtgtcaccggcgtgcaacggagagttcacgagggcagccagaaatcccagccgcgacggagacacgcgagcgcacccagtcacgtccagccctcggactcggagaagaacaggaccatgctcttccaggttgggcgatttgagattaaccttatcagtccagacactaaatcagttgtgctagaaaagaattttaaagatatctcctcttgttctcagggtataaagcatgtggatcactttggctttatctgccgggagtctccagagcctggacttagccagtatatttgttatgtattccagtgtgccagcgaatctctggttgatgaggtaatgctgactctgaaacaggccttcagtacggcggctgccctgcagagtgccaagacgcagattaaactgtgtgaggcctgcccgatgcactctttgcataagctctgtgaaaggattgaaggtctctacccaccaagagccaagctggtgatacagaggcatctctcatcactgacagataatgagcaagctgacatctttgaaagagttcagaaaatgaagccagtcagtgaccaggaagaaaatgaacttgtgattttacacctgaggcagctgtgtgaagccaagcagaagacacacgtgcacatcggggaaggcccttctactatttcaaatagtacaatcccagaaaatgcaacaagcagtggaaggttcaaacttgacattctgaaaaataaagctaagagatccttaactagctccctggaaaatatcttctcaaggggagctaacagaatgagaggtcggcttggaagtgtggacagttttgaacggtccaacagtcttgcttcagagaaggactactcaccaggggattctccaccagggacaccgccagcgtccccaccgtcctcagcttggcaaacgtttcccgaagaggattccgactccccgcagtttcgaagacgggcacacacgttcagccacccaccttcaagcacaaagagaaagctgaatttgcaggatgggagggctcagggtgtgcgttcccctctgctgaggcagagctccagtgaacagtgcagtgatggagaagggagaaaaaggacctcatctacctgcagcaatgagtccctaagtgtgggaggaacctctgtcactcctcgccggatctcctggcggcagcgcattttcctcagggttgcttctcccatgaacaaatctccctcagcaatgcaacagcaagatggattggacaggaacgagctgctgccactgtcccccctctctccaaccatggaggaggaaccgctggttgtattcctgtctggggaggatgacccagaaaagattgaagaaagaaagaaatcaaaagaactgaggagcttgtggagaaaagctatacaccaacaaatcttgttacttcgaatggaaaaagaaaaccagaaacttgaagcaagcagagatgaactccagtccagaaaagttaaattagactatgaagaagttggtgcatgtcagaaagaggtcttaataacttgggataagaagttgttaaactgcagagctaaaatcagatgtgatatggaagatattcatactcttcttaaagaaggagttcccaaaagtcgacgaggagaaatttggcagtttctggctttacagtaccgactcagacacagattgcctaataaacaacagcctcctgacatatcctataaggaacttttgaagcagctcactgctcagcagcatgcgattctcgtggatttaggaaggacgtttcctactcacccttacttttcagtacagcttgggccaggacagctgtcactgtttaacctcctgaaagcctattctttgctggacaaagaagtgggatactgtcaggggatcagctttgtggctggagtcctgcttctgcacatgagtgaagagcaagcctttgaaatgctgaaattcctcatgtatgacctcggcttccgcaagcagtacagacctgacatgatgtcgctgcagattcaaatgtaccagctgtccaggctccttcatgactatcacagagatctctacaatcaccttgaagaaaatgaaatcagccccagtctttatgctgccccctggttcctcacattgtttgcctctcagttttcattaggatttgtagccagagtttttgatattatttttcttcagggaactgaagttatattcaaggttgcactcagcctactgagcagccaagagacacttataatggaatgtgagagctttgaaaatattgttgagtttcttaaaaacacgctacctgatatgaatacctctgaaatggaaaaaattattacccaggtttttgagatggatatttctaagcagttgcatgcctatgaggtggaatatcatgtgctacaggatgagcttcaggaatcttcatattcctgtgaggatagtgaaactttggagaagctggagagggccaatagccaactgaaaagacaaaacatggacctcctagaaaaattacaggtagctcatactaaaatccaggccttggaatcaaacctggaaaatcttttgacgagagagaccaaaatgaagtctttaatccggaccctggaacaagaaaaaatggcttatcaaaagacagtggagcaactccggaagctgctgcccgcggatgctctagtcaattgtgacctgttgctgagagacctaaactgcaaccctaacaacaaagccaagataggaaataagccataattgaagaggcacggcctcagcagaaagtgctccttagaatactacagagaggaagagcctgcatgtcgctggcccaaggctggaccctgaagctgatggaaccacctaatactggtgctgagcgcctagtcacagcaggtggacctcgtgctcatcagagcatgccaatcctaagccattggacatatgtagactggtttttgttgttgctatgtacatataaatatatatataaaatgaacatagttcatgctttcagataaaatgagtagatgtatatttagattaatttttttagtcagaacttcatgaaatccacaccaaaggaaaggtaaactgaaatttcccttggacatatgtgaaatctttttgtctttatagtgaaacaaagccagagcatctttgtatattgcaatatacttgaaaaaaatgaatgtatttttttctccaaagaacagcatgtttcactcaatggtgaaaaggtggaaacatttatgtaactttatgtgtatctgtcttgatatctactgacattgtctatatgaggaaaatgattactggtcatgctcctgtgagttttttgggaaggtagggtcatttctccctgcctgctttgtgccaactagcatgttgcatctacatgcattatgagtctggttaggcattactttaaacatacataaagagacagtaggacattgtggctgagtctacccagctcaaggtaaaggagaatgttgctaattttttagcaaactagaccagcattattactcaaactaaaaatatcacacctgaaaaatttaatttaggacctaaaatgtctagattagctttctgctttttttatttgaataactcattcagttgtgaatgaattcctctttatttggtgccacagtcaccaaatgacaaggatttgccactttcccaccaaattgtgagtgcttgtaatttaggtctctctaccttaaattcagtataaggaaacgtaattatgattgattttttccaaagatgacaagctgtgttgaaatacattttttcttttgaccaattgacagaatctaataagctttaataatcttccccttttatgtgaaaagttttgagaactgtgaaatgtttaggaacaaactgttgaaatccattggaagggaaaaaagaaagtggtaccagtgttaccagctcaactaaaacctgcaattctgcatttcaactcttcacttcctcagcctacaaatagctcattagatgacattcacgcatgctgggtataggcaaggaaagtaattttcaaagtacatttgcagttctctttttcagagatgattctatgatagtgcctctgaaagttgatgcagcatttttgcctttccaaaaagtatttatcctcactgctttttgcagtacttgtattttcacagatggattatctggggtaattttcttcaaagggagtttgttatacacagtgaaaatgtattatagagtagaatagtaaagctctaggggtttcagaaagctttgatgaacagatgacaaacatctgaaaccccctccgcactgttacccagtgtgtatataatgacttgttatagctcagtgtgcccttgaatccatacagtttcttaaaagacaataaaatcttattaataaagttaatgtaacttctaagttctagaaaatgctgattctgtctgccccattcaattgggggctactaattgatttgttgcttggatttcctgagaatttctctatttgtaggaggggttttttctttttacggtctgttgatgacaattactttatgggtgtgatgcaccgatggtagccaaggaatctgttggggaagttcggaaagaaaccttttctttcttttattcagtttaaagtaaactttatcctggatgtttagaatcaacattaagagttatattatggtgttcagagattaagctgacttggatacaatattttcttttgaaaatgaattttctttttcatttgtgatttttaaaaaatgttgcaccagttatgcttcatgcatcgttacatcttcatcaggttaatgtaatgtctagttcctttgcaataaatatattgctgcagctttcttgacgt

SEQ ID NO: 189633 - DNA, 6364 bp, Homo sapiens
  Payload ID: 17446
  Gene Symbol: TBC1D4
  Gene Name: TBC1 domain family, member 4
  Uniprot ID: O60343
  ENST ID: ENST00000377636
  CDS Start-End: 348-4244
gcggccgcggggaccctcggcgtggtcctctgaccctgcaaacccgcgacggaggaaggggaggtcctgcccgaggcgccagcccaaggaggaggatgcccatttaacccgccctcgcctgccgggcgcttgcctcggtgcccgccgccggagcctccgagccgcgcccgtggaagtgctgcatggggcagggctgctgaagcgcggagttcggggtcgcgccgctcccaggcaggcgcgggagcccggtgcggcagttggcacagtttcggcggcgccttctgcgcgggagtggggggcgcggtgcgcccggccggcctccgcggtgccctggtgaggcgagagttatggagccgcccagctgcattcaggatgagccgttcccgcaccccctggagcccgagccgggcgtctcagctcagcccggccccgggaagccaagcgataagcggttccggctgtggtacgttggggggtcgtgcctggaccacaggaccacgctgcctatgctgccctggctcatggccgagatccgcaggcgcagccagaagcccgaggcgggcggctgcggggcgccggcggcccgagaggtgatcctggtgctcagcgcgcccttcctgcgttgcgtccccgcgccgggcgctggggcctcggggggcactagtccgtcggccacgcagcccaacccggcggtattcatcttcgagcacaaggcgcagcatatctcgcgcttcatccacaacagccacgacctcacctactttgcctacctgatcaaggcgcagcccgacgaccccgagtcgcagatggcctgccacgttttccgcgccacagaccccagccaggttcctgatgttattagcagcataaggcaattatctaaagcggccatgaaagaggatgccaaacccagcaaagataatgaggacgccttttacaactctcagaagttcgaagtcctgtactgtggaaaggtgaccgtgacccacaagaaggccccctcaagcctcatcgatgactgcatggagaagttcagcctgcacgaacagcagcgcctgaagatccaaggggagcagcgcggtccggacccaggagaggacctggctgacttggaggtggtggtgcccgggtcccccggagactgcctgccggaggaggctgacggcaccgacacccaccttggcttacctgccggggccagccagcctgccctgaccagctctcgggtctgcttccctgagcggattttggaagattctggctttgatgagcagcaggagtttcggtctcggtgcagcagtgtcaccggcgtgcaacggagagttcacgagggcagccagaaatcccagccgcgacggagacacgcgagcgcacccagtcacgtccagccctcggactcggagaagaacaggaccatgctcttccaggttgggcgatttgagattaaccttatcagtccagacactaaatcagttgtgctagaaaagaattttaaagatatctcctcttgttctcagggtataaagcatgtggatcactttggctttatctgccgggagtctccagagcctggacttagccagtatatttgttatgtattccagtgtgccagcgaatctctggttgatgaggtaatgctgactctgaaacaggccttcagtacggcggctgccctgcagagtgccaagacgcagattaaactgtgtgaggcctgcccgatgcactctttgcataagctctgtgaaaggattgaaggtctctacccaccaagagccaagctggtgatacagaggcatctctcatcactgacagataatgagcaagctgacatctttgaaagagttcagaaaatgaagccagtcagtgaccaggaagaaaatgaacttgtgattttacacctgaggcagctgtgtgaagccaagcagaagacacacgtgcacatcggggaaggcccttctactatttcaaatagtacaatcccagaaaatgcaacaagcagtggaaggttcaaacttgacattctgaaaaataaagctaagagatccttaactagctccctggaaaatatcttctcaaggggagctaacagaatgagaggtcggcttggaagtgtggacagttttgaacggtccaacagtcttgcttcagagaaggactactcaccaggggattctccaccagggacaccgccagcgtccccaccgtcctcagcttggcaaacgtttcccgaagaggattccgactccccgcagtttcgaagacgggcacacacgttcagccacccaccttcaagcacaaagagaaagctgaatttgcaggatgggagggctcagggtgtgcgttcccctctgctgaggcagagctccagtgaacagtgcagcaatctttcgtcagttcgacgcatgtacaaggagagtaattcttcctccagtcttccaagtcttcacacttccttctctgccccttccttcactgccccctctttcctgaaaagcttttaccagaattcaggtagactgtccccacagtatgaaaatgaaatcagacaagacactgcttcagaatcaagtgatggagaagggagaaaaaggacctcatctacctgcagcaatgagtccctaagtgtgggaggaacctctgtcactcctcgccggatctcctggcggcagcgcattttcctcagggttgcttctcccatgaacaaatctccctcagcaatgcaacagcaagatggattggacaggaacgagctgctgccactgtcccccctctctccaaccatggaggaggaaccgctggttgtattcctgtctggggaggatgacccagaaaagattgaagaaagaaagaaatcaaaagaactgaggagcttgtggagaaaagctatacaccaacaaatcttgttacttcgaatggaaaaagaaaaccagaaacttgaagcaagcagagatgaactccagtccagaaaagttaaattagactatgaagaagttggtgcatgtcagaaagaggtcttaataacttgggataagaagttgttaaactgcagagctaaaatcagatgtgatatggaagatattcatactcttcttaaagaaggagttcccaaaagtcgacgaggagaaatttggcagtttctggctttacagtaccgactcagacacagattgcctaataaacaacagcctcctgacatatcctataaggaacttttgaagcagctcactgctcagcagcatgcgattctcgtggatttaggaaggacgtttcctactcacccttacttttcagtacagcttgggccaggacagctgtcactgtttaacctcctgaaagcctattctttgctggacaaagaagtgggatactgtcaggggatcagctttgtggctggagtcctgcttctgcacatgagtgaagagcaagcctttgaaatgctgaaattcctcatgtatgacctcggcttccgcaagcagtacagacctgacatgatgtcgctgcagattcaaatgtaccagctgtccaggctccttcatgactatcacagagatctctacaatcaccttgaagaaaatgaaatcagccccagtctttatgctgccccctggttcctcacattgtttgcctctcagttttcattaggatttgtagccagagtttttgatattatttttcttcagggaactgaagttatattcaaggttgcactcagcctactgagcagccaagagacacttataatggaatgtgagagctttgaaaatattgttgagtttcttaaaaacacgctacctgatatgaatacctctgaaatggaaaaaattattacccaggtttttgagatggatatttctaagcagttgcatgcctatgaggtggaatatcatgtgctacaggatgagcttcaggaatcttcatattcctgtgaggatagtgaaactttggagaagctggagagggccaatagccaactgaaaagacaaaacatggacctcctagaaaaattacaggtagctcatactaaaatccaggccttggaatcaaacctggaaaatcttttgacgagagagaccaaaatgaagtctttaatccggaccctggaacaagaaaaaatggcttatcaaaagacagtggagcaactccggaagctgctgcccgcggatgctctagtcaattgtgacctgttgctgagagacctaaactgcaaccctaacaacaaagccaagataggaaataagccataattgaagaggcacggcctcagcagaaagtgctccttagaatactacagagaggaagagcctgcatgtcgctggcccaaggctggaccctgaagctgatggaaccacctaatactggtgctgagcgcctagtcacagcaggtggacctcgtgctcatcagagcatgccaatcctaagccattggacatatgtagactggtttttgttgttgctatgtacatataaatatatatataaaatgaacatagttcatgctttcagataaaatgagtagatgtatatttagattaatttttttagtcagaacttcatgaaatccacaccaaaggaaaggtaaactgaaatttcccttggacatatgtgaaatctttttgtctttatagtgaaacaaagccagagcatctttgtatattgcaatatacttgaaaaaaatgaatgtatttttttctccaaagaacagcatgtttcactcaatggtgaaaaggtggaaacatttatgtaactttatgtgtatctgtcttgatatctactgacattgtctatatgaggaaaatgattactggtcatgctcctgtgagttttttgggaaggtagggtcatttctccctgcctgctttgtgccaactagcatgttgcatctacatgcattatgagtctggttaggcattactttaaacatacataaagagacagtaggacattgtggctgagtctacccagctcaaggtaaaggagaatgttgctaattttttagcaaactagaccagcattattactcaaactaaaaatatcacacctgaaaaatttaatttaggacctaaaatgtctagattagctttctgctttttttatttgaataactcattcagttgtgaatgaattcctctttatttggtgccacagtcaccaaatgacaaggatttgccactttcccaccaaattgtgagtgcttgtaatttaggtctctctaccttaaattcagtataaggaaacgtaattatgattgattttttccaaagatgacaagctgtgttgaaatacattttttcttttgaccaattgacagaatctaataagctttaataatcttccccttttatgtgaaaagttttgagaactgtgaaatgtttaggaacaaactgttgaaatccattggaagggaaaaaagaaagtggtaccagtgttaccagctcaactaaaacctgcaattctgcatttcaactcttcacttcctcagcctacaaatagctcattagatgacattcacgcatgctgggtataggcaaggaaagtaattttcaaagtacatttgcagttctctttttcagagatgattctatgatagtgcctctgaaagttgatgcagcatttttgcctttccaaaaagtatttatcctcactgctttttgcagtacttgtattttcacagatggattatctggggtaattttcttcaaagggagtttgttatacacagtgaaaatgtattatagagtagaatagtaaagctctaggggtttcagaaagctttgatgaacagatgacaaacatctgaaaccccctccgcactgttacccagtgtgtatataatgacttgttatagctcagtgtgcccttgaatccatacagtttcttaaaagacaataaaatcttattaataaagttaatgtaacttctaagttctagaaaatgctgattctgtctgccccattcaattgggggctactaattgatttgttgcttggatttcctgagaatttctctatttgtaggaggggttttttctttttacggtctgttgatgacaattactttatgggtgtgatgcaccgatggtagccaaggaatctgttggggaagttcggaaagaaaccttttctttcttttattcagtttaaagtaaactttatcctggatgtttagaatcaacattaagagttatattatggtgttcagagattaagctgacttggatacaatattttcttttgaaaatgaattttctttttcatttgtgatttttaaaaaatgttgcaccagttatgcttcatgcatcgttacatcttcatcaggttaatgtaatgtctagttcctttgcaataaatatattgctgcagctttc

SEQ ID NO: 189634 - DNA, 6347 bp, Homo sapiens
  Payload ID: 17446
  Gene Symbol: TBC1D4
  Gene Name: TBC1 domain family, member 4
  Uniprot ID: O60343
  ENST ID: ENST00000431480
  CDS Start-End: 348-4220
gcggccgcggggaccctcggcgtggtcctctgaccctgcaaacccgcgacggaggaaggggaggtcctgcccgaggcgccagcccaaggaggaggatgcccatttaacccgccctcgcctgccgggcgcttgcctcggtgcccgccgccggagcctccgagccgcgcccgtggaagtgctgcatggggcagggctgctgaagcgcggagttcggggtcgcgccgctcccaggcaggcgcgggagcccggtgcggcagttggcacagtttcggcggcgccttctgcgcgggagtggggggcgcggtgcgcccggccggcctccgcggtgccctggtgaggcgagagttatggagccgcccagctgcattcaggatgagccgttcccgcaccccctggagcccgagccgggcgtctcagctcagcccggccccgggaagccaagcgataagcggttccggctgtggtacgttggggggtcgtgcctggaccacaggaccacgctgcctatgctgccctggctcatggccgagatccgcaggcgcagccagaagcccgaggcgggcggctgcggggcgccggcggcccgagaggtgatcctggtgctcagcgcgcccttcctgcgttgcgtccccgcgccgggcgctggggcctcggggggcactagtccgtcggccacgcagcccaacccggcggtattcatcttcgagcacaaggcgcagcatatctcgcgcttcatccacaacagccacgacctcacctactttgcctacctgatcaaggcgcagcccgacgaccccgagtcgcagatggcctgccacgttttccgcgccacagaccccagccaggttcctgatgttattagcagcataaggcaattatctaaagcggccatgaaagaggatgccaaacccagcaaagataatgaggacgccttttacaactctcagaagttcgaagtcctgtactgtggaaaggtgaccgtgacccacaagaaggccccctcaagcctcatcgatgactgcatggagaagttcagcctgcacgaacagcagcgcctgaagatccaaggggagcagcgcggtccggacccaggagaggacctggctgacttggaggtggtggtgcccgggtcccccggagactgcctgccggaggaggctgacggcaccgacacccaccttggcttacctgccggggccagccagcctgccctgaccagctctcgggtctgcttccctgagcggattttggaagattctggctttgatgagcagcaggagtttcggtctcggtgcagcagtgtcaccggcgtgcaacggagagttcacgagggcagccagaaatcccagccgcgacggagacacgcgagcgcacccagtcacgtccagccctcggactcggagaagaacaggaccatgctcttccaggttgggcgatttgagattaaccttatcagtccagacactaaatcagttgtgctagaaaagaattttaaagatatctcctcttgttctcagggtataaagcatgtggatcactttggctttatctgccgggagtctccagagcctggacttagccagtatatttgttatgtattccagtgtgccagcgaatctctggttgatgaggtaatgctgactctgaaacaggccttcagtacggcggctgccctgcagagtgccaagacgcagattaaactgtgtgaggcctgcccgatgcactctttgcataagctctgtgaaaggattgaaggtctctacccaccaagagccaagctggtgatacagaggcatctctcatcactgacagataatgagcaagctgacatctttgaaagagttcagaaaatgaagccagtcagtgaccaggaagaaaatgaacttgtgattttacacctgaggcagctgtgtgaagccaagcagaagacacacgtgcacatcggggaaggcccttctactatttcaaatagtacaatcccagaaaatgcaacaagcagtggaaggttcaaacttgacattctgaaaaataaagctaagagatccttaactagctccctggaaaatatcttctcaaggggagctaacagaatgagaggtcggcttggaagtgtggacagttttgaacggtccaacagtcttgcttcagagaaggactactcaccaggggattctccaccagggacaccgccagcgtccccaccgtcctcagcttggcaaacgtttcccgaagaggattccgactccccgcagtttcgaagacgggcacacacgttcagccacccaccttcaagcacaaagagaaagctgaatttgcaggatgggagggctcagggtgtgcgttcccctctgctgaggcagagctccagtgaacagtgcagcaatctttcgtcagttcgacgcatgtacaaggagagtaattcttcctccagtcttccaagtcttcacacttccttctctgccccttccttcactgccccctctttcctgaaaagcttttaccagaattcaggtagactgtccccacagtatgaaaatgaaatcagtgatggagaagggagaaaaaggacctcatctacctgcagcaatgagtccctaagtgtgggaggaacctctgtcactcctcgccggatctcctggcggcagcgcattttcctcagggttgcttctcccatgaacaaatctccctcagcaatgcaacagcaagatggattggacaggaacgagctgctgccactgtcccccctctctccaaccatggaggaggaaccgctggttgtattcctgtctggggaggatgacccagaaaagattgaagaaagaaagaaatcaaaagaactgaggagcttgtggagaaaagctatacaccaacaaatcttgttacttcgaatggaaaaagaaaaccagaaacttgaagcaagcagagatgaactccagtccagaaaagttaaattagactatgaagaagttggtgcatgtcagaaagaggtcttaataacttgggataagaagttgttaaactgcagagctaaaatcagatgtgatatggaagatattcatactcttcttaaagaaggagttcccaaaagtcgacgaggagaaatttggcagtttctggctttacagtaccgactcagacacagattgcctaataaacaacagcctcctgacatatcctataaggaacttttgaagcagctcactgctcagcagcatgcgattctcgtggatttaggaaggacgtttcctactcacccttacttttcagtacagcttgggccaggacagctgtcactgtttaacctcctgaaagcctattctttgctggacaaagaagtgggatactgtcaggggatcagctttgtggctggagtcctgcttctgcacatgagtgaagagcaagcctttgaaatgctgaaattcctcatgtatgacctcggcttccgcaagcagtacagacctgacatgatgtcgctgcagattcaaatgtaccagctgtccaggctccttcatgactatcacagagatctctacaatcaccttgaagaaaatgaaatcagccccagtctttatgctgccccctggttcctcacattgtttgcctctcagttttcattaggatttgtagccagagtttttgatattatttttcttcagggaactgaagttatattcaaggttgcactcagcctactgagcagccaagagacacttataatggaatgtgagagctttgaaaatattgttgagtttcttaaaaacacgctacctgatatgaatacctctgaaatggaaaaaattattacccaggtttttgagatggatatttctaagcagttgcatgcctatgaggtggaatatcatgtgctacaggatgagcttcaggaatcttcatattcctgtgaggatagtgaaactttggagaagctggagagggccaatagccaactgaaaagacaaaacatggacctcctagaaaaattacaggtagctcatactaaaatccaggccttggaatcaaacctggaaaatcttttgacgagagagaccaaaatgaagtctttaatccggaccctggaacaagaaaaaatggcttatcaaaagacagtggagcaactccggaagctgctgcccgcggatgctctagtcaattgtgacctgttgctgagagacctaaactgcaaccctaacaacaaagccaagataggaaataagccataattgaagaggcacggcctcagcagaaagtgctccttagaatactacagagaggaagagcctgcatgtcgctggcccaaggctggaccctgaagctgatggaaccacctaatactggtgctgagcgcctagtcacagcaggtggacctcgtgctcatcagagcatgccaatcctaagccattggacatatgtagactggtttttgttgttgctatgtacatataaatatatatataaaatgaacatagttcatgctttcagataaaatgagtagatgtatatttagattaatttttttagtcagaacttcatgaaatccacaccaaaggaaaggtaaactgaaatttcccttggacatatgtgaaatctttttgtctttatagtgaaacaaagccagagcatctttgtatattgcaatatacttgaaaaaaatgaatgtatttttttctccaaagaacagcatgtttcactcaatggtgaaaaggtggaaacatttatgtaactttatgtgtatctgtcttgatatctactgacattgtctatatgaggaaaatgattactggtcatgctcctgtgagttttttgggaaggtagggtcatttctccctgcctgctttgtgccaactagcatgttgcatctacatgcattatgagtctggttaggcattactttaaacatacataaagagacagtaggacattgtggctgagtctacccagctcaaggtaaaggagaatgttgctaattttttagcaaactagaccagcattattactcaaactaaaaatatcacacctgaaaaatttaatttaggacctaaaatgtctagattagctttctgctttttttatttgaataactcattcagttgtgaatgaattcctctttatttggtgccacagtcaccaaatgacaaggatttgccactttcccaccaaattgtgagtgcttgtaatttaggtctctctaccttaaattcagtataaggaaacgtaattatgattgattttttccaaagatgacaagctgtgttgaaatacattttttcttttgaccaattgacagaatctaataagctttaataatcttccccttttatgtgaaaagttttgagaactgtgaaatgtttaggaacaaactgttgaaatccattggaagggaaaaaagaaagtggtaccagtgttaccagctcaactaaaacctgcaattctgcatttcaactcttcacttcctcagcctacaaatagctcattagatgacattcacgcatgctgggtataggcaaggaaagtaattttcaaagtacatttgcagttctctttttcagagatgattctatgatagtgcctctgaaagttgatgcagcatttttgcctttccaaaaagtatttatcctcactgctttttgcagtacttgtattttcacagatggattatctggggtaattttcttcaaagggagtttgttatacacagtgaaaatgtattatagagtagaatagtaaagctctaggggtttcagaaagctttgatgaacagatgacaaacatctgaaaccccctccgcactgttacccagtgtgtatataatgacttgttatagctcagtgtgcccttgaatccatacagtttcttaaaagacaataaaatcttattaataaagttaatgtaacttctaagttctagaaaatgctgattctgtctgccccattcaattgggggctactaattgatttgttgcttggatttcctgagaatttctctatttgtaggaggggttttttctttttacggtctgttgatgacaattactttatgggtgtgatgcaccgatggtagccaaggaatctgttggggaagttcggaaagaaaccttttctttcttttattcagtttaaagtaaactttatcctggatgtttagaatcaacattaagagttatattatggtgttcagagattaagctgacttggatacaatattttcttttgaaaatgaattttctttttcatttgtgatttttaaaaaatgttgcaccagttatgcttcatgcatcgttacatcttcatcaggttaatgtaatgtctagttcctttgcaataaatatattgctgcagctttcttgacgt

SEQ ID NO: 189635 - DNA, 847 bp, Homo sapiens
  Payload ID: 17446
  Gene Symbol: TBC1D4
  Gene Name: TBC1 domain family, member 4
  ENST ID: ENST00000413735
  CDS Start-End: 1-847
gataatgagcaagctgacatctttgaaagagttcagaaaatgaagccagtcagtgaccaggaagaaaatgaacttgtgattttacacctgaggcagctgtgtgaagccaagcagaagacacacgtgcacatcggggaaggcccttctactatttcaaatagtacaatcccagaaaatgcaacaagcagtggaaggttcaaacttgacattctgaaaaataaagctaagagatccttaactagctccctggaaaatatcttctcaaggggagctaacagaatgagaggtcggcttggaagtgtggacagttttgaacggtccaacagtcttgcttcagagaaggactactcaccaggggattctccaccagggacaccgccagcgtccccaccgtcctcagcttggcaaacgtttcccgaagaggattccgactccccgcagtttcgaagacgggcacacacgttcagccacccaccttcaagcacaaagagaaagctgaatttgcaggatgggagggctcagggtgtgcgttcccctctgctgaggcagagctccagtgaacagtgcagtgatggagaagggagaaaaaggacctcatctacctgcagcaatgagtccctaagtgtgggaggaacctctgtcactcctcgccggatctcctggcggcagcgcattttcctcagggttgcttctcccatgaacaaatctccctcagcaatgcaacagcaagatggattggacaggaacgagctgctgccactgtcccccctctctccaaccatggaggaggaaccgctggttgtattcctgtctggggaggatgacccagaaaagattgaagaaagaa

SEQ ID NO: 189636 - DNA, 7854 bp, Homo sapiens
  Payload ID: 17447
  Gene Symbol: TBC1D5
  Gene Name: TBC1 domain family, member 5
  Uniprot ID: Q92609
  ENST ID: ENST00000253692
  CDS Start-End: 1666-4053
tgactgcatcacctggtctgtgaattttccattagaagcttggtgtgctgttaggtgaaagacttgctcagctatgcgtcattgggttttatcaacatataggcgaaaaaaatcctggtctctgagtgtacagctgagatgaaaatttcttttattggaggaagtattgagtgtgtgctctcaaatgcggcctcagttgagtagtgcattcctgagttttggaagcaaatttgcaaacaattgagagtcgtacagtgggtgttctaactggattcaggttttttctaatgtaattttttcacacgtaaattaaaaagtttagaaatgtcacacataacttcataacactttatggagaaatggttgtacttttaatttttttctttttatttatactccaactgactgagcagaggttgtacttctaaataactttgtggaagtttttagtaccataatttttataattttcattccagtcctttgatatttatgacagtacttctgaagcgcttactgagtgccggacactgttgtaagtgctttacggaacttgacttttttttttttttgagacggactctcgctctgtcgcccaggctggagtgcagtggtgcagtggctcgatctcggctcactgccacctctccctcatggtttcaaacacttctcctgcctcagcctcccaggtagccaggattatagccgcccgccaccactcccgactaattttattttgtatgttcttttttagtagagacggaggagtttcaccatgttggccaggctggtatcgacctcctgacctcaagtgatgtgtccatctcggcctcccaaggtgctggaattacaggtgtgagccactgtgctcggcctacctttttttttttgttttttgtttttttgaaaaggagtttcgctcttgtccaggctggagtataatggtgcgatctcagctcaccgcaatctccgcctcccagattcaagcgattctcctgcctcagcctcctcaggagctgggattacaggcgcccaccgccatgcccggctaatttttgtatttttagtagagacggggtttcactatattggccaggctggtctcgaactgctgacctcaagtaatccgcctgcctcagcctcccaaagtgctgggattacagacgtgatccaccaggatcacaccaggccgcgcctggcctgctttcattttaaaagtcaaatttgtcatccgcctcagtgcttgtaatcttttctgagtgagatactgaaatttgcagtttcgttttgcttgcacttgttcactggaccagtagtcactgttaaatgtaaaagtatctacttcctctgaaagttttttattcctttatttcctgcctgggcttgtcctccaccctacatgtatgcgtagtagatttagtgtttgttatcctaacctttaggtttagggattgactgggtttctgactttttatttggccaatgaggacgatacagaaaatgaagcattggtcattatcacattttaacgctgaaaaagtaagaaggacaaccccggaataaaatgatatcagtatcaagataaaagtttggaatgggagaaaaattctcaaagcctgaaagaaaatctgtagttacttttggtgacgctgtccagttcccacaatgtatcattccttatctgaaactagacatcctctgcagccagaagaacaagaagtaggcattgaccccttgtccagttactctaacaagtctggaggagattcaaataaaaatggaagaagaacaagttctactttagactctgaagggacttttaattcctataggaaagaatgggaagaactatttgtaaacaacaattacttggcaacaataaggcagaaggggattaatgggcagctgagaagcagcaggttccgcagcatttgctggaagctatttctttgtgttcttcctcaagacaaaagtcaatggataagtagaattgaagaattaagagcatggtatagcaacattaaagaaatacatattaccaacccgaggaaggttgttggccaacaagatttgatgatcaataatcctctttcacaggatgaagggagtctttggaacaaattcttccaagataaagaacttcgatcaatgattgaacaagatgtcaaaagaacgtttcctgaaatgcagtttttccagcaagaaaatgtgagaaaaattcttacagatgttcttttctgttatgccagagaaaacgagcagttgctttataaacagggcatgcacgaactgttagcacctatagtctttgtccttcactgtgaccaccaagcttttctacatgccagtgagtctgcacagcccagtgaggaaatgaaaactgtcttgaaccctgagtatctggaacatgatgcctatgcagtgttctcacaacttatggaaactgctgaaccttggttttcaacttttgagcatgatggtcagaaggggaaagaaacactgatgactcccattccctttgctagaccacaagatttagggccaacaattgctattgttactaaagtcaaccagatccaggatcatctactgaagaagcatgatattgagctttacatgcacttgaacagactagaaattgcaccacagatatatgggttaaggtgggtgcggctgctatttggacgagagttccccctgcaggaccttctggtggtctgggatgccttgtttgcagacggcctcagcctgggtttagtagattatatcttcgtagccatgttactttacatccgagatgctttgatctctagtaactaccagacctgtctcggccttctgatgcattacccattcatcggggatgtacactcactgattcttaaggctctgttccttagagatccaaagagaaatccaagaccagtgacttatcaattccatccaaatttagattattacaaagcacgaggagcagacctcatgaataaaagccggaccaatgccaaaggtgctcccctgaatataaataaggtctctaatagcctgattaattttggaagaaagttgatttccccagcaatggctccaggcagtgcaggtggccctgtacctggaggcaacagcagtagctcctcctctgttgtaattcctaccaggacctcagcagaggccccaagccatcacttgcaacagcaacagcagcagcagaggctgatgaaatcagaaagcatgcctgtgcaattgaacaaagggctaagttctaaaaacatcagttcatctccaagcgttgagagtttgcctggaggaagagaattcactggctctccaccttcatctgctactaaaaaagattccttttttagcaacatctcacgttctcgctcacacagcaaaactatgggcagaaaagaatctgaagaagaattagaagcccaaatttccttccttcaagggcagttgaatgacctggatgccatgtgcaaatactgtgcaaaggtgatggacactcatcttgtaaatattcaagatgtgatattacaagaaaatttggaaaaagaagatcaaattctggtttccctggcaggattaaaacagatcaaagacattctaaaaggttccctgcgttttaaccagagccagctagaggccgaagagaacgaacagatcaccattgcggacaaccactactgctccagcggccagggccagggccgaggccaaggccagagcgttcaaatgtcaggggccattaaacaggcctcttcagaaacgccagggtgcactgatagagggaattccgatgacttcatcctgatttccaaagatgatgatgggagcagtgccaggggctccttctccggccaggcccagcctcttcgcaccctcagaagcacctctgggaaaagccaggccccagtctgctccccactggtgttctcagatccactgatgggcccagcctcagcttcctccagcaaccccagctccagtcctgatgacgacagcagcaaggactctggcttcaccattgtgagtcccctggacatctgaccacagtgcccagtcctgccccacagggatctagccacccttcagtggccccaaggccagactgaggctcatccagtggagaaccttcttaaaccactgcttccttcccggcatgcattttgcattggtccagccctttgaaaccccttagagagaagcatatatggccacaaagcacagaggcttaggtttgccacatgcagacagggctttctgggcccttacctaatccccacccgactcttgctctgagttagagctgagttacgtacccagtatcacactcacagttagaaaagaccgaatcacaatttagaatcacttttcctctgtccccttctccccagctaagaatgtgtggcacctccatcagttatacttagaaggagcagaaatagttattttcgtatcttctatccctcaaagcatcagacatgggaaaattggtttataccaagaaagcttcctctgtggaaatctgtctcagcctactttattcctgcattgggaagccatatcgcagagctaaatgcaatagaatgaaccagaactagtggattccagggctgggggaaaaaaaaaaagaaaaaacctcattactgacctctcaaagttataaggatctctgcaaacaggatctaagcttaggaataatatttaggtgtgatatagtgttagatttttttgatgtattaaagaatgcatctccaatccttaggccatatcaactttggccatcaatatctctccttaaacaattatatttcaccttttagaatctttcatagccagaaaacaagattactgtaagccagttttagctgcactgatttcaaaagatataagaatattactatccttcaaatggaaaatgcgaccttgactttatgggataaacatctttcagacagtcagttttctagtcaggtttctctggtttcagagctgtatatacctgtcaactgaggaataaagggaaaaacccaagttcattcccacccaaagtcagaatccctcattggccttaaggtagcagtcataagacagagaattggacctagagtcccttctgtggggaataaggatacctagagaacattccacatgccaagaggatgcaggatttctacacaaccccttcccttcttggaagtcaagtgtaggtactgcagggcctgtgctcagctgtgaaccccgtatcctgggccccactgccgggaccgggtctgacatgccagtgccttcctgggctgagcacagattagagactctcccccttgtcagtcagcaccttaggaaaccatgatgggcacagagcatcacatgagctgtttctctccttaaagaagatccctggaaaggatgcttttcctctcctttgcctgcgcaggaattctaacaggagtgggtgaggatggcagagggacacagtgcctgtctcgcctccatcagggagagcagccatgccagggatgactagctctttgagcctgtcctcagaggatggcgaggcagccgggcagtggaggccttcatggtaacaaatgaaagctcagtatagaggaacagacactgtttacgtccctcccactgctaaccttatatatctctatagacaaatgtgataatgacatgatttcccacctgccctccaagaaaatggtgactcactctcaagtcagctactgtagagagggttctaattggttctgcaatttgctcttaaactctagcagggaactctcctcttaccacatcagcatgtaaggtgaataataactggttttgccagacagcaggttgtctgaccttcaaccactgggcaattgcctggcagatgcacacagtagctccctggcttctggctctgagtgttcctctcagcacctctgagtaagctgctgccaagcacatatccctatgacaacactttgtaaaagccgcggggcccccatacagcgagtgaccttgcaactgtgcagggttgccattggtcactttctcaccttgggaaggtgtcagtgttttcagttctaaggtaagaggtgtagagctgttcccaccagggctctgggacagactggaaaggaccacagacctggccatccctgggcagcagggccagtgtcacctgctgacctctagtatttcctttgccctagagctagagtcatgatagctgagggtcactcgccctgcaagagtcactaggcacccaccatgccaataaggctctccgctggctccctgcagttggctgggtgtttaatagtcactgaaaactcccagccctgctgcacactagaggcaggtcctctcggtcctctccatcctgtgcttctgtggcccccagcaagctcaccacctccttggaggagagagacatacaaggacagtgggtcatgggtagtaccagcctcaaattcccacaggctcatactcagacaattgtattactgccttatgttttttaagtgtttttttaaattcttcatagttgagtattatttgcaattttattagttacagtgctattaaagaatatgtgctcctttttattatattatcagatacttatgtttaattgtacattttttaaatcctgaatatattgtgttttgttaacaaatgtaatcagtggaacccttcttacgttttgattattagcagttaaatacattttgtatacatgaagcttagattaattcccatcatcatcatctcctgtttttatatgtgtccctatgtgtttcatgcattcctctttgatcagattggaatttgagttaaaatttagctttgtacattacgtgtgagagttacagactagcaagtctaattactttgccttaccttgagtgtatgccacagggtcagataacacattaaacatttagttacactggattactcttccaaagctgacctcctgctaatgttcagaggtaactgcaatccggaaagaaataatatcactgcagaaagaatgtgactctaaaaataaaccaggacctccctgtgatttgccttgcctgcagatgaccagttgactcttgtgctgtcagccctggggttgctaaggaagctgcttcagggagttgggggttagttgcccgctctcaacaggaatgcctcctctactttgtcagagatgctgaacaaatatcaaactctgtggcagtcatgctggcctcctaagaataacctgtgagtcagagttgatgcacattatttttgtttttattttatttttttaaggaactgctccaagggttcattatagaacaggagtgtgtacggaggacttaggtccccacatagagtggccgttctgtggcggctccaaccaattccatccctcctttcctgcggacacacacctggcccctggcccctgccctgtgtgtctggaggaggggcactggggaggctgtggagcagagagaagaggccggatacattgaggatggcacctggcaagccaggcttccttctcaaaggccagactgctttctcagtgttacttactaaagctctctttttatactgttaaaaagatatataaagttcgtataaacaggcttgagaccactttgatgtaaaagctgtcatagtagtttttctcacagtggcacaattcatttgattgatggaatattcagtgacgccatgtatgccctatcgcttttttctcatccatctttatgctataactcatactgatttaagaaatgatttctccttttggcaaagcgaccccattcaatatggttataataaaagactaatgtcaaactgaga

SEQ ID NO: 189637 - DNA, 757 bp, Homo sapiens
  Payload ID: 17447
  Gene Symbol: TBC1D5
  Gene Name: TBC1 domain family, member 5
  ENST ID: ENST00000428355
  CDS Start-End: 330-757
ctgttctctttcaggtcgggccgggcccggccgcttccgcgagcgccctgcagactgagggagagagagagaaagaggaggggaggaggaggaggattcagggaataggagctggggagcccttctgcgccacagtgatatcagtatcaagataaaagtttggaatgggagaaaaattctcaaagcctgaaagaaaatctgagggagcctgcgagcaaacgaggtggaaactggagtgcacaagtgctggaatgggctgtctgccttccacccctcacgggagggagcgcgcaggtagttacttttggtgacgctgtccagttcccacaatgtatcattccttatctgaaactagacatcctctgcagccagaagaacaagaagtaggcattgaccccttgtccagttactctaacaagtctggaggagattcaaataaaaatggaagaagaacaagttctactttagactctgaagggacttttaattcctataggaaagaatgggaagaactatttgtaaacaacaattacttggcaacaataaggcagaaggggattaatgggcagctgagaagcagcaggttccgcagcatttgctggaagctatttctttgtgttcttcctcaagacaaaagtcaatggataagtagaattgaagaattaagagcatggtatagcaacattaaagaaatacatattaccaacccgaggaaggttgttggccaacaagatttgatgatcaataatcctctttc

SEQ ID NO: 189638 - DNA, 687 bp, Homo sapiens
  Payload ID: 17447
  Gene Symbol: TBC1D5
  Gene Name: TBC1 domain family, member 5
  ENST ID: ENST00000414349
  CDS Start-End: 356-687
cgggcccggccgcttccgcgagcgccctgcagactgagggagagagagagaaagaggaggggaggaggaggaggattcagggaataggagctggggagcccttctgcgccacagttttggagtccagaacatgtaaagttttttcacccattataaacaatttggacaaaatactgcatgttctacttaaaattgggagctaagcagtggtagagatggggcttcaccatgttgaccaggctggtcttgaactccttacctcaggtgatctcccaggcttggccttccaaggatttgtgcacatataaacttctgtccatgtagttacttttggtgacgctgtccagttcccacaatgtatcattccttatctgaaactagacatcctctgcagccagaagaacaagaagtaggcattgaccccttgtccagttactctaacaagtctggaggagattcaaataaaaatggaagaagaacaagttctactttagactctgaagggacttttaattcctataggaaagaatgggaagaactatttgtaaacaacaattacttggcaacaataaggcagaaggggattaatgggcagctgagaagcagcaggttccgcagcatttgctggaagctatttctttgtgttcttcctcaagacaaaagtcaatggataagtagaattgaaga

SEQ ID NO: 189639 - DNA, 852 bp, Homo sapiens
  Payload ID: 17447
  Gene Symbol: TBC1D5
  Gene Name: TBC1 domain family, member 5
  ENST ID: ENST00000415814
  CDS Start-End: 302-852
acgtggccgctggtcaccgccgccaccccctcccgccctgttctctttcaggtcgggccgggcccggccgcttccgcgagcgccctgcagactgagggagagagagagaaagaggaggggaggaggaggaggattcagggaataggagctggggagcccttctgcgccacaggagggagcctgcgagcaaacgaggtggaaactggagtgcacaagtgctggaatgggctgtctgccttccacccctcacgggagggagcgcgcaggtagttacttttggtgacgctgtccagttcccacaatgtatcattccttatctgaaactagacatcctctgcagccagaagaacaagaagtaggcattgaccccttgtccagttactctaacaagtctggaggagattcaaataaaaatggaagaagaacaagttctactttagactctgaagggacttttaattcctataggaaagaatgggaagaactatttgtaaacaacaattacttggcaacaataaggcagaaggggattaatgggcagctgagaagcagcaggttccgcagcatttgctggaagctatttctttgtgttcttcctcaagacaaaagtcaatggataagtagaattgaagaattaagagcatggtatagcaacattaaagaaatacatattaccaacccgaggaaggttgttggccaacaagatttgatgatcaataatcctctttcacaggatgaagggagtctttggaacaaattcttccaagataaagaacttcgatcaatgattgaacaagatgtcaaaagaacgtttcctgaaatgcagtttttccagcaagaaaatgtgagaaa

SEQ ID NO: 189640 - DNA, 680 bp, Homo sapiens
  Payload ID: 17447
  Gene Symbol: TBC1D5
  Gene Name: TBC1 domain family, member 5
  ENST ID: ENST00000444471
  CDS Start-End: 584-680
ctgttctctttcaggtcgggccgggcccggccgcttccgcgagcgccctgcagactgagggagagagagagaaagaggaggggaggaggaggaggattcagggaataggagctggggagcccttctgcgccacagtgatatcagtatcaagataaaagtttggaatgggagaaaaattctcaaagcctgaaagaaaatctgagatgcttggagtgtaaagatcccatggtcacataaatccggaaagcactgaatactttgtttcccataagagaatcccattatatgttgatgtattaaaagacctgagaacctggtaaatcttctatgatattgtctcagggaccacctgcagcaggagcccacaaattgaataaatgcaacataaggagaggattttttttttctgttgttgcttgtttcaaaaatgctactatccagattctctattaaggagggagcctgcgagcaaacgaggtggaaactggagtgcacaagtgctggaatgggctgtctgccttccacccctcacgggagggagcgcgcaggtagttacttttggtgacgctgtccagttcccacaatgtatcattccttatctgaaactagacatcctctgcagccagaagaacaagaagtaggcattgaccccttgtccagttactctaacaagtctggag

SEQ ID NO: 189641 - DNA, 3156 bp, Homo sapiens
  Payload ID: 17447
  Gene Symbol: TBC1D5
  Gene Name: TBC1 domain family, member 5
  Uniprot ID: Q92609
  ENST ID: ENST00000429383
  CDS Start-End: 178-2565
agcccttctgcgccacagagatggggtctcactctgtcatccaggctggaatatagtggcacaatcatagcccattgtagcctccatctcaaggactcaggggatcctcccttctaggcctcccaagtagctgggattacaggtagttacttttggtgacgctgtccagttcccacaatgtatcattccttatctgaaactagacatcctctgcagccagaagaacaagaagtaggcattgaccccttgtccagttactctaacaagtctggaggagattcaaataaaaatggaagaagaacaagttctactttagactctgaagggacttttaattcctataggaaagaatgggaagaactatttgtaaacaacaattacttggcaacaataaggcagaaggggattaatgggcagctgagaagcagcaggttccgcagcatttgctggaagctatttctttgtgttcttcctcaagacaaaagtcaatggataagtagaattgaagaattaagagcatggtatagcaacattaaagaaatacatattaccaacccgaggaaggttgttggccaacaagatttgatgatcaataatcctctttcacaggatgaagggagtctttggaacaaattcttccaagataaagaacttcgatcaatgattgaacaagatgtcaaaagaacgtttcctgaaatgcagtttttccagcaagaaaatgtgagaaaaattcttacagatgttcttttctgttatgccagagaaaacgagcagttgctttataaacagggcatgcacgaactgttagcacctatagtctttgtccttcactgtgaccaccaagcttttctacatgccagtgagtctgcacagcccagtgaggaaatgaaaactgtcttgaaccctgagtatctggaacatgatgcctatgcagtgttctcacaacttatggaaactgctgaaccttggttttcaacttttgagcatgatggtcagaaggggaaagaaacactgatgactcccattccctttgctagaccacaagatttagggccaacaattgctattgttactaaagtcaaccagatccaggatcatctactgaagaagcatgatattgagctttacatgcacttgaacagactagaaattgcaccacagatatatgggttaaggtgggtgcggctgctatttggacgagagttccccctgcaggaccttctggtggtctgggatgccttgtttgcagacggcctcagcctgggtttagtagattatatcttcgtagccatgttactttacatccgagatgctttgatctctagtaactaccagacctgtctcggccttctgatgcattacccattcatcggggatgtacactcactgattcttaaggctctgttccttagagatccaaagagaaatccaagaccagtgacttatcaattccatccaaatttagattattacaaagcacgaggagcagacctcatgaataaaagccggaccaatgccaaaggtgctcccctgaatataaataaggtctctaatagcctgattaattttggaagaaagttgatttccccagcaatggctccaggcagtgcaggtggccctgtacctggaggcaacagcagtagctcctcctctgttgtaattcctaccaggacctcagcagaggccccaagccatcacttgcaacagcaacagcagcagcagaggctgatgaaatcagaaagcatgcctgtgcaattgaacaaagggctaagttctaaaaacatcagttcatctccaagcgttgagagtttgcctggaggaagagaattcactggctctccaccttcatctgctactaaaaaagattccttttttagcaacatctcacgttctcgctcacacagcaaaactatgggcagaaaagaatctgaagaagaattagaagcccaaatttccttccttcaagggcagttgaatgacctggatgccatgtgcaaatactgtgcaaaggtgatggacactcatcttgtaaatattcaagatgtgatattacaagaaaatttggaaaaagaagatcaaattctggtttccctggcaggattaaaacagatcaaagacattctaaaaggttccctgcgttttaaccagagccagctagaggccgaagagaacgaacagatcaccattgcggacaaccactactgctccagcggccagggccagggccgaggccaaggccagagcgttcaaatgtcaggggccattaaacaggcctcttcagaaacgccagggtgcactgatagagggaattccgatgacttcatcctgatttccaaagatgatgatgggagcagtgccaggggctccttctccggccaggcccagcctcttcgcaccctcagaagcacctctgggaaaagccaggccccagtctgctccccactggtgttctcagatccactgatgggcccagcctcagcttcctccagcaaccccagctccagtcctgatgacgacagcagcaaggactctggcttcaccattgtgagtcccctggacatctgaccacagtgcccagtcctgccccacagggatctagccacccttcagtggccccaaggccagactgaggctcatccagtggagaaccttcttaaaccactgcttccttcccggcatgcattttgcattggtccagccctttgaaaccccttagagagaagcatatatggccacaaagcacagaggcttaggtttgccacatgcagacagggctttctgggcccttacctaatccccacccgactcttgctctgagttagagctgagttacgtacccagtatcacactcacagttagaaaagaccgaatcacaatttagaatcacttttcctctgtccccttctccccagctaagaatgtgtggcacctccatcagttatacttagaaggagcagaaatagttattttcgtatcttctatccctcaaagcatcagacatgggaaaattggtttataccaagaaagcttcctctgtggaaatctgtctcagcctactttattcctgcattgggaagccatatcgcagagctaaatgcaatagaatgaaccagaactagtggattccagggctgggggaaaaaaaaaaagaaaaaa

SEQ ID NO: 189642 - DNA, 591 bp, Homo sapiens
  Payload ID: 17447
  Gene Symbol: TBC1D5
  Gene Name: TBC1 domain family, member 5
  ENST ID: ENST00000425944
  CDS Start-End: 171-591
ctgttctctttcaggtcgggccgggcccggccgcttccgcgagcgccctgcagactgagggagagagagagaaagaggaggggaggaggaggaggattcagggaataggagctggggagcccttctgcgccacaggtagttacttttggtgacgctgtccagttcccacaatgtatcattccttatctgaaactagacatcctctgcagccagaagaacaagaagtaggcattgaccccttgtccagttactctaacaagtctggaggagattcaaataaaaatggaagaagaacaagttctactttagactctgaagggacttttaattcctataggaaagaatgggaagaactatttgtaaacaacaattacttggcaacaataaggcagaaggggattaatgggcagctgagaagcagcaggttccgcagcatttgctggaagctatttctttgtgttcttcctcaagacaaaagtcaatggataagtagaattgaagaattaagagcatggtatagcaacattaaagaaatacatattaccaacccgaggaaggttgttggccaacaagatttgatgatcaataatc

SEQ ID NO: 189643 - DNA, 3124 bp, Homo sapiens
  Payload ID: 17447
  Gene Symbol: TBC1D5
  Gene Name: TBC1 domain family, member 5
  Uniprot ID: Q92609
  ENST ID: ENST00000446818
  CDS Start-End: 265-2718
gtattgagtcaccataagtggacaaggaaggagcttctaacagacctcattgtacatacaaaattacaatcatgaatgtaaaggaaagcacactggaactgcttgcagctgactgcgaccttgagtctcagcttctgcatctgtgaaatgaagatactggtctgtgatatcagtatcaagataaaagtttggaatgggagaaaaattctcaaagcctgaaagaaaatctgtagttacttttggtgacgctgtccagttcccacaatgtatcattccttatctgaaactagacatcctctgcagccagaagaacaagaagtaggcattgaccccttgtccagttactctaacaagtctggaggagattcaaataaaaatggaagaagaacaagttctactttagactctgaagggacttttaattcctataggaaagaatgggaagaactatttgtaaacaacaattacttggcaacaataaggcagaaggggattaatgggcagctgagaagcagcaggttccgcagcatttgctggaagctatttctttgtgttcttcctcaagacaaaagtcaatggataagtagaattgaagaattaagagcatggtatagcaacattaaagaaatacatattaccaacccgaggaaggttgttggccaacaagatttgatgatcaataatcctctttcacaggatgaagggagtctttggaacaaattcttccaagataaagaacttcgatcaatgattgaacaagatgtcaaaagaacgtttcctgaaatgcagtttttccagcaagaaaatgtgagaaaaattcttacagatgttcttttctgttatgccagagaaaacgagcagttgctttataaacagggcatgcacgaactgttagcacctatagtctttgtccttcactgtgaccaccaagcttttctacatgccagtgagtctgcacagcccagtgaggaaatgaaaactgtcttgaaccctgagtatctggaacatgatgcctatgcagtgttctcacaacttatggaaactgctgaaccttggttttcaacttttgagcatgatggtcagaaggggaaagaaacactgatgactcccattccctttgctagaccacaagatttagggccaacaattgctattgttactaaagtcaaccagatccaggatcatctactgaagaagcatgatattgagctttacatgcacttgaacagactagaaattgcaccacagatatatgggttaaggtgggtgcggctgctatttggacgagagttccccctgcaggaccttctggtggtctgggatgccttgtttgcagacggcctcagcctgggtttagtagattatatcttcgtagccatgttactttacatccgagatgctttgatctctagtaactaccagacctgtctcggccttctgatgcattacccattcatcggggatgtacactcactgattcttaaggctctgttccttagagatccaaagagaaatccaagaccagtgacttatcaattccatccaaatttagattattacaaagcacgaggagcagacctcatgaataaaagccggaccaatgccaaaggtgctcccctgaatataaataaggtctctaatagcctgattaattttggaagaaagttgatttccccagcaatggctccaggcagtgcaggtggccctgtacctggaggcaacagcagtagctcctcctctgttgtaattcctaccaggacctcagcagaggccccaagccatcacttgcaacagcaacagcagcagcagaggctgatgaaatcagaaagcatgcctgtgcaattgaacaaaggcgatgtagttacaggaagcgatgctcaggtttctgttcctgtccagactctaactgacctccaagggctaagttctaaaaacatcagttcatctccaagcgttgagagtttgcctggaggaagagaattcactggctctccaccttcatctgctactaaaaaagattccttttttagcaacatctcacgttctcgctcacacagcaaaactatgggcagaaaagaatctgaagaagaattagaagcccaaatttccttccttcaagggcagttgaatgacctggatgccatgtgcaaatactgtgcaaaggtgatggacactcatcttgtaaatattcaagatgtgatattacaagaaaatttggaaaaagaagatcaaattctggtttccctggcaggattaaaacagatcaaagacattctaaaaggttccctgcgttttaaccagagccagctagaggccgaagagaacgaacagatcaccattgcggacaaccactactgctccagcggccagggccagggccgaggccaaggccagagcgttcaaatgtcaggggccattaaacaggcctcttcagaaacgccagggtgcactgatagagggaattccgatgacttcatcctgatttccaaagatgatgatgggagcagtgccaggggctccttctccggccaggcccagcctcttcgcaccctcagaagcacctctgggaaaagccaggccccagtctgctccccactggtgttctcagatccactgatgggcccagcctcagcttcctccagcaaccccagctccagtcctgatgacgacagcagcaaggactctggcttcaccattgtgagtcccctggacatctgaccacagtgcccagtcctgccccacagggatctagccacccttcagtggccccaaggccagactgaggctcatccagtggagaaccttcttaaaccactgcttccttcccggcatgcattttgcattggtccagccctttgaaaccccttagagagaagcatatatggccacaaagcacagaggcttaggtttgccacatgcagacagggctttctgggcccttacctaatccccacccgactcttgctctgagttagagctgagttacgtacccagtatcacactcacagttagaaaagaccgaatcacaatttagaatcacttttcctctgtccccttctccccagctaagaatgtgtggcacctccatcagttatacttagaaggagcagaaatagttattttc

SEQ ID NO: 189644 - DNA, 581 bp, Homo sapiens
  Payload ID: 17447
  Gene Symbol: TBC1D5
  Gene Name: TBC1 domain family, member 5
  ENST ID: ENST00000452492
  CDS Start-End: 163-285
tttcaggtcgggccgggcccggccgcttccgcgagcgccctgcagactgagggagagagagagaaagaggaggggaggaggaggaggattcagggaataggagctggggagcccttctgcgccacaggtagttacttttggtgacgctgtccagttcccacaatgtatcattccttatctgaaactagacatcctctgcagccagaagaacaagaagtaggcattgaccccttgtccagttactctaacaagtctggaggaaagaatgggaagaactatttgtaaacaacaattacttggcaacaataaggcagaaggggattaatgggcagctgagaagcagcaggttccgcagcatttgctggaagctatttctttgtgttcttcctcaagacaaaagtcaatggataagtagaattgaagaattaagagcatggtatagcaacattaaagaaatacatattaccaacccgaggaaggttgttggccaacaagatttgatgatcaataatcctctttcacaggatgaagggagtctttggaacaaattcttccaagataaagaacttcgatcaatgatt

SEQ ID NO: 189645 - DNA, 471 bp, Homo sapiens
  Payload ID: 17447
  Gene Symbol: TBC1D5
  Gene Name: TBC1 domain family, member 5
  ENST ID: ENST00000433533
  CDS Start-End: 382-471
tattagttatgattctgttttaggaggtgtaatgccataatttcatagttttactaagtaagtttgaatttacatttgatttcttctggaagtcttagcagggtcttttaaatgaactgcatttaaaagtaaaagaatctgttgtgcttggaagatttgacagtgatatcagtatcaagataaaagtttggaatgggagaaaaattctcaaagcctgaaagaaaatctgagatgcttggagtgtaaagatcccatggtcacataaatccggaaagcactgaatactttgtttcccataagagaatcccattatatgttgatgtattaaaagacctgagaacctggtgtagttacttttggtgacgctgtccagttcccacaatgtatcattccttatctgaaactagacatcctctgcagccagaagaacaagaagtaggcattgaccccttgtccagttactctaacaag

SEQ ID NO: 189646 - DNA, 623 bp, Homo sapiens
  Payload ID: 17447
  Gene Symbol: TBC1D5
  Gene Name: TBC1 domain family, member 5
  ENST ID: ENST00000445294
  CDS Start-End: 236-623
ctgttctctttcaggtcgggccgggcccggccgcttccgcgagcgccctgcagactgagggagagagagagaaagaggaggggaggaggaggaggattcagggaataggagctggggagcccttctgcgccacagtgatatcagtatcaagataaaagtttggaatgggagaaaaattctcaaagcctgaaagaaaatctgtagttacttttggtgacgctgtccagttcccacaatgtatcattccttatctgaaactagacatcctctgcagccagaagaacaagaagtaggcattgaccccttgtccagttactctaacaagtctggaggagattcaaataaaaatggaagaagaacaagttctactttagactctgaagggacttttaattcctataggaaagaatgggaagaactatttgtaaacaacaattacttggcaacaataaggcagaaggggattaatgggcagctgagaagcagcaggttccgcagcatttgctggaagctatttctttgtgttcttcctcaagacaaaagtcaatggataagtagaattgaagaattaagagcatggtatagcaacattaaagaaatacatattaccaacccgaggaagg

SEQ ID NO: 189647 - DNA, 492 bp, Homo sapiens
  Payload ID: 17447
  Gene Symbol: TBC1D5
  Gene Name: TBC1 domain family, member 5
  ENST ID: ENST00000430169
  CDS Start-End: 160-282
caggtcgggccgggcccggccgcttccgcgagcgccctgcagactgagggagagagagagaaagaggaggggaggaggaggaggattcagggaataggagctggggagcccttctgcgccacaggtagttacttttggtgacgctgtccagttcccacaatgtatcattccttatctgaaactagacatcctctgcagccagaagaacaagaagtaggcattgaccccttgtccagttactctaacaagtctggaggaaagaatgggaagaactatttgtaaacaacaattacttggcaacaataaggcagaaggggattaatgggcagctgagaagcagcaggttccgcagcatttgctggaagctatttctttgtgttcttcctcaagacaaaagtcaatggataagtagaattgaagaattaagagcatggtatagcaacattaaagaaatacatattaccaacccgaggaaggttgttggccaacaag

SEQ ID NO: 189648 - DNA, 2477 bp, Homo sapiens
  Payload ID: 17447
  Gene Symbol: TBC1D5
  Gene Name: TBC1 domain family, member 5
  ENST ID: ENST00000429924
  CDS Start-End: 172-1953
acatattcattaaatctacggaagaactgtgtccaaaaagacagccatgcgttcagaaacagtacacaactaaatatatatgttttaaaagttgcattttttagacttacttaaaattaatttcccgtagaacttctctccaagcagaggaattttaacaaaaggattctcatgctttggtttctttcatataggaaagaatgggaagaactatttgtaaacaacaattacttggcaacaataaggcagaaggggattaatgggcagctgagaagcagcaggttccgcagcatttgctggaagctatttctttgtgttcttcctcaagacaaaagtcaatggataagtagaattgaagaattaagagcatggtatagcaacattaaagaaatacatattaccaacccgaggaaggttgttggccaacaagatttgatgatcaataatcctctttcacaggatgaagggagtctttggaacaaattcttccaagataaagaacttcgatcaatgattgaacaagatgtcaaaagaacgtttcctgaaatgcagtttttccagcaagaaaatgtgagaaaaattcttacagatgttcttttctgttatgccagagaaaacgagcagttgctttataaacagggcatgcacgaactgttagcacctatagtctttgtccttcactgtgaccaccaagcttttctacatgccagtgagtctgcacagcccagtgaggaaatgaaaactgtcttgaaccctgagtatctggaacatgatgcctatgcagtgttctcacaacttatggaaactgctgaaccttggttttcaacttttgagcatgatggtcagaaggggaaagaaacactgatgactcccattccctttgctagaccacaagatttagggccaacaattgctattgttactaaagtcaaccagatccaggatcatctactgaagaagcatgatattgagctttacatgcacttgaacagactagaaattgcaccacagatatatgggttaaggtgggtgcggctgctatttggacgagagttccccctgcaggaccttctggtggtctgggatgccttgtttgcagacggcctcagcctgggtttagtagattatatcttcgtagccatgttactttacatccgagatgctttgatctctagtaactaccagacctgtctcggccttctgatgcattacccattcatcggggatgtacactcactgattcttaaggctctgttccttagagatccaaagagaaatccaagaccagtgacttatcaattccatccaaatttagattattacaaagcacgaggagcagacctcatgaataaaagccggaccaatgccaaaggtgctcccctgaatataaataaggtctctaatagcctgattaattttggaagaaagttgatttccccagcaatggctccaggcagtgcaggtggccctgtacctggaggcaacagcagtagctcctcctctgttgtaattcctaccaggacctcagcagaggccccaagccatcacttgcaacagcaacagcagcagcagaggctgatgaaatcagaaagcatgcctgtgcaattgaacaaaggcgatgtagttacaggaagcgatgctcaggtttctgttcctgtccagactctaactgacctccaagggctaagttctaaaaacatcagttcatctccaagcgttgagagtttgcctggaggaagagaattcactggctctccaccttcatctgctactaaaaaagattccttttttagcaacatctcacgttctcgctcacacagcaaaactatgggcagaaaagaatctgaagaagaattagaagcccaaatttccttccttcaagggcagttgaatgacctggatgccatgtgcaaatactgtgcaaaggtgatggacactcatcttggtaagtgaattactttggccctgggaacgatgagactcatcacaataatagccactagcaatactttgttctaggccttgtgctaagctgtttacatgaattaccttatttaatccttacaacagctatataatagaagtactcttactctcactctctacattatatagatgaagaaaccaaggcatagagggattaagaaaatgccccaagattatatcattagtaaatcgagtggaaattcaaaatcaagcaatccgattataagctggatgccgtggctcacagctgtaatcccagcactgtggaaagccaaggtgggaagatttgaggccaggaatttgagaccagcctgagcaacatactgagaccctgtctctaccaacacaaaacaacaaatttttttttttttaattagctgggcatggtggcacgtgcctgtagtcccagctgcccaagaggctgagatggaaatattgcttaaacccaggggtttgaggttgcagcaagttgtgattgtgccactatattc

SEQ ID NO: 189649 - DNA, 386 bp, Homo sapiens
  Payload ID: 17447
  Gene Symbol: TBC1D5
  Gene Name: TBC1 domain family, member 5
  ENST ID: ENST00000434420
  CDS Start-End: 165-386
cagtgatatcagtatcaagataaaagtttggaatgggagaaaaattctcaaagcctgaaagaaaatctccccctgctgctgttgattacacctagatctgctactgattggaactgttaaaaggcaaaggtagttacttttggtgacgctgtccagttcccacaatgtatcattccttatctgaaactagacatcctctgcagccagaagaacaagaagtaggcattgaccccttgtccagttactctaacaagtctggaggagattcaaataaaaatggaagaagaacaagttctactttagactctgaagggacttttaattcctataggaaagaatgggaagaactatttgtaaacaacaattacttggcaacaataaggcag

SEQ ID NO: 189650 - DNA, 592 bp, Homo sapiens
  Payload ID: 17447
  Gene Symbol: TBC1D5
  Gene Name: TBC1 domain family, member 5
  ENST ID: ENST00000412981
  CDS Start-End: 222-344
gtcgggccgggcccggccgcttccgcgagcgccctgcagactgagggagagagagagaaagaggaggggaggaggaggaggattcagggaataggagctggggagcccttctgcgccacagtgatatcagtatcaagataaaagtttggaatgggagaaaaattctcaaagcctgaaagaaaatctgtagttacttttggtgacgctgtccagttcccacaatgtatcattccttatctgaaactagacatcctctgcagccagaagaacaagaagtaggcattgaccccttgtccagttactctaacaagtctggaggaaagaatgggaagaactatttgtaaacaacaattacttggcaacaataaggcagaaggggattaatgggcagctgagaagcagcaggttccgcagcatttgctggaagctatttctttgtgttcttcctcaagacaaaagtcaatggataagtagaattgaagaattaagagcatggtatagcaacattaaagaaatacatattaccaacccgaggaaggttgttggccaacaagatttgatgatcaataatcctctttcacaggatgaaggg

SEQ ID NO: 189651 - DNA, 557 bp, Homo sapiens
  Payload ID: 17447
  Gene Symbol: TBC1D5
  Gene Name: TBC1 domain family, member 5
  ENST ID: ENST00000446863
  CDS Start-End: 320-557
gagcgccctgcagactgagggagagagagagaaagaggaggggaggaggaggaggattcagggaataggagctggggagcccttctgcgccacagtgatatcagtatcaagataaaagtttggaatgggagaaaaattctcaaagcctgaaagaaaatctagatggggtctcactctgtcatccaggctggaatatagtggcacaatcatagcccattgtagcctccatctcaaggactcaggggatcctcccttctaggcctcccaagtagctgggattacaggtagttacttttggtgacgctgtccagttcccacaatgtatcattccttatctgaaactagacatcctctgcagccagaagaacaagaagtaggcattgaccccttgtccagttactctaacaagtctggaggagattcaaataaaaatggaagaagaacaagttctactttagactctgaagggacttttaattcctataggaaagaatgggaagaactatttgtaaacaacaattacttggcaacaataaggcagaaggggattaatgggc

SEQ ID NO: 189652 - DNA, 578 bp, Homo sapiens
  Payload ID: 17447
  Gene Symbol: TBC1D5
  Gene Name: TBC1 domain family, member 5
  ENST ID: ENST00000507877
  CDS Start-End: 315-578
taagtggacaaggaaggagcttctaacagacttgtgtttggagaactctattgtactgagcctaagtcatttttgatctataacaagaacatgcattttcacatgtcaaccggatttgtggaccagtaaagttctcccacaagaaatcttctatgatattgtctcagggaccacctgcagcaggagcccacaaattgaataaatgcaacataaggagaggattttttttttctgttgttgcttgtttcaaaaatgctactatccagattctctattaaggtagttacttttggtgacgctgtccagttcccacaatgtatcattccttatctgaaactagacatcctctgcagccagaagaacaagaagtaggcattgaccccttgtccagttactctaacaagtctggaggagattcaaataaaaatggaagaagaacaagttctactttagactctgaagggacttttaattcctataggaaagaatgggaagaactatttgtaaacaacaattacttggcaacaataaggcagaaggggattaatgggcagctgagaagcagcaggttccgcagc

SEQ ID NO: 189653 - DNA, 1027 bp, Homo sapiens
  Payload ID: 17448
  Gene Symbol: TBC1D7
  Gene Name: TBC1 domain family, member 7
  Uniprot ID: Q9P0N9
  ENST ID: ENST00000343141
  CDS Start-End: 137-880
gcatgcgcccgcccggcgcccgcccggcgacctggagttgatgtcacgtccggcggcggcggcagcggcagcggcagcggcgctgagttttgtctcccgggccgtctgggcgcgcgcgggtgtcccagaatgaaatatgactgaggactctcagagaaactttcgttcagtatattatgagaaagtggggtttcgtggagttgaagaaaagaaatcattagaaattctcctaaaagatgaccgtctggatactgagaaactttgtacttttagtcagaggttccctctcccgtccatgtaccgtgcattggtatggaaggtgcttctaggaatcttgcctccacaccacgagtcccatgccaaggtgatgatgtatcgtaaggagcagtacttggatgtccttcatgccctgaaagtcgttcgctttgttagtgatgccacacctcaggctgaagtctatctccgcatgtatcagctggagtctgggaagttacctcgaagtccctcttttccactgccaaaagcgtttgaacaatacttgaatctggaagatggcagactgctgactcatctgaggatgtgttccgcggcgcccaaacttccttatgatctctggttcaagaggtgctttgcgggatgtttgcctgaatccagtttacagagggtttgggataaagttgtgagtggatcctgtaagatcctagtttttgtagctgtcgaaattttattaacctttaaaataaaagttatggcactgaacagtgcagagaagataacaaagtttctggaaaatattccccaggacagctcagacgcgatcgtgagcaaggccattgacttgtggcacaaacactgtgggaccccggtccattcaagctgaacgcacccgctggttgtggaccgtctgccaggcaccacagtgagcattgtgttcttggcatgtgatctgggaaactgattgaataatacacttttcttgctttggtgctcaaagtggtttttttcccccaataaaattatttaattg

SEQ ID NO: 189654 - DNA, 1116 bp, Homo sapiens
  Payload ID: 17448
  Gene Symbol: TBC1D7
  Gene Name: TBC1 domain family, member 7
  Uniprot ID: Q9P0N9
  ENST ID: ENST00000356436
  CDS Start-End: 85-966
gcggcggcggcagcggcagcggcagcggcgctgagttttgtctcccgggccgtctgggcgcgcgcgggtgtcccagaatgaaatatgactgaggactctcagagaaactttcgttcagtatattatgagaaagtggggtttcgtggagttgaagaaaagaaatcattagaaattctcctaaaagatgaccgtctggatactgagaaactttgtacttttagtcagaggttccctctcccgtccatgtaccgtgcattggtatggaaggtgcttctaggaatcttgcctccacaccacgagtcccatgccaaggtgatgatgtatcgtaaggagcagtacttggatgtccttcatgccctgaaagtcgttcgctttgttagtgatgccacacctcaggctgaagtctatctccgcatgtatcagctggagtctgggaagttacctcgaagtccctcttttccactggagccagatgatgaagtgtttcttgccatagctaaagccatggaggaaatggtggaagatagtgtcgactgttactggatcacccgacgctttgtgaaccaattaaataccaagtaccgggattccttgccccagttgccaaaagcgtttgaacaatacttgaatctggaagatggcagactgctgactcatctgaggatgtgttccgcggcgcccaaacttccttatgatctctggttcaagaggtgctttgcgggatgtttgcctgaatccagtttacagagggtttgggataaagttgtgagtggatcctgtaagatcctagtttttgtagctgtcgaaattttattaacctttaaaataaaagttatggcactgaacagtgcagagaagataacaaagtttctggaaaatattccccaggacagctcagacgcgatcgtgagcaaggccattgacttgtggcacaaacactgtgggaccccggtccattcaagctgaacgcacccgctggttgtggaccgtctgccaggcaccacagtgagcattgtgttcttggcatgtgatctgggaaactgattgaataatacacttttcttgctttggtgctcaaagtggtttttttcccccaataaaattatttaattgaaa

SEQ ID NO: 189655 - DNA, 693 bp, Homo sapiens
  Payload ID: 17448
  Gene Symbol: TBC1D7
  Gene Name: TBC1 domain family, member 7
  ENST ID: ENST00000379291
  CDS Start-End: 302-693
gcggcggcggcagcggcagcggcagcggcgctgagttttgtctcccgggccgtctgggcgcgcgcgggtgtcccaggtaccccgccgcctccctccttcccgcaggactcgtccctcctggccctgggccccaacggtgcccgcctgcccggcggtcggtcagcgcacagggcacggcttcctctgcttctcccggaccacttagtctcaacccgggtgtgtttgcactactagagactcacttttccccttcgtctttctctccctttctgtctttctgtgtctcctccaagaatgaaatatgactgaggactctcagagaaactttcgttcagtatattatgagaaagtggggtttcgtggagttgaagaaaagaaatcattagaaattctcctaaaagatgaccgtctggatactgagaaactttgtacttttagtcagaggttccctctcccgtccatgtaccgtgcattggtatggaaggtgcttctaggaatcttgcctccacaccacgagtcccatgccaaggtgatgatgtatcgtaaggagcagtacttggatgtccttcatgccctgaaagtcgttcgctttgttagtgatgccacacctcaggctgaagtctatctccgcatgtatcagctggagtctgggaagttacctcgaagtccctcttttccactggagccagatga

SEQ ID NO: 189656 - DNA, 1276 bp, Homo sapiens
  Payload ID: 17448
  Gene Symbol: TBC1D7
  Gene Name: TBC1 domain family, member 7
  Uniprot ID: Q9P0N9
  ENST ID: ENST00000379300
  CDS Start-End: 245-1126
gcggcggcggcagcggcagcggcagcggcgctgagttttgtctcccgggccgtctgggcgcgcgcgggtgtcccaggtaccccgccgcctccctccttcccgcaggactcgtccctcctggccctgggccccaacggtgcccgcctgcccggcggtcggtcagcgcacagggcacggcttcctctgcttctcccggaccacttagtctcaacccgggtgtgtttgcactactagagaatgaaatatgactgaggactctcagagaaactttcgttcagtatattatgagaaagtggggtttcgtggagttgaagaaaagaaatcattagaaattctcctaaaagatgaccgtctggatactgagaaactttgtacttttagtcagaggttccctctcccgtccatgtaccgtgcattggtatggaaggtgcttctaggaatcttgcctccacaccacgagtcccatgccaaggtgatgatgtatcgtaaggagcagtacttggatgtccttcatgccctgaaagtcgttcgctttgttagtgatgccacacctcaggctgaagtctatctccgcatgtatcagctggagtctgggaagttacctcgaagtccctcttttccactggagccagatgatgaagtgtttcttgccatagctaaagccatggaggaaatggtggaagatagtgtcgactgttactggatcacccgacgctttgtgaaccaattaaataccaagtaccgggattccttgccccagttgccaaaagcgtttgaacaatacttgaatctggaagatggcagactgctgactcatctgaggatgtgttccgcggcgcccaaacttccttatgatctctggttcaagaggtgctttgcgggatgtttgcctgaatccagtttacagagggtttgggataaagttgtgagtggatcctgtaagatcctagtttttgtagctgtcgaaattttattaacctttaaaataaaagttatggcactgaacagtgcagagaagataacaaagtttctggaaaatattccccaggacagctcagacgcgatcgtgagcaaggccattgacttgtggcacaaacactgtgggaccccggtccattcaagctgaacgcacccgctggttgtggaccgtctgccaggcaccacagtgagcattgtgttcttggcatgtgatctgggaaactgattgaataatacacttttcttgctttggtgctcaaagtggtttttttcccccaataaaattatttaattgaaa

SEQ ID NO: 189657 - DNA, 1084 bp, Homo sapiens
  Payload ID: 17448
  Gene Symbol: TBC1D7
  Gene Name: TBC1 domain family, member 7
  Uniprot ID: Q9P0N9
  ENST ID: ENST00000379307
  CDS Start-End: 137-937
gcatgcgcccgcccggcgcccgcccggcgacctggagttgatgtcacgtccggcggcggcggcagcggcagcggcagcggcgctgagttttgtctcccgggccgtctgggcgcgcgcgggtgtcccagaatgaaatatgactgaggactctcagagaaactttcgttcagtatattatgagaaagtggggtttcgtggagttgaagaaaagaaatcattagaaattctcctaaaagatgaccgtctgggaatcttgcctccacaccacgagtcccatgccaaggtgatgatgtatcgtaaggagcagtacttggatgtccttcatgccctgaaagtcgttcgctttgttagtgatgccacacctcaggctgaagtctatctccgcatgtatcagctggagtctgggaagttacctcgaagtccctcttttccactggagccagatgatgaagtgtttcttgccatagctaaagccatggaggaaatggtggaagatagtgtcgactgttactggatcacccgacgctttgtgaaccaattaaataccaagtaccgggattccttgccccagttgccaaaagcgtttgaacaatacttgaatctggaagatggcagactgctgactcatctgaggatgtgttccgcggcgcccaaacttccttatgatctctggttcaagaggtgctttgcgggatgtttgcctgaatccagtttacagagggtttgggataaagttgtgagtggatcctgtaagatcctagtttttgtagctgtcgaaattttattaacctttaaaataaaagttatggcactgaacagtgcagagaagataacaaagtttctggaaaatattccccaggacagctcagacgcgatcgtgagcaaggccattgacttgtggcacaaacactgtgggaccccggtccattcaagctgaacgcacccgctggttgtggaccgtctgccaggcaccacagtgagcattgtgttcttggcatgtgatctgggaaactgattgaataatacacttttcttgctttggtgctcaaagtggtttttttcccccaataaaattatttaattg

SEQ ID NO: 189658 - DNA, 972 bp, Homo sapiens
  Payload ID: 17448
  Gene Symbol: TBC1D7
  Gene Name: TBC1 domain family, member 7
  ENST ID: ENST00000422136
  CDS Start-End: 225-972
gcggcggcggcagcggcagcggcagcggcgctgagttttgtctcccgggccgtctgggcgcgcgcgggtgtcccaggtaccccgccgcctccctccttcccgcaggactcgtccctcctggccctgggccccaacggtgcccgcctgcccggcggtcggtcagcgcacagggcacggcttcctctgcttctcccggaccacttagtctcaacccggaatgaaatatgactgaggactctcagagaaactttcgttcagtatattatgagaaagtggggtttcgtggagttgaagaaaagaaatcattagaaattctcctaaaagatgaccgtctggatactgagaaactttgtacttttagtcagaggttccctctcccgtccatgtaccgtgcattggtatggaaggtgcttctaggaatcttgcctccacaccacgagtcccatgccaaggtgatgatgtatcgtaaggagcagtacttggatgtccttcatgccctgaaagtcgttcgctttgttagtgatgccacacctcaggctgaagtctatctccgcatgtatcagctggagtctgggaagttacctcgaagtccctcttttccactggagccagatgatgaagtgtttcttgccatagctaaagccatggaggaaatggtggaagatagtgtcgactgttactggatcacccgacgctttgtgaaccaattaaataccaagtaccgggattccttgccccagttgccaaaagcgtttgaacaatacttgaatctggaagatggcagactgctgactcatctgaggatgtgttccgcggcgcccaaacttccttatgatctctggttcaagaggtgctttgcgggatgtttgcctgaatccagtttacagagggtttgggataaagttgtgagtggatcctgtaagatcctagtttttgtagctgtcgaaattttattaacctttaaaataaaag

SEQ ID NO: 189659 - DNA, 714 bp, Homo sapiens
  Payload ID: 17448
  Gene Symbol: TBC1D7
  Gene Name: TBC1 domain family, member 7
  ENST ID: ENST00000416436
  CDS Start-End: 307-714
caacagggaccgaccaaatcgtcatgcagctgtttggatgctttaaaaaaataaatccccacactcattacgcgttttatgctgctgacttttttatttttaagacatctgctcccgaaagctcagagccctttagcatttcattttctaaacgaatcctaatctttcctgtgactgaatcggttcagaggatatcttttcaataaggaaggaagccctcccctgctcactggggacgtcgcagggtttttaaacctaaagatttactcttttgtgcacagacgctggaagcatttggaatgaaatatgactgaggactctcagagaaactttcgttcagtatattatgagaaagtggggtttcgtggagttgaagaaaagaaatcattagaaattctcctaaaagatgaccgtctggatactgagaaactttgtacttttagtcagaggttccctctcccgtccatgtaccgtgcattggtatggaaggtgcttctaggaatcttgcctccacaccacgagtcccatgccaaggtgatgatgtatcgtaaggagcagtacttggatgtccttcatgccctgaaagtcgttcgctttgttagtgatgccacacctcaggctgaagtctatctccgcatgtatcagctggagtctgggaagttacctcgaagtccctcttttccactggagccagatgatgaagtgtttcttgcc

SEQ ID NO: 189660 - DNA, 1544 bp, Homo sapiens
  Payload ID: 17448
  Gene Symbol: TBC1D7
  Gene Name: TBC1 domain family, member 7
  ENST ID: ENST00000421203
  CDS Start-End: 98-637
gatgtcacgtccggcggcggcggcagcggcagcggcagcggcgctgagttttgtctcccgggccgtctgggcgcgcgcgggtgtcccagaatgaaatatgactgaggactctcagagaaactttcgttcagtatattatgagaaagtggggtttcgtggagttgaagaaaagaaatcattagaaattctcctaaaagatgaccgtctggatactgagaaactttgtacttttagtcagaggttccctctcccgtccatgtaccgtgcattggtatggaaggtgcttctaggaatcttgcctccacaccacgagtcccatgccaaggtgatgatgtatcgtaaggagcagtacttggatgtccttcatgccctgaaagtcgttcgctttgttagtgatgccacacctcaggctgaagtctatctccgcatgtatcagctggagtctgggaagttacctcgaagtccctcttttccactggagccagatgatgaagtgtttcttgccatagctaaagccatggaggaaatggtggaagatagtgtcgactgttactggatcacccgacgctttgtgaaccaattaaataccaagtaccgggattccttgccccagttggaaggcataaatgttggctgactgtcaaatgcttgtgggaggtccccacggagtggagaagcgggagactcagcttaatcacagacaaagttgtgcatgagagacggagtctcactctgttgcccaggctggagttcaatggtgcaatgatctcggctcactgcaacctccgcctcttgggtgcaagtaactctcctgcctcagcctcccgagtagctgggattacaggtcccttcagagccgtgaaggcgggcatcctgtgacacagctgacacagcatggagccttcatctcctatgtgcgtttcttaggtcactctgaggggtggggccacaagctaccacctacagaattgatacctttagttcaaagccattgaccaacccaggttcatgaattttcaggcagaaggtaccaagacaaccccattaggcaactaggaagacaggccaggaaaggcctacgatgtcgtcattacagctgccaccgtcagagggttcattatgtgctcagaggtgcacagggcctcactggctgctggacagaacaggggctgctcccaggaccaggcagggtggggctggaaaccaacccaaggctctcaaagctccagggctgagccatggcatctctgtgccctgttccccaccacccaacaccgagcagttcctcaaatggctgaaagctcagaaaatcagttttaaaacaaactattggaggatgttttcttataccactagacattttttttgtttaacaatcgcaatagattaaatttaaaaaaatatttaggagaacatagttccagaatacagggaaaaataagaacctatgggaaaacaagttgatttctgaaaagtttcaaaactatgaaatgaccaacctgttagaattggtcaagtagttctttaatttgcaactatgtggc

SEQ ID NO: 189661 - DNA, 958 bp, Homo sapiens
  Payload ID: 17448
  Gene Symbol: TBC1D7
  Gene Name: TBC1 domain family, member 7
  ENST ID: ENST00000450347
  CDS Start-End: 245-958
gcggcggcggcagcggcagcggcagcggcgctgagttttgtctcccgggccgtctgggcgcgcgcgggtgtcccaggtaccccgccgcctccctccttcccgcaggactcgtccctcctggccctgggccccaacggtgcccgcctgcccggcggtcggtcagcgcacagggcacggcttcctctgcttctcccggaccacttagtctcaacccgggtgtgtttgcactactagagaatgaaatatgactgaggactctcagagaaactttcgttcagtatattatgagaaagtggggtttcgtggagttgaagaaaagaaatcattagaaattctcctaaaagatgaccgtctgggaatcttgcctccacaccacgagtcccatgccaaggtgatgatgtatcgtaaggagcagtacttggatgtccttcatgccctgaaagtcgttcgctttgttagtgatgccacacctcaggctgaagtctatctccgcatgtatcagctggagtctgggaagttacctcgaagtccctcttttccactggagccagatgatgaagtgtttcttgccatagctaaagccatggaggaaatggtggaagatagtgtcgactgttactggatcacccgacgctttgtgaaccaattaaataccaagtaccgggattccttgccccagttgccaaaagcgtttgaacaatacttgaatctggaagatggcagactgctgactcatctgaggatgtgttccgcggcgcccaaacttccttatgatctctggttcaagaggtgctttgcgggatgtttgcctgaatccagtttacagagggtttgggataaagttgtgagtggatcctgtaagatcctagtttttgtagctgtcgaaattttattaacctttaaaataaaagttatggcactgaacagtgcagagaagataacaaagtttctggaaaat

SEQ ID NO: 189662 - DNA, 790 bp, Homo sapiens
  Payload ID: 17448
  Gene Symbol: TBC1D7
  Gene Name: TBC1 domain family, member 7
  ENST ID: ENST00000420456
  CDS Start-End: 207-790
tgctttttgggaaatgcatcagatcttttctgttcttgaaacgccaaatctaacttggtctttttttggatgaattaccgccagtattatgaaggttactgtgaaggaacttgagaccactgaactttttgagttcttgcgactcacttttccccttcgtctttctctccctttctgtctttctgtgtctcctccaagaatgaaatatgactgaggactctcagagaaactttcgttcagtatattatgagaaagtggggtttcgtggagttgaagaaaagaaatcattagaaattctcctaaaagatgaccgtctgggaatcttgcctccacaccacgagtcccatgccaaggtgatgatgtatcgtaaggagcagtacttggatgtccttcatgccctgaaagtcgttcgctttgttagtgatgccacacctcaggctgaagtctatctccgcatgtatcagctggagtctgggaagttacctcgaagtccctcttttccactggagccagatgatgaagtgtttcttgccatagctaaagccatggaggaaatggtggaagatagtgtcgactgttactggatcacccgacgctttgtgaaccaattaaataccaagtaccgggattccttgccccagttgccaaaagcgtttgaacaatacttgaatctggaagatggcagactgctgactcatctgaggatgtgttccgcggcgcccaaacttccttatgatctctggttcaagaggtgctttgcgggatgtttgcctgaatccagtttacagag

SEQ ID NO: 189663 - DNA, 832 bp, Homo sapiens
  Payload ID: 17448
  Gene Symbol: TBC1D7
  Gene Name: TBC1 domain family, member 7
  ENST ID: ENST00000428109
  CDS Start-End: 364-832
caacagggaccgaccaaatcgtcatgcagctgtttggatgctttaaaaaaataaatccccacactcattacgcgttttatgctgctgacttttttatttttaagacatctgctcccgaaagctcagagccctttagcatttcattttctaaacgaatcctaatctttcctgtgactgaatcggttcagaggatatcttttcaataaggaaggaagccctcccctgctcactggggacgtcgcagggtttttaaacctaaagatttactcttttgtgcacagacgctggaagcatttggactcacttttccccttcgtctttctctccctttctgtctttctgtgtctcctccaagaatgaaatatgactgaggactctcagagaaactttcgttcagtatattatgagaaagtggggtttcgtggagttgaagaaaagaaatcattagaaattctcctaaaagatgaccgtctggatactgagaaactttgtacttttagtcagaggttccctctcccgtccatgtaccgtgcattggtatggaaggtgcttctaggaatcttgcctccacaccacgagtcccatgccaaggtgatgatgtatcgtaaggagcagtacttggatgtccttcatgccctgaaagtcgttcgctttgttagtgatgccacacctcaggctgaagtctatctccgcatgtatcagctggagtctgggaagttacctcgaagtccctcttttccactggagccagatgatgaagtgtttcttgccatagctaaagccatggaggaaatggtggaagatagtgtcgactgttactggatcacccgac

SEQ ID NO: 189664 - DNA, 938 bp, Homo sapiens
  Payload ID: 17448
  Gene Symbol: TBC1D7
  Gene Name: TBC1 domain family, member 7
  ENST ID: ENST00000452989
  CDS Start-End: 225-938
gcggcggcggcagcggcagcggcagcggcgctgagttttgtctcccgggccgtctgggcgcgcgcgggtgtcccaggtaccccgccgcctccctccttcccgcaggactcgtccctcctggccctgggccccaacggtgcccgcctgcccggcggtcggtcagcgcacagggcacggcttcctctgcttctcccggaccacttagtctcaacccggaatgaaatatgactgaggactctcagagaaactttcgttcagtatattatgagaaagtggggtttcgtggagttgaagaaaagaaatcattagaaattctcctaaaagatgaccgtctgggaatcttgcctccacaccacgagtcccatgccaaggtgatgatgtatcgtaaggagcagtacttggatgtccttcatgccctgaaagtcgttcgctttgttagtgatgccacacctcaggctgaagtctatctccgcatgtatcagctggagtctgggaagttacctcgaagtccctcttttccactggagccagatgatgaagtgtttcttgccatagctaaagccatggaggaaatggtggaagatagtgtcgactgttactggatcacccgacgctttgtgaaccaattaaataccaagtaccgggattccttgccccagttgccaaaagcgtttgaacaatacttgaatctggaagatggcagactgctgactcatctgaggatgtgttccgcggcgcccaaacttccttatgatctctggttcaagaggtgctttgcgggatgtttgcctgaatccagtttacagagggtttgggataaagttgtgagtggatcctgtaagatcctagtttttgtagctgtcgaaattttattaacctttaaaataaaagttatggcactgaacagtgcagagaagataacaaagtttctggaaaat

SEQ ID NO: 189665 - DNA, 762 bp, Homo sapiens
  Payload ID: 17448
  Gene Symbol: TBC1D7
  Gene Name: TBC1 domain family, member 7
  ENST ID: ENST00000446018
  CDS Start-End: 142-762
gcggcggcggcagcggcagcggcagcggcgctgagttttgtctcccgggccgtctgggcgcgcgcgggtgtcccagactcacttttccccttcgtctttctctccctttctgtctttctgtgtctcctccaagaatgaaatatgactgaggactctcagagaaactttcgttcagtatattatgagaaagtggggtttcgtggagttgaagaaaagaaatcattagaaattctcctaaaagatgaccgtctgggaatcttgcctccacaccacgagtcccatgccaaggtgatgatgtatcgtaaggagcagtacttggatgtccttcatgccctgaaagtcgttcgctttgttagtgatgccacacctcaggctgaagtctatctccgcatgtatcagctggagtctgggaagttacctcgaagtccctcttttccactggagccagatgatgaagtgtttcttgccatagctaaagccatggaggaaatggtggaagatagtgtcgactgttactggatcacccgacgctttgtgaaccaattaaataccaagtaccgggattccttgccccagttgccaaaagcgtttgaacaatacttgaatctggaagatggcagactgctgactcatctgaggatgtgttccgcggcgcccaaacttccttatgatctctggttcaagaggtgctttgcgggatgtttgcctgaatccagtttacagagggtttgggataaagttgtgagtggatcctgtaagatc

SEQ ID NO: 189666 - DNA, 1649 bp, Homo sapiens
  Payload ID: 17448
  Gene Symbol: TBC1D7
  Gene Name: TBC1 domain family, member 7
  ENST ID: ENST00000607658
  CDS Start-End: 152-751
caggtaccccgccgcctccctccttcccgcaggactcgtccctcctggccctgggccccaacggtgcccgcctgcccggcggtcggtcagcgcacagggcacggcttcctctgcttctcccggaccacttagtctcaacccggaatgaaatatgactgaggactctcagagaaactttcgttcagtatattatgagaaagtggggtttcgtggagttgaagaaaagaaatcattagaaattctcctaaaagatgaccgtctgggaatcttgcctccacaccacgagtcccatgccaaggtgatgatgtatcgtaaggagcagtacttggatgtccttcatgccctgaaagtcgttcgctttgttagtgatgccacacctcaggctgaagtctatctccgcatgtatcagctggagtctgggaagttacctcgaagtccctcttttccactggagccagatgatgaagtgtttcttgccatagctaaagccatggaggaaatggtggaagatagtgtcgactgttactggatcacccgacgctttgtgaaccaattaaataccaagtaccgggattccttgccccagttgccaaaagcgtttgaacaatacttgaatctggaagatggcagactgctgactcatctgaggatgtgttccgcggcgcccaaacttccttatgatctctggttcaagaggtgctttgcgggatgtttgcctgaatccagtttacagaggcaaggtttgggataaagttgtgagtggatcctgtaagatcctagtttttgtagctgtcgaaattttattaacctttaaaataaaagttatggcactgaacagtgcagagaagataacaaagtttctggaaaatgtaagtgtgctttgatttgattttgaatctggaaatgaagttaccttagcaagtcagattttcctgttacattagattatttcagagaaataattacatgattttagagaaataataccttagaatgtttcagagaataattataataatgattattttagggaaattatttaagagaaataataatttgatttgattttgaatctagaaatgaagtcactttagcaagtgagattttcctgttacattagattatttcagagaaatcatacagtgtatttttacattataagaaacacttttccctgaaaaagtttggcctaaagttggcctgagggttagtttgcatcctgtctttgggaaatgatggtctgagaccatctcgtgaatgtgtccacttagaaccagagtctcatcctccatgtgactatcagcaggcatgtcaggaaaaggaataggtgggatctgtcattttacaatgagtaatttttgtcagttcaaaaggggttctgtattttggaggattttgtaagccatttcatttctgttactgtctctggtgtagtcccagttgggtttattaatatacagtattaacctagtatattgctgaaaaaggcaatggtaatgaaattaacttttccctcgctatgtatcttggaataccctttaccaggcaagaagtaggattaaagagacttatgcctgaatgattttcacagaatccaaaatctattcatttttaaaatagtattaacatttgaaaaatggcctggtaaa

SEQ ID NO: 189667 - DNA, 2598 bp, Homo sapiens
  Payload ID: 17448
  Gene Symbol: TBC1D7
  Gene Name: TBC1 domain family, member 7
  ENST ID: ENST00000606370
  CDS Start-End: 109-603
gacctggagttgatgtcacgtccggcggcggcggcagcggcagcggcagcggcgctgagttttgtctcccgggccgtctgggcgcgcgcgggtgtcccagaatgaaatatgactgaggactctcagagaaactttcgttcagtatattatgagaaagtggggtttcgtggagttgaagaaaagaaatcattagaaattctcctaaaagatgaccgtctgggaatcttgcctccacaccacgagtcccatgccaaggtgatgatgtatcgtaaggagcagtacttggatgtccttcatgccctgaaagtcgttcgctttgttagtgatgccacacctcaggctgaagtctatctccgcatgtatcagctggagtctgggaagttacctcgaagtccctcttttccactggttagtggtcacttttgtctgacactaagctcaactctagaccgtcccatcttgccggcctttgattacatcatgttttgccttaaaaacttttggtggctccctgttgttattagaataaaagtgacacatctttacttggcattcatggccatgcacattctgacccaaccttcttactttttgtttttttaaaatacgttttattttgaagtaatttcaaacttccagaaaagttgcaagaatactaccaagaatttgcatataccctttacccagattctccagttgttaacattatgcaacttttttctacatccaacattatttaaaaagttaaaaaataaaaaattgtaggtgctaagtagctttaagcatctgttttgctttgtgtgcatctgttttgctttgttgttttaaaacgtatttttttaaacacattttttttttcctaaatcatttgagagtaagatgcagacaggattccctattacctcagattccttcagtgtacacttcctaaagacaggacacccctgtagatagccatagtacagtcctcaaaactaagacattaacattgatacaatattaacgtaatctaccagctccatttgaatttcaccaataatgccttcacaaataatcaaacggtcaaagttctgggtgaggactggatcctggtttaggcattgcactgggttatcatattgctttagtctcctttgacttgggacagttctgtctttttttatctttcatgcctttgacatttttgaagggcataatcagatgctttgaagaaagcccctccctttaggtttgtctggtgtttcctcctgattagattcaggttattcatttttggcagggataccaagtaggtgatgctgtgtccttctcagtgtctcttatcaggaggcacatagtgtgaatttgccccataagaggtagtgttaacttggatcacttggcgagggtgctgcctgctggagttttccgctggaaagtttttacttttccctttgtaattgctatttctctttgtggggagacactttaaaactgctatgtaaacatcctattccttattaaacttttgctcatgagtattctcatttgacgatttctaaaaaatttttattttttaactttttaaataatgttggatgtagaaaaaagttgcaaaaatagtgcagtgttctgaaataccttcacccagtgtcctcaaatgttacatctcatacaaccgtaatgtaatgatcaaaaccggagaatcacaatactgacagctactctgtaggcctcactgggattttgctgatgtcccactgatgctcttcttctgatccaagatccagttccggatcacacattacatttagctgccacgtcttagtctttaatctggaagagttctttttttttttttttttttcttttttttgagacagagtttttctctttttgaccaggctggagtgcagtggtgcgatcttggctcaacgcaacttctgcctcctgggttcaagcaattcttgtgcctcagcctccagagtagctgggattacaggtgcgcaccaccactcccggctaatttttgtatttttagtaaagatgggatttctccatgttggtcaggctggttttgaactcccgacctcaggtgattcacctgccttggcctcccaaagtgctgtgattactggcgtgagccactgtgcctggcctggaacagttcttcagtctttgtctttcatgaccttgacacttttgaagagccctggccagtagagcatttctcaatttgggtctgtctcatgtttctccatgattaaactctggtcacgcattattggcaggaatatcacagaagtatgggactcattactgtgctgctaactttgatcacttgggtaagatggtgtctgtggagtttctccactgtaaggttactattttcctctttgtaattaataaataactgtggagaagtactttgagacttgtaagtagccatccactaatgattcttgcctgaaccaatttttactatgctgattgccaaatggtgatctaactccttcattctttctgcatgtattagttggcattcttctctaaggaagagttttcccttctccttctttatttatatcagtatgaaattaaagtgttatttgtttggct

SEQ ID NO: 189668 - DNA, 569 bp, Homo sapiens
  Payload ID: 17448
  Gene Symbol: TBC1D7
  Gene Name: TBC1 domain family, member 7
  ENST ID: ENST00000606530
  CDS Start-End: 509-569
acttagtctcaacccgggtgtgtttgcactactagaggtgaagcatccatcatagagagaatgggacctggggtcttggaccagggtgtttttacttttcccatcaggtggacgcgcatgggcaggagatattatttgcagcatttcctcctagaggacgcctttgtcattgtagtgcaatctaagaatgggtgtccttagacaacagggaccgaccaaatcgtcatgcagctgtttggatgctttaaaaaaataaatccccacactcattacgcgttttatgctgctgacttttttatttttaagacatctgctcccgaaagctcagagccctttagcatttcattttctaaacgaatcctaatctttcctgtgactgaatcggttcagaggatatcttttcaataaggaaggaagccctcccctgctcactggggacgtcgcagggtttttaaacctaaagatttactcttttgtgcacagacgctggaagcatttggaatgaaatatgactgaggactctcagagaaactttcgttcagtatattatgagaaagtggggtttcgtg

SEQ ID NO: 189669 - DNA, 2229 bp, Homo sapiens
  Payload ID: 17448
  Gene Symbol: TBC1D7
  Gene Name: TBC1 domain family, member 7
  Uniprot ID: Q9P0N9
  ENST ID: ENST00000606214
  CDS Start-End: 15-896
tccaagaatgaaatatgactgaggactctcagagaaactttcgttcagtatattatgagaaagtggggtttcgtggagttgaagaaaagaaatcattagaaattctcctaaaagatgaccgtctggatactgagaaactttgtacttttagtcagaggttccctctcccgtccatgtaccgtgcattggtatggaaggtgcttctaggaatcttgcctccacaccacgagtcccatgccaaggtgatgatgtatcgtaaggagcagtacttggatgtccttcatgccctgaaagtcgttcgctttgttagtgatgccacacctcaggctgaagtctatctccgcatgtatcagctggagtctgggaagttacctcgaagtccctcttttccactggagccagatgatgaagtgtttcttgccatagctaaagccatggaggaaatggtggaagatagtgtcgactgttactggatcacccgacgctttgtgaaccaattaaataccaagtaccgggattccttgccccagttgccaaaagcgtttgaacaatacttgaatctggaagatggcagactgctgactcatctgaggatgtgttccgcggcgcccaaacttccttatgatctctggttcaagaggtgctttgcgggatgtttgcctgaatccagtttacagagggtttgggataaagttgtgagtggatcctgtaagatcctagtttttgtagctgtcgaaattttattaacctttaaaataaaagttatggcactgaacagtgcagagaagataacaaagtttctggaaaatattccccaggacagctcagacgcgatcgtgagcaaggccattgacttgtggcacaaacactgtgggaccccggtccattcaagctgaacgcacccgctggttgtggaccgtctgccaggcaccacaatcattcctggacccccgagggcctctgagtttgagacgctggctgagatcaaatgataagaattccaatttttgttttcctaagtctttcatctgctaatctacccaacatgaaccacgggccacatgaagggccagacacattcttaagcggctcacagcctagaggtgcacatctgtgattacaatgtgcaaggtaaaactggatcaacagtttccaaggactggcatgtaataaaatatcctcaaaacaacaagcaagttgggcgtgacttagactttcactgcccatgtagaaggcactgtacattcttgcagcatctcagttggccagcaagaggtgagtcagaaaaaaaccattcagcagccacatggaagtggggctcactgggcacaaggcaaaactgtgaagaagataaagtgtctgtggttctgcattgactctattccctggagtcctcccctctcgagttcctagaattatgttatcactcttgctctatctcattcctatcaagacctgttttagaaatgggtgccacagactcagttacattcaaatgtaaacccattcattcatttagcaagttacttattagtgccagtgctgtgtcaggttctacattaggtaccagagtacagtgatgagcaaaaccagtccctgcccttctggaacagagaagactggaagaggatgggggtagccattaatcaaacagtcacagaaatgagtgcaaaatgtagctggagtaagggcttccatggtgaggcacttggtgcagggatctctggatctgaccaaatcaggaggtcaggaaaggcttccaggaggaagtgacactgtgcccagagctcagggatggaagaaggatgctccttctgggcagagagtaaggagagaagattggtgggaaggagggcaggggccagatgccgtgggtgtgatttggatctgtgtccctgccaatcacatgttgaattgtagtccccagtgttggaggtggagcctggtgggacatgattggatcatgggggtagtttttcatgaacggtttagtaccaaccacttggtgctgttctagtgagttgagtgcattctcgcgagatctggttgtttaaaagtgtgtagcacccttccctcttgctcctgctcctccaatgtgagactccttgctttccctctgttttccaccatgattggaagcttcctgaggcctcaccagaggcagatgccagcatcatgcttcctgtgcagcctgcagaactgtgagccaattaaacctcttttcgttat

SEQ ID NO: 189670 - DNA, 471 bp, Homo sapiens
  Payload ID: 17448
  Gene Symbol: TBC1D7
  Gene Name: TBC1 domain family, member 7
  ENST ID: ENST00000606541
  CDS Start-End: 15-471
tccaagaatgaaatatgactgaggactctcagagaaactttcgttcagtatattatgagaaagtggggtttcgtggagttgaagaaaagaaatcattagaaattctcctaaaagatgaccgtctggatactgagaaactttgtacttttagtcagaggttccctctcccgtccatgtaccgtgcattggtatggaaggtgcttctaggaatcttgcctccacaccacgagtcccatgccaaggtgatgatgtatcgtaaggagcagtacttggatgtccttcatgccctgaaagtcgttcgctttgttagtgatgccacacctcaggctgaagtctatctccgcatgtatcagctggagtctgggaagttacctcgaagtccctcttttccactggttagtggtcacttttgtctgacactaagctcaactctagaccgtcccatcttgccggcctttgattacatcatgt

SEQ ID NO: 189671 - DNA, 537 bp, Homo sapiens
  Payload ID: 17448
  Gene Symbol: TBC1D7
  Gene Name: TBC1 domain family, member 7
  ENST ID: ENST00000607230
  CDS Start-End: 277-537
gcatgcgcccgcccggcgcccgcccggcgacctggagttgatgtcacgtccggcggcggcggcagcggcagcggcagcggcgctgagttttgtctcccgggccgtctgggcgcgcgcgggtgtcccaggtaccccgccgcctccctccttcccgcaggactcgtccctcctggccctgggccccaacggtgcccgcctgcccggcggtcggtcagcgcacagggcacggcttcctctgcttctcccggaccacttagtctcaacccggaatgaaatatgactgaggactctcagagaaactttcgttcagtatattatgagaaagtggggtttcgtggagttgaagaaaagaaatcattagaaattctcctaaaagatgaccgtctggatactgagaaactttgtacttttagtcagaggttccctctcccgtccatgtaccgtgcattggtatggaaggtgcttctagggcttgagaagcctgcagccctgtctggttatgtaatatggaggcagcgagggaatataagcggtact

SEQ ID NO: 189672 - DNA, 3627 bp, Homo sapiens
  Payload ID: 17449
  Gene Symbol: TBC1D8
  Gene Name: TBC1 domain family, member 8 (with GRAM domain)
  Uniprot ID: O95759
  ENST ID: ENST00000376840
  CDS Start-End: 1-3423
atgtggctcaagcccgaggaggtgctgctgaagaacgcgctgaagctctgggtgacccagaagagcagctgctacttcatcctgcagcggcgccgcgggcacggcgaggggggcggccgcctcaccggtcgcctggtcggcgctctggatgcagtgttggattccaatgcacgggtcgctccatttcgaattctgcttcaagttcccggctcccaggtttattctcccatagcatgtggtgcaacattagaggaaatcaatcagcactgggactggctggaacaaaatctcctccacaccttgtctgtctttgataataaagatgacattgccagttttgtcaaagggaaggtaaaggctctgatagccgaggagaccagcagcaggctcgccgagcaggaggaggaacccgagaaattccgagaagccctggtgaagttcgaggccaggttcaacttccccgaggcggagaagctggtcacctactactcctgctgctgttggaagggcagggtgccccgccagggctggctgtacctcagcatcaaccacctctgcttctactccttcttcctgggcaaggaacttaaacttgtggttccgtgggttgatatccagaaattagaaagaacgtccaatgtctttctgacggataccatccgaatcaccacgcagaataaggagcgtgacttctccatgttcctgaacctggatgaggtgtttaaggtcatggagcagctggccgacgtgacgctgcgaaggctgctggataatgaggtctttgacctcgaccccgatctgcaggagccgagccagatcaccaagagggacctggaagccagagcacagaatgagttcttccgggctttcttcaggttgccgaggaaggagaagctgcacgcggttgtggactgttcgctctggacgccgttcagtcgctgtcacaccacggggcggatgttcgcctctgacagctacatctgctttgccagcagagaagatggctgctgtaagatcatcctgccactcagagaggtggtgagcatcgagaagatggaggacacgagcctgctgccgcatcccatcattgtcagtatcagaagcaaggtggccttccagttcattgagctccgggaccgagacagcctggtggaggcgctgcttgcgaggttgaagcaggtccacgccaaccaccccgtgcactacgacacctctgcggatgatgacatggcttcactcgtgtttcattcaacaagcatgtgcagtgaccacagatttggggatcttgaaatgatgtcttctcaaaatagcgaggagagtgagaaagagaagagcccgctgatgcaccccgatgccctggtcaccgccttccagcagtcaggcagccagagccctgactcccgaatgtccagagaacagataaaaataagcctgtggaatgaccactttgtggaatacggcagaaccgtgtgtatgtttcgcacagagaagattcggaagctcgtagccatgggcatccctgaatctttgcgagggagactctggcttctcttctcagatgcggtgacggatcttgcctcacaccctggttactacgggaatctggtggaggagtccctggggaaatgctgcctggtaaccgaggagatagaacgagacctgcaccgctccctgccagagcaccccgccttccagaacgaaacgggaattgctgctttgaggagagtcttgacggcctatgcccaccggaaccccaagattggatactgccagtccatgaacatcctgacctccgtgctgctgctgtacaccaaggaggaggaagccttctggctgttggttgctgtgtgtgagcggatgctgcccgattacttcaaccaccgagtgatcggggcacaagttgaccagtctgtcttcgaggagctcatcaagggtcatctcccagagctggcagagcacatgaacgacctctcagccctggcgtccgtctctctctcgtggttcctgaccctgttcctcagcatcatgcctctagagagtgcggtgaatgtggtagactgcttcttctatgatggcatcaaagccatcttccagctgggactggctgtgcttgaggccaatgctgaggacctgtgcagcagcaaggatgatggccaggccttgatgatcctcagcaggtttctagatcacattaagaatgaggacagcccagggcccccagttggcagccaccatgcctttttctccgacgaccaggagccctaccctgtgactgatatttcggacctgatccgggattcctatgagaaatttggagaccagtctgtggagcagatcgagcacctacgttacaagcacaggatcagggtcctccaaggccacgaggacaccacaaagcagaacgtgcttcgagtcgttatcccggaagtctcaattcttcctgaagacctagaggagctctacgacttattcaagagagaacatatgatgagctgttactgggagcagcccaggcccatggcctcacgccacgaccccagccggccctatgctgagcagtaccgcatagatgcccggcagtttgcacacctgtttcagctagtctcgccctggacctgcggggcccacacggagatcctcgccgaaaggacgttcaggctcttggatgacaacatggaccagctcatcgagttcaaagcgtttgtgagctgcctcgatattatgtataatggagaaatgaatgagaagattaaactattatacaggcttcatatccctccagcactcactgaaaatgaccgagacagccagtcgccgttgaggaatcctctgttgtcaacatcgagacccctggttttcgggaaacccaatggtgatgcagttgattatcagaaacagctgaagcagatgattaaggatttagccaaagaaaaagataaaactgagaaagaattgcccaaaatgagccagagagaatttatccagttctgtaaaactctgtacagtatgttccatgaagatccagaagaaaatgatttgtatcaagccatcgccacagtcaccacactgctgctgcagatcggggaggtggggcagcgaggcagcagctctggaagctgctcccaggagtgtggggaggagctgcgggcttcagctccttctcctgaggactcggtttttgcagacactgggaagacgccccaggactcccaggcatttccagaggcggcagaaagggactggactgtctcccttgaacatattttagcttcacttctgactgaacagtcattagtcaacttttttgaaaagccactggacatgaaatccaaacttgaaaatgccaagatcaatcagtacaatctcaaaacttttgaaatgagccaccaatcacaatctgaacttaagctgagtaacttgtagcaagacagcagctgctatgcacactggagtccaccataccaaagcacgaaccagactgtttcttggggtcagccctaaaccgagatttcagtctaccttaccaatggggcatctggctaaacaacctgacaaactgtggccaggggaaccgacacaaccctcaagcatttctatgtattgagaattgtcagtgccctaaggtat

SEQ ID NO: 189673 - DNA, 3803 bp, Homo sapiens
  Payload ID: 17449
  Gene Symbol: TBC1D8
  Gene Name: TBC1 domain family, member 8 (with GRAM domain)
  ENST ID: ENST00000409318
  CDS Start-End: 132-3599
tcagagcgctgggcaccggccgggctgtggtccccgcgcgccgccgtcgcctctcgagcgggctcggctcacagcgaccggcggccggggagatgtgagctggggccggcgggcgcggccggaccgccgcgatgtggctcaagcccgaggaggtgctgctgaagaacgcgctgaagctctgggtgacccagaagagcagctgctacttcatcctgcagcggcgccgcgggcacggcgaggggggcggccgcctcaccggtcgcctggtcggcgctctggatgcagtgttggattccaatgcacgggtcgctccatttcgaattctgcttcaagttcccggctcccaggtttattctcccatagcatgtggtgagttactgaatggatcagacgtttactgggccatagccactggtgcaacattagaggaaatcaatcagcactgggactggctggaacaaaatctcctccacaccttgtctgtctttgataataaagatgacattgccagttttgtcaaagggaaggtaaaggctctgatagccgaggagaccagcagcaggctcgccgagcaggaggaggaacccgagaaattccgagaagccctggtgaagttcgaggccaggttcaacttccccgaggcggagaagctggtcacctactactcctgctgctgttggaagggcagggtgccccgccagggctggctgtacctcagcatcaaccacctctgcttctactccttcttcctgggcaaggaacttaaacttgtggttccgtgggttgatatccagaaattagaaagaacgtccaatgtctttctgacggataccatccgaatcaccacgcagaataaggagcgtgacttctccatgttcctgaacctggatgaggtgtttaaggtcatggagcagctggccgacgtgacgctgcgaaggctgctggataatgaggtctttgacctcgaccccgatctgcaggagccgagccagatcaccaagagggacctggaagccagagcacagaatgagttcttccgggctttcttcaggttgccgaggaaggagaagctgcacgcggttgtggactgttcgctctggacgccgttcagtcgctgtcacaccacggggcggatgttcgcctctgacagctacatctgctttgccagcagagaagatggctgctgtaagatcatcctgccactcagagaggtggtgagcatcgagaagatggaggacacgagcctgctgccgcatcccatcattgtcagtatcagaagcaaggtggccttccagttcattgagctccgggaccgagacagcctggtggaggcgctgcttgcgaggttgaagcaggtccacgccaaccaccccgtgcactacgacacctctgcggatgatgacatggcttcactcgtgtttcattcaacaagcatgtgcagtgaccacagatttggggatcttgaaatgatgtcttctcaaaatagcgaggagagtgagaaagagaagagcccgctgatgcaccccgatgccctggtcaccgccttccagcagtcaggcagccagagccctgactcccgaatgtccagagaacagataaaaataagcctgtggaatgaccactttgtggaatacggcagaaccgtgtgtatgtttcgcacagagaagattcggaagctcgtagccatgggcatccctgaatctttgcgagggagactctggcttctcttctcagatgcggtgacggatcttgcctcacaccctggttactacgggaatctggtggaggagtccctggggaaatgctgcctggtaaccgaggagatagaacgagacctgcaccgctccctgccagagcaccccgccttccagaacgaaacgggaattgctgctttgaggagagtcttgacggcctatgcccaccggaaccccaagattggatactgccagtccatgaacatcctgacctccgtgctgctgctgtacaccaaggaggaggaagccttctggctgttggttgctgtgtgtgagcggatgctgcccgattacttcaaccaccgagtgatcggggcacaagttgaccagtctgtcttcgaggagctcatcaagggtcatctcccagagctggcagagcacatgaacgacctctcagccctggcgtccgtctctctctcgtggttcctgaccctgttcctcagcatcatgcctctagagagtgcggtgaatgtggtagactgcttcttctatgatggcatcaaagccatcttccagctgggactggctgtgcttgaggccaatgctgaggacctgtgcagcagcaaggatgatggccaggccttgatgatcctcagcaggtttctagatcacattaagaatgaggacagcccagggcccccagttggcagccaccatgcctttttctccgacgaccaggagccctaccctgtgactgatatttcggacctgatccgggattcctatgagaaatttggagaccagtctgtggagcagatcgagcacctacgttacaagcacaggatcagggtcctccaaggccacgaggacaccacaaagcagaacgtgcttcgagtcgttatcccggaagtctcaattcttcctgaagacctagaggagctctacgacttattcaagagagaacatatgatgagctgttactgggagcagcccaggcccatggcctcacgccacgaccccagccggccctatgctgagcagtaccgcatagatgcccggcagtttgcacacctgtttcagctagtctcgccctggacctgcggggcccacacggagatcctcgccgaaaggacgttcaggctcttggatgacaacatggaccagctcatcgagttcaaagcgtttgtgagctgcctcgatattatgtataatggagaaatgaatgagaagattaaactattatacaggcttcatatccctccagcactcactgaaaatgaccgagacagccagtcgccgttgaggaatcctctgttgtcaacatcgagacccctggttttcgggaaacccaatggtgatgcagttgattatcagaaacagctgaagcagatgattaaggatttagccaaagaaaaagataaaactgagaaagaattgcccaaaatgagccagagagaatttatccagttctgtaaaactctgtacagtatgttccatgaagatccagaagaaaatgatttgtatcaagccatcgccacagtcaccacactgctgctgcagatcggggaggtggggcagcgaggcagcagctctggaagctgctcccaggagtgtggggaggagctgcgggcttcagctccttctcctgaggactcggtttttgcagacactgggaagacgccccaggactcccaggcatttccagaggcggcagaaagggactggactgtctcccttgaacatattttagcttcacttctgactgaacagtcattagtcaacttttttgaaaagccactggacatgaaatccaaacttgaaaatgccaagatcaatcagtacaatctcaaaacttttgaaatgagccaccaatcacaatctgaacttaagctgagtaacttgtagcaagacagcagctgctatgcacactggagtccaccataccaaagcacgaaccagactgtttcttggggtcagccctaaaccgagatttcagtctaccttaccaatggggcatctggctaaacaacctgacaaactgtggccaggggaaccgacacaaccctcaagcatttctatgtattgagaattgtcagtgccctaaggtat

SEQ ID NO: 189674 - DNA, 3538 bp, Homo sapiens
  Payload ID: 17450
  Gene Symbol: TBC1D8B
  Gene Name: TBC1 domain family, member 8B (with GRAM domain)
  ENST ID: ENST00000276175
  CDS Start-End: 42-3386
gggcatctaggtcactgctcccggggggcacaaagttcgcgatgtggctgaagcctgaggaagtgcttctgaaaaatgcgctgaagctgtggctgatggaaaggtccaacgactacttcgtgctgcagcggcgtcggggctacggggaggaaggcggaggggggctcacagggcttctggttgggactcttgattcagtcttggactctactgctaaagtagctccatttcgcatcctacaccagacaccagattctcaagtttacttgtcaattgcatgtggagccaacagagaagaaataaccaagcattgggattggttggaacaaaatattatgaagaccttatctgtatttgattcaaatgaagatattactaattttgtacaaggaaaaataagaggattaattgctgaagagggaaaacattgttttgcaaaagaagatgatcctgagaaatttcgagaagcccttttgaaatttgaaaaatgttttggtttaccagagaaggagaagttagtgacctattattcatgcagttattggaaaggacgggttccttgtcagggttggctttatcttagcaccaactttctgagcttctattcttttttgttgggatcagaaataaaactcattatctcctgggatgaagtctcaaaacttgaaaagacttcaaatgtcatactgacagagagtattcacgtgtgttcccaaggagagaatcactacttttcaatgtttttgcacattaaccaaacataccttcttatggaacagctggcaaactatgccattagaagactttttgataaggaaacatttgataatgacccagtcctttataatcctctacagatcaccaaaagaggtctggaaaatagagcccacagtgagcaatttaatgccttttttaggctgcccaaaggagagagtttgaaagaagtacatgaatgtttcttatgggtaccattcagccacttcaatactcatgggaaaatgtgcatctcagaaaattatatctgctttgctagccaagatggcaatcagtgtagtgtaatcattccactacgagaggtcttagctatagataagacaaatgattccagcaaatctgtcatcattagcatcaaaggaaaaacagcttttcgcttccatgaagttaaagactttgaacaactggtagcaaaactcaggctcagatgcggagcagcttcaactcaatatcatgatattagcacagagtctacagagccatctgataattttgaggtgcaatctttgacaagtcagagggaatgcagtaaaactgtgaacactgaagccttaatgacagtatttcaccctcagaatttggagactcttaattctaaaatgttgaaagaaaaaatgaaggaacagtcatggaaaatactgtttgcagaatgtggacgtggtgttagtatgtttcgaaccaaaaagactcgagatcttgttgtaagagggattccagaaacattaagaggagaactctggatgcttttttcaggtgctgttaatgacatggctactaatcctgactattatactgaagtggttgagcagtccttagggacctgcaacttggctactgaagaaattgaacgtgatttacgtcgctctctgcctgagcacccagcctttcagagtgatactggcatatctgctctgagaagggtactcacagcttatgcatacaggaatcccaaaattggatactgccaggcaatgaatattttgacttcagtgctgcttctatatgcaaaagaggaagaagctttttggcttctggttgctgtatgtgaacgaatgttgcctgattattttaatcgtcgaattattggtgccttggtggatcaggcagtctttgaagaacttatcagggatcaccttcctcagctgacagaacacatgactgatatgacattcttttcctcagtttctctctcttggtttctcacactttttattagtgtgctacctattgaaagtgcagtgaatgtggtggactgtttcttctatgatggaataaaggccattttgcaactgggattggcaatacttgactataatttagacaaactgctgacttgtaaagatgatgctgaagctgtgacagccttaaacaggttctttgacaatgtcactaataaggatagtccattgccttcaaatgttcagcaaggttcaaatgtgagtgatgaaaaaaccagtcatactagagtggatattacagatttgattagagaatcaaatgagaaatatggtaatattcgctatgaagatatacatagtatgcgctgtcgaaataggttgtatgtgatacagaccctagaggaaacaacaaaacagaatgtgttgcgtgttgtatcacaagatgtgaaattgagccttcaagaattggatgaactttatgtcatctttaagaaagagctgtttttatcttgttattggtgtttgggttgcccagtattgaagcatcatgaccccagtctgccatatttggaacagtatcagattgactgccagcagttcagagcgttgtatcacttgttgagtccctgggctcattctgcaaataaagactcactagctttatggacattcagattgttagatgaaaactctgattgccttataaacttcaaagaattctcctctgcaattgacataatgtacaatggaagttttactgagaagcttaagctgctttttaagctacatattcctccagcttacactgaagtgaaatctaaggatgcttcaaaaggagatgaactttccaaggaagaattactttatttcagtcagctgcatgtttccaagcctgcaaatgagaaggaagcagaatcagcaaaacacagccctgaaaaaggcaaagggaaaattgatattcaagcatatctaagtcaatggcaagatgagcttttcaaaaaagaagaaaacattaaggatttaccaagaatgaatcagtctcagtttattcagttttcaaagaccctctataacttatttcatgaggaccctgaagaagaatcattatatcaagccattgctgttgtaaccagccttttactcaggatggaagaagttggaaggaaactacatagccctacatcatcagccaaaggattctctggtactgtctgtggttctggaggacccagtgaggaaaaaacagggagccacttggagaaagatccttgttcctttagggaggaacctcagtggtcatttgcatttgaacagattcttgcatcgctgttgaatgaaccagcattggtgaggttttttgagaaacccatagatgtaaaagccaagctggaaaatgcaagaatttctcagttaaggtctagaaccaagatgtaaatccctaggaattgcctatcatagacaagtttactaacattcctgtagctgtcagtttgattcctgtgagtagggctcagggatttatcttgttaccaatgtgtctgaaggccaaaatatatatccagaagcacaatgcatcattcctttgt

SEQ ID NO: 189675 - DNA, 2589 bp, Homo sapiens
  Payload ID: 17450
  Gene Symbol: TBC1D8B
  Gene Name: TBC1 domain family, member 8B (with GRAM domain)
  Uniprot ID: Q0IIM8
  ENST ID: ENST00000310452
  CDS Start-End: 166-2064
acgtgggagagaagggagggttgggggaagtgtggaaaacctgaacctgagctgctgtcgcctgaggaagatttggtgggaggagaagcagaggggaagagacgggttgagagtgaggtgaggagggcatctaggtcactgctcccggggggcacaaagttcgcgatgtggctgaagcctgaggaagtgcttctgaaaaatgcgctgaagctgtggctgatggaaaggtccaacgactacttcgtgctgcagcggcgtcggggctacggggaggaaggcggaggggggctcacagggcttctggttgggactcttgattcagtcttggactctactgctaaagtagctccatttcgcatcctacaccagacaccagattctcaagtttacttgtcaattgcatgtggagccaacagagaagaaataaccaagcattgggattggttggaacaaaatattatgaagaccttatctgtatttgattcaaatgaagatattactaattttgtacaaggaaaaataagaggattaattgctgaagagggaaaacattgttttgcaaaagaagatgatcctgagaaatttcgagaagcccttttgaaatttgaaaaatgttttggtttaccagagaaggagaagttagtgacctattattcatgcagttattggaaaggacgggttccttgtcagggttggctttatcttagcaccaactttctgagcttctattcttttttgttgggatcagaaataaaactcattatctcctgggatgaagtctcaaaacttgaaaagacttcaaatgtcatactgacagagagtattcacgtgtgttcccaaggagagaatcactacttttcaatgtttttgcacattaaccaaacataccttcttatggaacagctggcaaactatgccattagaagactttttgataaggaaacatttgataatgacccagtcctttataatcctctacagatcaccaaaagaggtctggaaaatagagcccacagtgagcaatttaatgccttttttaggctgcccaaaggagagagtttgaaagaagtacatgaatgtttcttatgggtaccattcagccacttcaatactcatgggaaaatgtgcatctcagaaaattatatctgctttgctagccaagatggcaatcagtgtagtgtaatcattccactacgagaggtcttagctatagataagacaaatgattccagcaaatctgtcatcattagcatcaaaggaaaaacagcttttcgcttccatgaagttaaagactttgaacaactggtagcaaaactcaggctcagatgcggagcagcttcaactcaatatcatgatattagcacagagcttgctattagttctgagtctacagagccatctgataattttgaggtgcaatctttgacaagtcagagggaatgcagtaaaactgtgaacactgaagccttaatgacagtatttcaccctcagaatttggagactcttaattctaaaatgttgaaagaaaaaatgaaggaacagtcatggaaaatactgtttgcagaatgtggacgtggtgttagtatgtttcgaaccaaaaagactcgagatcttgttgtaagagggattccagaaacattaagaggagaactctggatgcttttttcaggtgctgttaatgacatggctactaatcctgactattatactgaagtggttgagcagtccttagggacctgcaacttggctactgaagaaattgaacgtgatttacgtcgctctctgcctgagcacccagcctttcagagtgatactggcatatctgctctgagaagggtactcacagcttatgcatacaggaatcccaaaattggatactgccaggcaatgaatattttgacttcagtgctgcttctatatgcaaaagaggaagaagctttttggcttctggttgctgtatgtgaacgaatgttgcctgattattttaatcgtcgaattattggttcagatgattttatgccactagtaagaatccaaggacaatgtgttattggggagaagtagaaaaaggaaaatctggggtagcacctggcatgctctttctccaattttctactacttactcctattccccaaattctcccatcaaggaggaaatgaactctgagacagaagatgagttttcctcaaagcttgaccaggatataagtggatgccttattgggcaaagcagagggtaaccaattagaaggccctggcttctcttgattgatagctgagaactcatcagagggatcagtgctttctctgtgtattgctggagtctgaaagtgtgactctcatgtcactgattcatttctgaagtgttaaattcagaataaatttttgataatcaaaatgaacttagagaactttgttgtttggcattgtcaagagtgaagaattctaattatttgtgtatttatcttgtgttatgctagatattaaactccctgaacatgagactatttcattaattggtatagctcttataatacctagtacaggtctctgcatataataaagactcaataaataactcttcaaatg

SEQ ID NO: 189676 - DNA, 5717 bp, Homo sapiens
  Payload ID: 17450
  Gene Symbol: TBC1D8B
  Gene Name: TBC1 domain family, member 8B (with GRAM domain)
  Uniprot ID: Q0IIM8
  ENST ID: ENST00000357242
  CDS Start-End: 175-3537
tctctgcctacgtgggagagaagggagggttgggggaagtgtggaaaacctgaacctgagctgctgtcgcctgaggaagatttggtgggaggagaagcagaggggaagagacgggttgagagtgaggtgaggagggcatctaggtcactgctcccggggggcacaaagttcgcgatgtggctgaagcctgaggaagtgcttctgaaaaatgcgctgaagctgtggctgatggaaaggtccaacgactacttcgtgctgcagcggcgtcggggctacggggaggaaggcggaggggggctcacagggcttctggttgggactcttgattcagtcttggactctactgctaaagtagctccatttcgcatcctacaccagacaccagattctcaagtttacttgtcaattgcatgtggagccaacagagaagaaataaccaagcattgggattggttggaacaaaatattatgaagaccttatctgtatttgattcaaatgaagatattactaattttgtacaaggaaaaataagaggattaattgctgaagagggaaaacattgttttgcaaaagaagatgatcctgagaaatttcgagaagcccttttgaaatttgaaaaatgttttggtttaccagagaaggagaagttagtgacctattattcatgcagttattggaaaggacgggttccttgtcagggttggctttatcttagcaccaactttctgagcttctattcttttttgttgggatcagaaataaaactcattatctcctgggatgaagtctcaaaacttgaaaagacttcaaatgtcatactgacagagagtattcacgtgtgttcccaaggagagaatcactacttttcaatgtttttgcacattaaccaaacataccttcttatggaacagctggcaaactatgccattagaagactttttgataaggaaacatttgataatgacccagtcctttataatcctctacagatcaccaaaagaggtctggaaaatagagcccacagtgagcaatttaatgccttttttaggctgcccaaaggagagagtttgaaagaagtacatgaatgtttcttatgggtaccattcagccacttcaatactcatgggaaaatgtgcatctcagaaaattatatctgctttgctagccaagatggcaatcagtgtagtgtaatcattccactacgagaggtcttagctatagataagacaaatgattccagcaaatctgtcatcattagcatcaaaggaaaaacagcttttcgcttccatgaagttaaagactttgaacaactggtagcaaaactcaggctcagatgcggagcagcttcaactcaatatcatgatattagcacagagcttgctattagttctgagtctacagagccatctgataattttgaggtgcaatctttgacaagtcagagggaatgcagtaaaactgtgaacactgaagccttaatgacagtatttcaccctcagaatttggagactcttaattctaaaatgttgaaagaaaaaatgaaggaacagtcatggaaaatactgtttgcagaatgtggacgtggtgttagtatgtttcgaaccaaaaagactcgagatcttgttgtaagagggattccagaaacattaagaggagaactctggatgcttttttcaggtgctgttaatgacatggctactaatcctgactattatactgaagtggttgagcagtccttagggacctgcaacttggctactgaagaaattgaacgtgatttacgtcgctctctgcctgagcacccagcctttcagagtgatactggcatatctgctctgagaagggtactcacagcttatgcatacaggaatcccaaaattggatactgccaggcaatgaatattttgacttcagtgctgcttctatatgcaaaagaggaagaagctttttggcttctggttgctgtatgtgaacgaatgttgcctgattattttaatcgtcgaattattggtgccttggtggatcaggcagtctttgaagaacttatcagggatcaccttcctcagctgacagaacacatgactgatatgacattcttttcctcagtttctctctcttggtttctcacactttttattagtgtgctacctattgaaagtgcagtgaatgtggtggactgtttcttctatgatggaataaaggccattttgcaactgggattggcaatacttgactataatttagacaaactgctgacttgtaaagatgatgctgaagctgtgacagccttaaacaggttctttgacaatgtcactaataaggatagtccattgccttcaaatgttcagcaaggttcaaatgtgagtgatgaaaaaaccagtcatactagagtggatattacagatttgattagagaatcaaatgagaaatatggtaatattcgctatgaagatatacatagtatgcgctgtcgaaataggttgtatgtgatacagaccctagaggaaacaacaaaacagaatgtgttgcgtgttgtatcacaagatgtgaaattgagccttcaagaattggatgaactttatgtcatctttaagaaagagctgtttttatcttgttattggtgtttgggttgcccagtattgaagcatcatgaccccagtctgccatatttggaacagtatcagattgactgccagcagttcagagcgttgtatcacttgttgagtccctgggctcattctgcaaataaagactcactagctttatggacattcagattgttagatgaaaactctgattgccttataaacttcaaagaattctcctctgcaattgacataatgtacaatggaagttttactgagaagcttaagctgctttttaagctacatattcctccagcttacactgaagtgaaatctaaggatgcttcaaaaggagatgaactttccaaggaagaattactttatttcagtcagctgcatgtttccaagcctgcaaatgagaaggaagcagaatcagcaaaacacagccctgaaaaaggcaaagggaaaattgatattcaagcatatctaagtcaatggcaagatgagcttttcaaaaaagaagaaaacattaaggatttaccaagaatgaatcagtctcagtttattcagttttcaaagaccctctataacttatttcatgaggaccctgaagaagaatcattatatcaagccattgctgttgtaaccagccttttactcaggatggaagaagttggaaggaaactacatagccctacatcatcagccaaaggattctctggtactgtctgtggttctggaggacccagtgaggaaaaaacagggagccacttggagaaagatccttgttcctttagggaggaacctcagtggtcatttgcatttgaacagattcttgcatcgctgttgaatgaaccagcattggtgaggttttttgagaaacccatagatgtaaaagccaagctggaaaatgcaagaatttctcagttaaggtctagaaccaagatgtaaatccctaggaattgcctatcatagacaagtttactaacattcctgtagctgtcagtttgattcctgtgagtagggctcagggatttatcttgttaccaatgtgtctgaaggccaaaatatatatccagaagcacaatgcatcattcctttgttgttgataatgggctttgttagcactttttaaaacaaacaaacaaacaaaacaaaaaagcaaaccacatttgttatctcaaattttgatgatattctcaaatacaaatatacttttttatatttcacaatatatgcaatatcaggggaatatgctaaatgttaccaccagagggcacaagcatatcacttttagtaaggaaattactagcttgtgttgctatttacatatgaattactgattattttgaaaagacggtgttatgcttgggtgttagtgaggctgatatgtcatgtcaatcgataaaccctactttccaaattatctaaaagattaccatttggggcccttgttttcaagttatctaactgaaatattattaatttttttaagttaatctcattcagtcttctagtaataaatgcttttttaagtaccttctacagtcttcctacctgaggggttcagaggctgctgactcacactgctaactctgttactgacaaaagcaaatcaataactctaaattctgggctgatataaagaaaaaaacaatattggatttggatttaatctgggtaaaatcagccttctgagaagggctaagaaacagttcaattaactgtataggtctttcattagaccgagacatcactagaaattctgggcactgctgtttgtggtatttgtctcagagtagcttatgactgttttggttctagctttagattttggattttcaccagtcatgtgttaatttacattagatagtaaagaatggctacactaagactgaattatcttattagtctggcaagcatataaagtatacttgtatgtaatgattgccaaggtaacagaattgctgacatctgtctaaaaagttttgactatccaatttagatgtgtaatttctatatactttatgctgtttatatttcagtcattacaccaagtccatttagagataatgggctttgttagcactttcaaaaaaaaaaaaagcaaaccatacttgtccactgtcctgtgctattcctaccaaggacaatttattaatcaattgacttagaaaatagggggagaaatcattcattggagcttctttctttagaaaagactttggttataagccttttgacttttctagatgtgaaaccatgaaagggcagacctccttcagagtgactcaagaggtctccctttcttggagggagttggtacagtcagcctttgggaagaatccactgtgaacaaagcttaacacatggggcttcatcgctcatagaatatgttattttcaaagaagttcaagaattttcaagttgagcctttgaaaatcccataaattggttttagctaaacacttactagtagtgtctttaaattatttaatcaaccttgtcttttcaaggaaattaccacttaaagagatagttggtaaataaacatctatgccttttctcagaaatgatttgctgaactatgtccatattttacagcttagataatagtttatatggaaactattatacatctgctattgtgcaatgattgttaaattatactgaagtagctctagaaagacacatgtatacaaggcactattgtacacactttgctgaatattttgtcagttgtatttacaaagaaaggtactttcttaagagcatatatgttattaatatttgatatgattttaaagtcagaatagtacagattgctgagtattatactttaggctagattaattaaaattgaatactgaaagagattttttgagttgcaaaaagtttataaatgcaaagcaaaaagaaaacatttattttctgagtctgcaggagaaacaaactaaacattatagttttatagctgctatcttgttaaccaaacaggttgttcataatattaaaaatcttacgtagttgtgttaaactgaaccagttcattataccttatgcattaaattaaatatgttataaggtggctttacttgtctttataaaaataaatatatctactaaacatg

SEQ ID NO: 189677 - DNA, 654 bp, Homo sapiens
  Payload ID: 17450
  Gene Symbol: TBC1D8B
  Gene Name: TBC1 domain family, member 8B (with GRAM domain)
  ENST ID: ENST00000431860
  CDS Start-End: 1-654
tttcaataggttctttgacaatgtcactaataaggatagtccattgccttcaaatgttcagcaaggttcaaatgtgagtgatgaaaaaaccagtcatactagagtggatattacagatttgattagagaatcaaatgagttgcgtgttgtatcacaagatgtgaaattgagccttcaagaattggatgaactttatgtcatctttaagaaagagctgtttttatcttgttattggtgtttgggttgcccagtattgaagcatcatgaccccagtctgccatatttggaacagtatcagattgactgccagcagttcagagcgttgtatcacttgttgagtccctgggctcattctgcaaataaagactcactagctttatggacattcagattgttagatgaaaactctgattgccttataaacttcaaagaattctcctctgcaattgacataatgtacaatggaagttttactgagaagcttaagctgctttttaagctacatattcctccagcttacactgaagtgaaatctaaggatgcttcaaaaggagatgaactttccaaggaagaattactttatttcagtcagctgcatgtttccaagcctgcaaatgagaaggaagcagaatcagcaaaacacagccctgaaaa

SEQ ID NO: 189678 - DNA, 4098 bp, Homo sapiens
  Payload ID: 17450
  Gene Symbol: TBC1D8B
  Gene Name: TBC1 domain family, member 8B (with GRAM domain)
  ENST ID: ENST00000481617
  CDS Start-End: 150-1409
agggttgggggaagtgtggaaaacctgaacctgagctgctgtcgcctgaggaagatttggtgggaggagaagcagaggggaagagacgggttgagagtgaggtgaggagggcatctaggtcactgctcccggggggcacaaagttcgcgatgtggctgaagcctgaggaagtgcttctgaaaaatgcgctgaagctgtggctgatggaaaggtccaacgactacttcgtgctgcagcggcgtcggggctacggggaggaaggcggaggggggctcacagggcttctggttgggactcttgattcagtcttggactctactgctaaagtagctccatttcgcatcctacaccagacaccagattctcaagtttacttgtcaattgcatgtggagccaacagagaagaaataaccaagcattgggattggttggaacaaaatattatgaagaccttatctgtatttgattcaaatgaagatattactaattttgtacaaggaaaaataagaggattaattgctgaagagggaaaacattgttttgcaaaagaagatgatcctgagaaatttcgagaagcccttttgaaatttgaaaaatgttttggtttaccagagaaggagaagttagtgacctattattcatgcagttattggaaaggacgggttccttgtcagggttggctttatcttagcaccaactttctgagcttctattcttttttgttgggatcagaaataaaactcattatctcctgggatgaagtctcaaaacttgaaaagacttcaaatgtcatactgacagagagtattcacgtgtgttcccaaggagagaatcactacttttcaatgtttttgcacattaaccaaacataccttcttatggaacagctggcaaactatgccattagaagactttttgataaggaaacatttgataatgacccagtcctttataatcctctacagatcaccaaaagaggtctggaaaatagagcccacagtgagcaatttaatgccttttttaggctgcccaaaggagagagtttgaaagaagtacatgaatgtttcttatgggtaccattcagccacttcaatactcatgggaaaatgtgcatctcagaaaattatatctgctttgctagccaagatggcaatcagtgtagtgtaatcattccactacgagaggtcttagctatagataagacaaatgattccagcaaatctgtcatcattagcatcaaaggaaaaacagcttttcgcttccatgaagttaaagactttgaacaactggtagcaaaactcaggctcagatgcggagcagcttcaactcaatatcatgatattagcacagaggtaattaattatacagcaatcaaatcatttggaaaaaaaggtgtgtgtttagtgtagcccattcttcaagaggaattcatagtacctttcctatttatgcccaggggttttttttaaagatagaatctaagaaattatattgtctaactcacatccttaagcagaagtgagaattaaggactttattcatttttaggaacccatacattataaaattactataatttgatctttcttttactctatttgctgtttaccatataaatataccttgtactttcacatagtttggtttttaagaagtcaaaatatatttgagaattcagtgaggcctcgaaaaaggactcctcttactgttgcaaagacatagcaattttaaacctgtctggatatcttttatttaatatcttataggtcagccttatttacataatctggccaaaagcaaaatagtggtatatctgtttactagtaaaatattagagaggacagagaaatcaggaaagatccaaaattgacaccctaacatcacaattaaaagaactagaaaagcaagagcaaacactttcaaaagctagcagaaggcaagaaataactaaaatcagagcagaactgaaggaaatagagacacaaaaaacccttcaaaaaattaacgaatccacaagctggttttttgaaaggatcaacaaaattgatagaccactagcaagactaataaagaaaaaaagagagaagaatcaaatacacgcaataaaaaatgataaaggggatatcacgaccaatcccacagaaatacaaactaccatcagagaatactacaaacacctctacgcaaataaactagaaaatctagaagaaatggataaattcctcgacacatacactctcccaagactaaaccaggaagaagttgaatctctgaatagaccaataacaggagctgaaattgtggcaataatcaatagcttaacaacgaaaaagagcccaggaccagatggattcacagccgaattctaccagaggtacaaggaggaactggtaccattccttctgaaactattccaatcaatagaaaaagagggaatcctccctaacccattttatgaggccagcatcatcctgataccaaagccgggcagagacacaactaaaaaagagaattttggaccaatatccttgatgaacattgatgcaaaaatcctcaataaaatactggcaagccgaatccagcagcacatcaaaaagcttatccaccatgatcaagtgggcttcatccctgggatgcaaggctggttcaatatacacaaatcaataaatgtaatccagcatataaacagagccaaagacaaaaaccacatgattatctcaatagatgcagaaaaggcctttgacaaaattcaacaacccttcatgctaaaaactctcaataaattaggtattgatgggacatatctcaaaatcataagagctatctatgacaaacccacagccaatatcatactgaatgggcaaaaactggaagcattcccttttgaaaactggcacaagacagggatgccctctctcaccactcctattcaacatagtgttggaagttctggccagggcaattaggcaggagaaggaaataaagagtattcaattaggaaaagaggaagtcaaattgtccctgtttgcagacgacatgattgtatatctagaaaaccccatagtctcagcccaaaatctccttaagctgataagcaacttcagcaaagtctcaggatacaaaatcaatgtacaaaaatcacaagcattcttatacaccaataacagacaaacagagagccaaatcatgagtgaactcccattcacaattgcttcaaagagaatagaatacctaggaatccaacttacaagggatgtgaaggacctcttcaaggagaactacaaaccactactcaaggaaataaaagaggatacaaacaaatagaagaaaattccatgctcatgggtaggaagaatcaatatcgtgaaaatggccatactgcccaaggtaatttacagattcaatgccatccccatcaagctaccaatgactttcttcacagaattggaaaaaactactttaaagttcatatggaaccaaaaaagagcctgcatcgccaagtcaatcctgagccaaaagaacaaagctggaggcatcacactacctgacttcaaactatactacaaggctacagtaaccaaaacagcatggtactggtaccaaaacagagatatagatcaatggaacagaacagagccctcagaaataatgccgcatacctacaactatctgatctttgacaaacctgacaaaaacaagcaatggggaaaggattccctatttaataaatggtgctgggaaaactggctagccatatgtagaaagctgaaactggatcccttccttacaccttatacaaaaatcaattcaagatggattaaagacttaaacattagacctaaaaccataaaaaccctagaagaaaacctaggcgttaccattcagtacataggcatgggcaaggacttcatgtctaaaacaccaaaagcaatggcaacaaaagccaaaattgacaaatgggatctaattaaactaaagagcttctgcacagcaaaagaaacaaccatcagagtgaacaggcaacctacaaaatgggagaaatttttctcaacctacttatctgacaaagggctaatatccagaatctacaatgaactc

SEQ ID NO: 189679 - DNA, 496 bp, Homo sapiens
  Payload ID: 17450
  Gene Symbol: TBC1D8B
  Gene Name: TBC1 domain family, member 8B (with GRAM domain)
  ENST ID: ENST00000460545
  CDS Start-End: 431-496
agtgctgcagatacattttgagatttggacaattgaagctgacttaactcttttattgaaagataattttctcagatactactcacattggcatactgtaatctctctttatcccaaatgtattttttctttaagaaaaatctctgtaaggactctatgggctagaaaagttttaaaataaatttattagtttgttatatgaagtgatacagatttgatttatctcttgtaaagtccttatttcaacaatctttctattacaacagggcttctggttgggactcttgattcagtcttggactctactgctaaagtagctccatttcgcatcctacaccagacaccagattctcaagtttacttgtcaattgcatgtggagccaacagagaagaaataaccaagcattgggattggttggaacaaaatattatgaagaccttatctgtatttgattcaaatgaagatattactaattttgtacaaggaaaaataaga

SEQ ID NO: 189680 - DNA, 5306 bp, Homo sapiens
  Payload ID: 17451
  Gene Symbol: TBC1D9
  Gene Name: TBC1 domain family, member 9 (with GRAM domain)
  Uniprot ID: Q6ZT07
  ENST ID: ENST00000442267
  CDS Start-End: 76-3876
gcgcgcctgtcgcggtggtgggtgcaggactggacccacgggcccattgtgcgcccgcccgcggcagccaggaccatgtgggtgaacccggaggaggtgttgctggccaacgcgctgtggatcaccgagagggccaacccatacttcatcctgcagcggaggaagggccacgccggcgatggaggcggcggcggcggactggcgggcctgctggtgggtacccttgatgttgtgttggactccagcgcccgggtcgctccttaccgaatcttgtaccagactccagactccctggtctactggaccatcgcctgtggtggttccaggaaagaaatcactgaacactgggaatggcttgagcaaaatctcttgcagacactctccatctttgaaaatgagaatgatatcaccacatttgtgagaggaaaaatacagggcatcattgcagaatacaacaaaatcaatgatgtaaaggaagatgatgacacggagaagtttaaagaagccattgtgaaatttcataggctgtttgggatgccagaggaagagaaactcgtcaactattactcttgcagctattggaaggggaaggtcccccgtcagggttggatgtacctcagcattaaccacctttgcttttattcttttcttatgggaagggaagcgaaactggtcatccggtgggtagacatcactcagcttgagaagaatgccaccctgcttctgcctgatgtgatcaaagtgagcacacggtccagtgagcatttcttctctgtattcctcaacatcaacgagaccttcaagttaatggagcagcttgccaacatagccatgaggcaactcttagacaatgagggatttgaacaagatcgatccctgcccaaactcaaaaggaaatctcctaaaaaagtgtctgctctaaaacgtgatcttgatgccagggcaaagagtgagagataccgtgcacttttccggctgcccaaagatgaaaaattagatggccacacagactgcactctctggactccatttaacaaaatgcacattttggggcagatgtttgtgtccacaaattacatctgttttaccagcaaggaggagaacttatgtagcctcattatcccgctccgtgaggtgacaattgtggaaaaggcagacagctccagtgtgctccccagtcccttatccatcagcacccgaaacaggatgaccttcctatttgccaacttgaaagatagagactttctagtgcagaggatctcagatttcctgcaacagactacttccaaaatatattctgacaaggagtttgcaggaagttacaacagttcagatgatgaggtgtactctcgacccagcagcctcgtctcctccagcccccagagaagcacgagctctgatgctgatggagagcgccagtttaacctaaatggcaacagcgtccccacagccacacagaccctgatgaccatgtatcggcggcggtctcccgaggagttcaacccgaaattggccaaagagtttctgaaagagcaagcctggaagattcactttgctgagtatgggcaagggatctgcatgtaccgcacagagaaaacgcgggagctggtgttgaagggcatcccggagagcatgcgtggggagctctggctgctgctgtcaggtgccatcaatgagaaggccacacatcctgggtactatgaagacctagtggagaagtccatggggaagtataatctcgccacggaggagattgagagggatttacaccgctcccttccagaacacccagcttttcagaatgaaatgggcattgctgcactaaggagagtcttaacagcttatgcttttcgaaatcccaacatagggtattgccaggccatgaatattgtcacttcagtgctgctgctttatgccaaagaggaggaagctttctggctgcttgtggctttgtgtgagcgcatgctcccagattactacaacaccagagttgtgggtgcactggtggaccaaggtgtctttgaggagctagcacgagactacgtcccacagctgtacgactgcatgcaagacctgggcgtgatttccaccatctccctgtcttggttcctcacactatttctcagtgtgatgccttttgagagtgcagttgtggttgttgactgtttcttctatgaaggaattaaagtgatattccagttggccctagctgtgctggatgcaaatgtggacaaactgttgaactgcaaggatgatggggaggccatgaccgttttgggaaggtatttagacagtgtgaccaataaagacagcacactgcctcccattcctcacctccactccttgctcagcgatgatgtggaaccttaccctgaggtagacatctttagactcatcagaacttcctacgagaaattcggaactatccgggcagatttgattgaacagatgagattcaaacagagactgaaagtgatccagacgctggaggatactacgaaacgcaacgtggtacgaaccattgtgacagaaacttcctttaccattgatgagctggaagaactttatgctcttttcaaggcagaacatctcaccagctgctactggggcgggagcagcaacgcgctggaccggcatgaccccagcctgccctacctggaacagtatcgcattgacttcgagcagttcaagggaatgtttgctcttctctttccttgggcatgtggaactcactctgacgttctggcctcccgcttgttccagttattagatgaaaatggagactctttgattaacttccgggagtttgtctctgggctaagtgctgcatgccatggggacctcacagagaagctcaaactcctgtacaaaatgcacgtcttgcctgagccatcctctgatcaagatgaaccagattctgcttttgaagcaactcagtacttctttgaagatattaccccagaatgtacacatgttgttggattggatagcagaagcaaacagggtgcagatgatggctttgttacggtgagcctaaagccagacaaagggaagagagcaaattcccaagaaaatcgtaattatttgagactgtggactccagaaaataaatctaagtcaaagaatgcaaaggatttacccaaattaaatcaggggcagttcattgaactgtgtaagacaatgtataacatgttcagcgaagaccccaatgagcaggagctgtaccacgccacggcagcagtgaccagcctcctgctggagattggggaggtcggcaagttgttcgtggcccagcctgcaaaggagggcgggagcggaggcagtgggccgtcctgccaccagggcatcccaggcgtgctcttccccaagaaagggccaggccagccttacgtggtggagtctgttgagcccctgccggccagcctggcccccgacagcgaggaacactcccttggaggacaaatggaggacatcaagctggaggactcctcgccccgggacaacggggcctgctcctccatgctgatctctgacgacgacaccaaggacgacagctccatgtcctcatactcggtgctgagtgccggctcccacgaggaggacaagctgcactgcgaggacatcggagaggacacggtcctggtgcggagcggccagggcacggcggcactgccccggagcaccagcctggaccgggactgggccatcaccttcgagcagttcctggcctccctcttaactgagcctgccctggtcaagtactttgacaagcccgtgtgcatgatggccaggattaccagtgcaaaaaacatccggatgatgggcaagcccctcacctcggccagtgactatgaaatctcggccatgtccggctgacacgggcgccttcccgggggagtgggaggagagggaggggagggattttttatgttcttctgtgttgagttttttctttctttcttttaaattaaatatttattagtacctggcttgaagcctagtgttttcataatgtaattcaatgaaaactgttggagaaatatttaaacacctcaatgtaggtacattacactcttgttgcggggaggggatttaccagaatacagtttatttcgtgaattctaaaaaacaaaaagatgaatctgtcagtgatatgtgtgtattataacttattaatcttgctgttgagctgtatacatggtttaaaaaatagtactgtttaatgctaagtaaggcagcagtcatttgtgtattcaggctttttaaataaaattagagctgtaaggaaaatgaaaagccacaaatgcaagactgttcttaaatggaaggcatagtcagcgagggtaaatcctataccactttaggaagtattaaaaatatttttaagatttgaaatatatttcatagaagtcctctattcaaaatcatattccacagatgttccccttcaaagggaaaacatttggggttctaaacagttatgaaagtaagtgatttttacatgattccagaataacacttgtattgaccaatttagacagataccagaccaattttgcatttaagaaattgttctgattatttacgtcaactcattagaattcagtgaaaagtaacagtcttttgtcacagagaatctgaaagtagcagcaaagacagagggctcatgacaggtttttgcttttgctttgcttttgtttttgaaagagtaaaagtactgatgcttctgatactggatgtttagcttcttactgcaaaaacataagtaaaacagtcaactttaccatttccgtattctccatagattgaagaaatttataccacatatcgcatatgaccatctttccatcaaatcaatgtagagataatgtaaactgaaaaaaaatctgcaagataatgtaactgaatgttttaaaaacagaacttgtcactttatataaaagaatagtatgctctatttcctgaatggatgtggaaatgaaagctagcgcacctgcactttgaattcttgcttcttttttattactgttatgattttgctttttacagatgttggacgattttttcttctgattgttgaattcataatcatggtctcatttcctttgcttctttggaatatttctttcaacacattcctttattttattatacattgtgtcctttttttagctattgctgctgttgttttttattctatttacaggatgatttttaaactgtcaaatgaagtagtgttaacctcaaataggctaaatgtgaacaaataaaatacagcaaatactcagatacagctttttatcttt

SEQ ID NO: 189681 - DNA, 5119 bp, Homo sapiens
  Payload ID: 17452
  Gene Symbol: TBC1D9B
  Gene Name: TBC1 domain family, member 9B (with GRAM domain)
  Uniprot ID: Q66K14
  ENST ID: ENST00000355235
  CDS Start-End: 36-3737
ctcgcgggcctcggcccggtgcgagcggctccgcgatgtggctgagcccggaggaggtgctggtggccaatgcgctgtgggtgacggagcgggccaaccccttcttcgtgctgcagcgacgccggggccacggcaggggcggcggccttacgggtcttctcgtgggcaccctggacgtggtgctggactccagtgcccgcgtggccccttaccgcatcctgcaccagacccaggactcccaggtctactggacagtggcgtgtggttcttcccgcaaagagatcacaaaacactgggaatggctggaaaataacttgctccagacactgtccatcttcgacagtgaggaagatatcaccaccttcgtcaagggcaagatacacggaatcatcgcagaagagaacaagaacctgcagccccagggagacgaggaccccgggaagttcaaggaggctgagctgaagatgcggaagcagtttgggatgcctgagggcgagaagctggtgaattactactcctgcagctactggaagggccgcgtgccccggcagggctggctgtacctgacggtcaaccacctgtgcttctactccttcctgctggggaaggaagtgagcctcgtggtgcagtgggtggacataacgcgtctggagaagaacgccaccctgctcttccccgagagcatccgtgtggacacccgcgaccaggagctcttcttctccatgttcctcaacatcggcgagaccttcaagctcatggagcagttggccaacctggccatgcggcagctgctggacagcgagggcttcctggaggacaaggccctgcctaggcccatccggccacacaggaacatctcagccctgaagcgagacctggacgcccgagccaagaatgagtgctaccgagccacgttccggctgcccagggatgagcggctagacggccacacaagctgcaccctgtggacgccgttcaacaagctgcacatccctggccagatgttcatctccaacaactacatctgcttcgccagcaaggaggaggacgcttgccacctcatcatacccctgagggaggtgaccattgtcgaaaaagctgacagctccagcgtgctgcccagccccctgtccatcagcaccaaaagcaaaatgacattcctgtttgccaacctgaaagaccgtgatttcttggtgcagaggatctctgacttcctccagaaaacaccatccaagcagccaggcagtatcgggagcaggaaagccagtgttgtggaccctagcacagagtcttccccagctcctcaggaggggtcggagcagcccgccagcccagcctctcccctcagcagccgccagagcttctgtgcgcaggaggcgccaaccgcatcccagggcctgctgaagctcttccagaaaaactcgcccatggaggaccttggagccaagggggccaaggagaagatgaaagaggagtcatggcacatccacttcttcgagtacgggcgtggcgtgtgcatgtaccgcacagccaagacgcgggcactggtcctgaagggtatccctgagagcctccggggagagctgtggctcctcttctccggggcctggaatgagatggtgactcaccccgggtactatgctgagctggtggagaagtccaccgggaagtacagcctggccacagaggagatcgagcgagacctgcaccgctccatgcccgagcaccctgccttccagaacgagctggggattgctgccctccggcgggtgctgactgcctatgccttccgaaaccccaccatcggctactgccaggcaatgaacatcgtgacctcggtgctcctgctctatggcagtgaggaggaggccttctggctcctggtggccctgtgcgagcgcatgctgcccgactactacaacaccagggtggtgggagccctggtggaccaaggcatcttcgaagagctcacgagagacttcctgccgcagctctcggagaagatgcaggacctgggggtgatctccagcatctcgctgtcctggttcctgaccctcttcctcagcgtcatgcccttcgagagcgccgtggtcatcgtcgactgctttttctatgagggcatcaaggtgatcctgcaggtggccctggccgtcctggacgccaacatggagcagctgctgggctgcagcgacgagggcgaggccatgaccatgctgggcagatacctggataatgtggtcaacaagcagagtgtctctcctcctatcccgcacctccgtgccttgctgagcagcagcgatgacccccctgcagaggtggacatctttgagctcctgaaagtgtcctatgagaaattcagcagcctgagggccgaagacattgagcagatgcggtttaaacagaggctgaaagtgatccagtccttggaggacacggccaagaggagtgtggtccgagctatacctgtggacattggtttctccattgaagagctggaggacctttacatggtgtttaaggccaagcacctggctagccagtactgggggtgcagccgcacaatggccggccgtcgggaccccagcctgccctacctggagcagtaccggattgatgccagccagttccgggaactctttgccagcctgacaccctgggcctgtggctcccacacacctctgctggcagggcgcatgttcaggctcctggacgaaaacaaggactcgctgatcaacttcaaggagttcgtgacagggatgagcgggatgtaccacggggacctgacagagaagctcaaggtgctctacaagctacaccttcccccagctctgagcccagaggaagccgagtcagccctggaggcggcccattatttcacagaggacagctcctcagaagaagcactaccacaggaagagcaagaaggaagtggaagtgaggagagaggagaggagaaggggaccagctctccggactatcggcactaccttcgaatgtgggccaaggagaaagaggctcagaaggagacgattaaggatcttcccaagatgaaccaggagcagttcattgagctgtgcaagacgctttacaacatgttcagtgaagaccccatggagcaggacctgtaccacgccatcgccaccgtggccagcctcctgctccgcatcggagaggtggggaagaagttctcagcccgcacaggcaggaagcccagggactgtgccactgaggaggacgagccaccagcacccgaactgcatcaggacgcagccagggagcttcagcccccagctgcaggagacccccaagccaaagcaggcggagacacacacctcggaaaagccccacaggagagccaggtggtggtggaggggggcagcggcgagggacagggctcaccctcccagctgctgtctgacgatgaaaccaaagacgacatgtccatgtcctcctactcggtggtcagcacgggctccctgcaatgtgaagaccttgcagacgacacggtgctggtgggcggggaggcctgcagccccacagcgcgcatcggcggcaccgtcgacaccgactggtgcatctcctttgagcagatcctggcctccatcctgacggagtccgtgctggtgaacttctttgagaagagagtggacattggactcaagatcaaggaccaaaagaaagtggagagacagttcagcaccgccagtgaccatgagcagcctggagtttccggctgatgcctgcagctgtgaggcctggcccaaggtgtcatcagtggggctggcctcatctcctcctgcctttcctcccttatcagtttctctttaaaggtgtgcccctcctgctctcccaggagcagtgagttgtgagtggaaagaaggctggtgcagacccagctgccttagacagattccctgggcctgcatctcctggcgccggctgcttctgggcccaggaagaggctgtggctcccaccttccttacacctggtgggagcccgcctcgcaccagctgcacctgcctagcattacaggctctcagatctgcccttgcttgcctcatacctctgtgctccacactgcggccaggccagctgagtccctccatccgtggatgctttcctgcagctatgtggtatgggggtcattcctgcctcttggcaccaggttggggggcatgtgcttgttgggcaccaaagtgatggaaccctcaggtgctctccgggagcctgaacctcctgactgaggaacatgggcagaacatgtttattgcacagagtgggcgctgcgcacaggcgtggctgtacacgtgctctcagctcatcatcctttccagtaactttaaaaaaacatccctcaggtcctgatatatttccttggattcatttcacttggctagaaattacactgtgctcaatgccttaataaatccctgaaagaaataaaaaccactgtgtgcaatgccttgctgtggcccccaaccactgcttaggcctcccaacttctccccaggccaagtatggggccctggctgtgttctggaagttcaagacacttagtcctccacagtgggtggaagagtgcaaggtctgccaggtcagatggagacgcagaacctgctggtgcaagctgggcaggtcctgaccaacctgcatcaggggatgccctgagctccacaggtcttcatgggcaggggttgtgggtcctggtgaaggaagtgcatcctcaggcctgggctgtagcaagctgtctgcccttgggttcaagaaccagactgtggagccaaaggtgaccgcagggggccccagggctggagccacaaggataccctcactttgcatgaggagctgaaactgaccagtgtccagtgttagcccccacatggggctgctcttgcttctactaaaagatacagcagttacccccttatccacaggggatacagtggatatctaaaaccagacccccagtggatgtctaaaaccacagataataacaaaccttatacatactgttttttcctatgcatacatacctgtgattaagtttatgaattaggcaccttaagagattgacaacaataactaataataaaatgtaacggttatactgtaatgaaa

SEQ ID NO: 189682 - DNA, 5173 bp, Homo sapiens
  Payload ID: 17452
  Gene Symbol: TBC1D9B
  Gene Name: TBC1 domain family, member 9B (with GRAM domain)
  Uniprot ID: Q66K14
  ENST ID: ENST00000356834
  CDS Start-End: 39-3791
cgtctcgcgggcctcggcccggtgcgagcggctccgcgatgtggctgagcccggaggaggtgctggtggccaatgcgctgtgggtgacggagcgggccaaccccttcttcgtgctgcagcgacgccggggccacggcaggggcggcggccttacgggtcttctcgtgggcaccctggacgtggtgctggactccagtgcccgcgtggccccttaccgcatcctgcaccagacccaggactcccaggtctactggacagtggcgtgtggttcttcccgcaaagagatcacaaaacactgggaatggctggaaaataacttgctccagacactgtccatcttcgacagtgaggaagatatcaccaccttcgtcaagggcaagatacacggaatcatcgcagaagagaacaagaacctgcagccccagggagacgaggaccccgggaagttcaaggaggctgagctgaagatgcggaagcagtttgggatgcctgagggcgagaagctggtgaattactactcctgcagctactggaagggccgcgtgccccggcagggctggctgtacctgacggtcaaccacctgtgcttctactccttcctgctggggaaggaagtgagcctcgtggtgcagtgggtggacataacgcgtctggagaagaacgccaccctgctcttccccgagagcatccgtgtggacacccgcgaccaggagctcttcttctccatgttcctcaacatcggcgagaccttcaagctcatggagcagttggccaacctggccatgcggcagctgctggacagcgagggcttcctggaggacaaggccctgcctaggcccatccggccacacaggaacatctcagccctgaagcgagacctggacgcccgagccaagaatgagtgctaccgagccacgttccggctgcccagggatgagcggctagacggccacacaagctgcaccctgtggacgccgttcaacaagctgcacatccctggccagatgttcatctccaacaactacatctgcttcgccagcaaggaggaggacgcttgccacctcatcatacccctgagggaggtgaccattgtcgaaaaagctgacagctccagcgtgctgcccagccccctgtccatcagcaccaaaagcaaaatgacattcctgtttgccaacctgaaagaccgtgatttcttggtgcagaggatctctgacttcctccagaaaacaccatccaagcagccaggcagtatcgggagcaggaaagccagtgttgtggaccctagcacagagtcttccccagctcctcaggaggggtcggagcagcccgccagcccagcctctcccctcagcagccgccagagcttctgtgcgcaggaggcgccaaccgcatcccagggcctgctgaagctcttccagaaaaactcgcccatggaggaccttggagccaagggggccaaggagaagatgaaagaggagtcatggcacatccacttcttcgagtacgggcgtggcgtgtgcatgtaccgcacagccaagacgcgggcactggtcctgaagggtatccctgagagcctccggggagagctgtggctcctcttctccggggcctggaatgagatggtgactcaccccgggtactatgctgagctggtggagaagtccaccgggaagtacagcctggccacagaggagatcgagcgagacctgcaccgctccatgcccgagcaccctgccttccagaacgagctggggattgctgccctccggcgggtgctgactgcctatgccttccgaaaccccaccatcggctactgccaggcaatgaacatcgtgacctcggtgctcctgctctatggcagtgaggaggaggccttctggctcctggtggccctgtgcgagcgcatgctgcccgactactacaacaccagggtggtgggagccctggtggaccaaggcatcttcgaagagctcacgagagacttcctgccgcagctctcggagaagatgcaggacctgggggtgatctccagcatctcgctgtcctggttcctgaccctcttcctcagcgtcatgcccttcgagagcgccgtggtcatcgtcgactgctttttctatgagggcatcaaggtgatcctgcaggtggccctggccgtcctggacgccaacatggagcagctgctgggctgcagcgacgagggcgaggccatgaccatgctgggcagatacctggataatgtggtcaacaagcagagtgtctctcctcctatcccgcacctccgtgccttgctgagcagcagcgatgacccccctgcagaggtggacatctttgagctcctgaaagtgtcctatgagaaattcagcagcctgagggccgaagacattgagcagatgcggtttaaacagaggctgaaagtgatccagtccttggaggacacggccaagaggagtgtggtccgagctatacctgtggacattggtttctccattgaagagctggaggacctttacatggtgtttaaggccaagcacctggctagccagtactgggggtgcagccgcacaatggccggccgtcgggaccccagcctgccctacctggagcagtaccggattgatgccagccagttccgggaactctttgccagcctgacaccctgggcctgtggctcccacacacctctgctggcagggcgcatgttcaggctcctggacgaaaacaaggactcgctgatcaacttcaaggagttcgtgacagggatgagcgggatgtaccacggggacctgacagagaagctcaaggtgctctacaagctacaccttcccccagctctgagcccagaggaagccgagtcagccctggaggcggcccattatttcacagaggacagctcctcagaagcatctcctctggcctcagatctggatcttttcctgccctgggaggctcaagaagcactaccacaggaagagcaagaaggaagtggaagtgaggagagaggagaggagaaggggaccagctctccggactatcggcactaccttcgaatgtgggccaaggagaaagaggctcagaaggagacgattaaggatcttcccaagatgaaccaggagcagttcattgagctgtgcaagacgctttacaacatgttcagtgaagaccccatggagcaggacctgtaccacgccatcgccaccgtggccagcctcctgctccgcatcggagaggtggggaagaagttctcagcccgcacaggcaggaagcccagggactgtgccactgaggaggacgagccaccagcacccgaactgcatcaggacgcagccagggagcttcagcccccagctgcaggagacccccaagccaaagcaggcggagacacacacctcggaaaagccccacaggagagccaggtggtggtggaggggggcagcggcgagggacagggctcaccctcccagctgctgtctgacgatgaaaccaaagacgacatgtccatgtcctcctactcggtggtcagcacgggctccctgcaatgtgaagaccttgcagacgacacggtgctggtgggcggggaggcctgcagccccacagcgcgcatcggcggcaccgtcgacaccgactggtgcatctcctttgagcagatcctggcctccatcctgacggagtccgtgctggtgaacttctttgagaagagagtggacattggactcaagatcaaggaccaaaagaaagtggagagacagttcagcaccgccagtgaccatgagcagcctggagtttccggctgatgcctgcagctgtgaggcctggcccaaggtgtcatcagtggggctggcctcatctcctcctgcctttcctcccttatcagtttctctttaaaggtgtgcccctcctgctctcccaggagcagtgagttgtgagtggaaagaaggctggtgcagacccagctgccttagacagattccctgggcctgcatctcctggcgccggctgcttctgggcccaggaagaggctgtggctcccaccttccttacacctggtgggagcccgcctcgcaccagctgcacctgcctagcattacaggctctcagatctgcccttgcttgcctcatacctctgtgctccacactgcggccaggccagctgagtccctccatccgtggatgctttcctgcagctatgtggtatgggggtcattcctgcctcttggcaccaggttggggggcatgtgcttgttgggcaccaaagtgatggaaccctcaggtgctctccgggagcctgaacctcctgactgaggaacatgggcagaacatgtttattgcacagagtgggcgctgcgcacaggcgtggctgtacacgtgctctcagctcatcatcctttccagtaactttaaaaaaacatccctcaggtcctgatatatttccttggattcatttcacttggctagaaattacactgtgctcaatgccttaataaatccctgaaagaaataaaaaccactgtgtgcaatgccttgctgtggcccccaaccactgcttaggcctcccaacttctccccaggccaagtatggggccctggctgtgttctggaagttcaagacacttagtcctccacagtgggtggaagagtgcaaggtctgccaggtcagatggagacgcagaacctgctggtgcaagctgggcaggtcctgaccaacctgcatcaggggatgccctgagctccacaggtcttcatgggcaggggttgtgggtcctggtgaaggaagtgcatcctcaggcctgggctgtagcaagctgtctgcccttgggttcaagaaccagactgtggagccaaaggtgaccgcagggggccccagggctggagccacaaggataccctcactttgcatgaggagctgaaactgaccagtgtccagtgttagcccccacatggggctgctcttgcttctactaaaagatacagcagttacccccttatccacaggggatacagtggatatctaaaaccagacccccagtggatgtctaaaaccacagataataacaaaccttatacatactgttttttcctatgcatacatacctgtgattaagtttatgaattaggcaccttaagagattgacaacaataactaataataaaatgtaacggttatactgtaatgaaa

SEQ ID NO: 189683 - DNA, 668 bp, Homo sapiens
  Payload ID: 17452
  Gene Symbol: TBC1D9B
  Gene Name: TBC1 domain family, member 9B (with GRAM domain)
  ENST ID: ENST00000522472
  CDS Start-End: 1-499
ggcgccaaccgcatcccagggcctgctgaagctcttccagaaaaactcgcccatggaggaccttggagccaagggggccaaggagaagatgaaagaggagtcatggcacatccacttcttcgagtacgggcgtggcgtgtgcatgtaccgcacagccaagacgcgggcactggtcctgaagggtatccctgagagcctccggggagagctgtggctcctcttctccggggcctggaatgagatggtgactcaccccgggtactatgctgagctggtggagaagtccaccgggaagtacagcctggccacagaggagatcgagcgagacctgcaccgctccatgcccgagcaccctgccttccagaacgagctggggattgctgccctccggcgggtgctgactgcctatgccttccgaaaccccaccatcggctactgccaggtctgccaggtcagatggagacgcagaacctgctggtgcaagctgggcaggtcctgaccaacctgcatcaggggatgccctgagctccacaggtcttcatgggcaggggttgtgggtcctggtgaaggaagtgcatcctcaggcctgggctgtagcaagctgtctgcccttgggttcaagaaccagactgtggagccaaaggtgaccgcagggggccccagggctg

SEQ ID NO: 189684 - DNA, 927 bp, Homo sapiens
  Payload ID: 17452
  Gene Symbol: TBC1D9B
  Gene Name: TBC1 domain family, member 9B (with GRAM domain)
  ENST ID: ENST00000524222
  CDS Start-End: 1-197
acaggaacatctcagccctgaagcgagacctggacgcccgagccaagaatgagtgctaccgagccacgttccggctgcccagggatgagcggctagacggccacacaagctgcaccctgtggacgccgttcaacaagctgcacatccctggccagatgttcatctccaacaactacatctgcttcgccacaagatgaaccaggagcagttcattgagctgtgcaagacgctttacaacatgttcagtgaagaccccatggagcaggacctgtaccacgccatcgccaccgtggccagcctcctgctccgcatcggagaggtggggaagaagttctcagcccgcacaggcaggaagcccagggactgtgccactgaggaggacgagccaccagcacccgaactgcatcaggacgcagccagggagcttcagcccccagctgcaggagacccccaagccaaagcaggcggagacacacacctcggaaaagccccacaggagagccaggtggtggtggaggggggcagcggcgagggacagggctcaccctcccagctgctgtctgacgatgaaaccaaagacgacatgtccatgtcctcctactcggtggtcagcacgggctccctgcaatgtgaagaccttgcagacgacacggtgctggtgggcggggaggcctgcagccccacagcgcgcatcggcggcaccgtcgacaccgactggtgcatctcctttgagcagatcctggcctccatcctgacggagtccgtgctggtgaacttctttgagaagagagtggacattggactcaagatcaaggaccaaaagaaagtggagagacagttcagcaccgccagtgaccatgagcagcctggagtttccggctgatgcctgcagctgtgaggcctggcccaaggtgtcatcagtggggc

SEQ ID NO: 189685 - DNA, 532 bp, Homo sapiens
  Payload ID: 17452
  Gene Symbol: TBC1D9B
  Gene Name: TBC1 domain family, member 9B (with GRAM domain)
  ENST ID: ENST00000522224
  CDS Start-End: 32-334
cgggcctcggcccggtgcgagcggctccgcgatgtggctgagcccggaggaggtgctggtggccaatgcgctgtgggtgacggagcgggccaaccccttcttcgtgctgcagcgacgccggggccacggcaggggcggcggccttacgggtcttctcgtgggcaccctggacgtggtgctggactccagtgcccgcgtggccccttaccgcatcctgcaccagacccaggactcccaggtctactggacagtggcgtgtgggaatcatcgcagaagagaacaagaacctgcagccccagggagacgaggaccccgggaagttcaaggaggctgagctgaagatgcggaagcagtttgggatgcctgagggcgagaagctggtgaattactactcctgcagctactggaagggccgcgtgccccggcagggctggctgtacctgacggtcaaccacctgtgcttctactccttcctgctggggaaggaagtgagcctcgtggtgcagtgggtggacataacgcgtctggagaa

SEQ ID NO: 189686 - DNA, 2755 bp, Homo sapiens
  Payload ID: 17452
  Gene Symbol: TBC1D9B
  Gene Name: TBC1 domain family, member 9B (with GRAM domain)
  ENST ID: ENST00000519746
  CDS Start-End: 144-1373
cgcccatcctgggaaggggcccggagtgtgagagagagactcccccacgcccatcctggaaaggagcccggagtgtgagctgagtggtccgagctatacctgtggacattggtttctccattgaagagctggaggacctttacatggtgtttaaggccaagcacctggctagccagtactgggggtgcagccgcacaatggccggccgtcgggaccccagcctgccctacctggagcagtaccggattgatgccagccagttccgggaactctttgccagcctgacaccctgggcctgtggctcccacacacctctgctggcagggcgcatgttcaggctcctggacgaaaacaaggactcgctgatcaacttcaaggagttcgtgacagggatgagcgggatgtaccacggggacctgacagagaagctcaaggtgctctacaagctacaccttcccccagctctgagcccagaggaagccgagtcagccctggaggcggcccattatttcacagaggacagctcctcagaagaagcactaccacaggaagagcaagaaggaagtggaagtgaggagagaggagaggagaaggggaccagctctccggactatcggcactaccttcgaatgtgggccaaggagaaagaggctcagaaggagacgattaaggatcttcccaagatgaaccaggagcagttcattgagctgtgcaagacgctttacaacatgttcagtgaagaccccatggagcaggacctgtaccacgccatcgccaccgtggccagcctcctgctccgcatcggagaggtggggaagaagttctcagcccgcacaggcaggaagcccagggactgtgccactgaggaggacgagccaccagcacccgaactgcatcaggacgcagccagggagcttcagcccccagctgcaggagacccccaagccaaagcaggcggagacacacacctcggaaaagccccacaggagagccaggtggtggtggaggggggcagcggcgagggacagggctcaccctcccagctgctgtctgacgatgaaaccaaagacgacatgtccatgtcctcctactcggtggtcagcacgggctccctgcaatgtgaagaccttgcagacgacacggtgctggtgggcggggaggcctgcagccccacagcgcgcatcggcggcaccgtcgacaccgactggtgcatctcctttgagcagatcctggcctccatcctgacggagtccgtgctggtgaacttctttgagaagagagtggacattggactcaagatcaaggaccaaaagaaagtggagagacagttcagcaccgccagtgaccatgagcagcctggagtttccggctgatgcctgcagctgtgaggcctggcccaaggtgtcatcagtggggctggcctcatctcctcctgcctttcctcccttatcagtttctctttaaaggtgtgcccctcctgctctcccaggagcagtgagttgtgagtggaaagaaggctggtgcagacccagctgccttagacagattccctgggcctgcatctcctggcgccggctgcttctgggcccaggaagaggctgtggctcccaccttccttacacctggtgggagcccgcctcgcaccagctgcacctgcctagcattacaggctctcagatctgcccttgcttgcctcatacctctgtgctccacactgcggccaggccagctgagtccctccatccgtggatgctttcctgcagctatgtggtatgggggtcattcctgcctcttggcaccaggttggggggcatgtgcttgttgggcaccaaagtgatggaaccctcaggtgctctccgggagcctgaacctcctgactgaggaacatgggcagaacatgtttattgcacagagtgggcgctgcgcacaggcgtggctgtacacgtgctctcagctcatcatcctttccagtaactttaaaaaaacatccctcaggtcctgatatatttccttggattcatttcacttggctagaaattacactgtgctcaatgccttaataaatccctgaaagaaataaaaaccactgtgtgcaatgccttgctgtggcccccaaccactgcttaggcctcccaacttctccccaggccaagtatggggccctggctgtgttctggaagttcaagacacttagtcctccacagtgggtggaagagtgcaaggtctgccaggtcagatggagacgcagaacctgctggtgcaagctgggcaggtcctgaccaacctgcatcaggggatgccctgagctccacaggtcttcatgggcaggggttgtgggtcctggtgaaggaagtgcatcctcaggcctgggctgtagcaagctgtctgcccttgggttcaagaaccagactgtggagccaaaggtgaccgcagggggccccagggctggagccacaaggataccctcactttgcatgaggagctgaaactgaccagtgtccagtgttagcccccacatggggctgctcttgcttctactaaaagatacagcagttacccccttatccacaggggatacagtggatatctaaaaccagacccccagtggatgtctaaaaccacagataataacaaaccttatacatactgttttttcctatgcatacatacctgtgattaagtttatgaattaggcaccttaagagattgacaacaataactaataataaaatgtaacggttatactgtaatgaaa

SEQ ID NO: 189687 - DNA, 303 bp, Homo sapiens
  Payload ID: 17452
  Gene Symbol: TBC1D9B
  Gene Name: TBC1 domain family, member 9B (with GRAM domain)
  ENST ID: ENST00000630103
  CDS Start-End: 1-303
atgtggctgagcccggaggaggtgctggtggccaatgcgctgtgggtgacggagcgggccaaccccttcttcgtgctgcagcgacgccggggccacggcaggggcggcggccttacgggtcttctcgtgggcaccctggacgtggtgctggactccagtgcccgcgtggccccttaccgcatcctgcaccagacccaggactcccaggtctactggacagtggcgtgtgggaatcatcgcagaagagaacaagaacctgcagccccagggagacgaggaccccgggaagttcaaggaggctga

SEQ ID NO: 189688 - DNA, 2441 bp, Homo sapiens
  Payload ID: 17453
  Gene Symbol: TBCCD1
  Gene Name: TBCC domain containing 1
  Uniprot ID: Q9NVR7
  ENST ID: ENST00000338733
  CDS Start-End: 130-1803
aggagggtgaggggcgggcccagcgagcggacgccgggcgcggcggcgcgcggagaagtgcggcggagcggcgcctgcattagcaggtatgcaaagaagccttttcaccctgatgtccttagagataatatggatcagtccagagttctcctctgggtgaaagcagaaccctttatagtgggtgccttgcaggtcccccctccatccaagtttagtcttcactatctcaggaagatatccacctatgtgcaaatccgggccacagaaggagcttacccgcgcctctactggtctacatggaggcacatcgcttgtgggaagctgcagttggccaaggacctggcgtggctttacttcgaaatatttgatagtctttcaatgaagacacctgaggagcgcctggaatggtctgaggttctgtccaactgcatgtctgaggaggaagttgaaaagcagagaaatcagctttcagtggacacgctacagtttctgctcttcttatacattcaacagttgaacaaggtctccctaaggacatctttgattggcgaagagtggcccagtcccagaaacaaatctcagtctcctgacctgactgaaaaatctaattgtcataataagaactggaatgattacagtcaccaagcttttgtctatgatcatctgtctgatctcctcgagctgcttttagatccaaaacaactcactgcatcatttcattcaacccatagtagtctagtgtctcgagaagctgttgtggcgctcagcttccttattgaaggtacaataagtagagccaggaagatctatccacttcatgaacttgcactgtggcaaccactgcatgcagatagtggcttctcaaagatctctaagactttctctttctacaaactggaaacctggttgaggtcctgtttgactgggaatccatttggtacatcagcttgcctcaagtctggaaagaaattggcttgggctcatcaagttgaagggaccaccaaaagagctaagattgcttgtaatactcatgtggcccctaggatgcaccgactggtagtgatgagccaggtttacaagcagacactggctaagagctcagacactctggcgggggcacatgtaaagattcatcgttgcaacgaatcttttatatatctgctctctcccttacgatctgtgacaattgagaagtgcaggaatagcatctttgtcttgggccctgtagggactacacttcacctccacagttgtgacaatgttaaagtcattgctgtttgccatcgtttgtccatctcttctacaacaggttgcatctttcacgttcttacgcctacacgcccacttattctctctgggaaccagacagtaacttttgccccttttcatacacattacccaatgctagaggaccatatggccaggactggccttgctacagtgcctaactattgggataatccaatggttgtgtgcagagagaacagcgacacaagagtcttccagcttttaccaccttgtgaattctatgtatttattattccctttgaaatggaaggggacacaacagagatacccgggggtcttccatctgtatatcagaaagcactgggtcaaagagaacagaagatacagatctggcagaaaactgtgaaggaggctcatttgacaaaggatcaaaggaagcagttccaggtactggtagagaacaagttttatgaatggttgattaatacaggacatcgccaacagctggacagccttgtaccccctgcagcaggctccaaacaagcagctggataaggatcttacatgcagacactgggccctggaaatacaaggataaatggaggatggtgctcatcttgaaacttgaaactaaattgggaaggtgctattgctgcttaagagacattgggacttttctgtctttttttttttttttttttgaggcagagtcttgttctgtcgcccaggctggagtgcagtggcgcgatctcggctcactgcaagctctgcctcccgggttcacgccattctcctgcctcagcctcctgagtagctgggactacaggcgcccgccaccacgcccggccaattttttttgtatttttagtagagacggggtttcaccgtgttagtcaggatggtctcgatttcctgacctcgtgatccgcccatctcggcctcccaaagtgctgggattacaggcgtgagccaccgtgcccagccttctgttctatttaagaactttgatttccattccattttcatttattactgtttaggccgaattttcgctaaacttctgactttcatataaacatattgcttatagaacatcagaagactcgtctttgtgatgcccaaatgaaaaagttggtgaaggtagtaccattgtatgtatgttaatattaaagcaactgagtgtagatttgcaa

SEQ ID NO: 189689 - DNA, 1158 bp, Homo sapiens
  Payload ID: 17453
  Gene Symbol: TBCCD1
  Gene Name: TBCC domain containing 1
  ENST ID: ENST00000413695
  CDS Start-End: 481-1158
acgtcagagggtcgcgccgctgcaggaacccgctctgcctgagctaccgcgagtcgtagaaaattacgtaatgatagggggccggtcagagtgagggcacctgaggtacacgaaatccctccggcttgcccacttcctcggactttccaccaatcaggagcttcctccccagcaccaaccaattgtgggagagaagttttctctgtgctacaagcccggaatttcattcatacccagctacgctccgaatgagggagcagaggtacagcggccgaatgagcgggaacagttattccacgacaggtgtacatcagacgcattgcttaggcctcttattttacgttctccaagcaactccataagacaactgtctcggaaaggctacagtgatgacagaccgacttaagttcggattcggcttccaccgcttcttagtggtatgcaaagaagccttttcaccctgatgtccttagagataatatggatcagtccagagttctcctctgggtgaaagcagaaccctttatagtgggtgccttgcaggtcccccctccatccaagtttagtcttcactatctcaggaagatatccacctatgtgcaaatccgggccacagaaggagcttacccgcgcctctactggtctacatggaggcacatcgcttgtgggaagctgcagttggccaaggacctggcgtggctttacttcgaaatatttgatagtctttcaatgaagacacctgaggagcgcctggaatggtctgaggttctgtccaactgcatgtctgaggaggaagttgaaaagcagagaaatcagctttcagtggacacgctacagtttctgctcttcttatacattcaacagttgaacaaggtctccctaaggacatctttgattggcgaagagtggcccagtcccagaaacaaatctcagtctcctgacctgactgaaaaatctaattgtcataataagaactggaatgattacagtcaccaagcttttgtctatgatcatctgtctgatctcctcgagctgcttttagatccaaaacaactcactgcatcatttcattcaacccatagtagtctagtgtctcgagaagctgttgtggcgctcagcttccttattgaaggtacaataagtagagccaggaagatc

SEQ ID NO: 189690 - DNA, 2186 bp, Homo sapiens
  Payload ID: 17453
  Gene Symbol: TBCCD1
  Gene Name: TBCC domain containing 1
  Uniprot ID: Q9NVR7
  ENST ID: ENST00000446782
  CDS Start-End: 165-1550
attcatacccagctacgctccgaatgagggagcagaggtacagcggccgaatgagcgggaacagttattccacgacaggtgtacatcagacgcattgcttaggcctcttattttacgttctccaagcaactccataagacaactgtctcggaaaggctacagtgatgacagaccgacttaagttcggattcggcttccaccgcttcttagtgctttcagtggacacgctacagtttctgctcttcttatacattcaacagttgaacaaggtctccctaaggacatctttgattggcgaagagtggcccagtcccagaaacaaatctcagtctcctgacctgactgaaaaatctaattgtcataataagaactggaatgattacagtcaccaagcttttgtctatgatcatctgtctgatctcctcgagctgcttttagatccaaaacaactcactgcatcatttcattcaacccatagtagtctagtgtctcgagaagctgttgtggcgctcagcttccttattgaaggtacaataagtagagccaggaagatctatccacttcatgaacttgcactgtggcaaccactgcatgcagatagtggcttctcaaagatctctaagactttctctttctacaaactggaaacctggttgaggtcctgtttgactgggaatccatttggtacatcagcttgcctcaagtctggaaagaaattggcttgggctcatcaagttgaagggaccaccaaaagagctaagattgcttgtaatactcatgtggcccctaggatgcaccgactggtagtgatgagccaggtttacaagcagacactggctaagagctcagacactctggcgggggcacatgtaaagattcatcgttgcaacgaatcttttatatatctgctctctcccttacgatctgtgacaattgagaagtgcaggaatagcatctttgtcttgggccctgtagggactacacttcacctccacagttgtgacaatgttaaagtcattgctgtttgccatcgtttgtccatctcttctacaacaggttgcatctttcacgttcttacgcctacacgcccacttattctctctgggaaccagacagtaacttttgccccttttcatacacattacccaatgctagaggaccatatggccaggactggccttgctacagtgcctaactattgggataatccaatggttgtgtgcagagagaacagcgacacaagagtcttccagcttttaccaccttgtgaattctatgtatttattattccctttgaaatggaaggggacacaacagagatacccgggggtcttccatctgtatatcagaaagcactgggtcaaagagaacagaagatacagatctggcagaaaactgtgaaggaggctcatttgacaaaggatcaaaggaagcagttccaggtactggtagagaacaagttttatgaatggttgattaatacaggacatcgccaacagctggacagccttgtaccccctgcagcaggctccaaacaagcagctggataaggatcttacatgcagacactgggccctggaaatacaaggataaatggaggatggtgctcatcttgaaacttgaaactaaattgggaaggtgctattgctgcttaagagacattgggacttttctgtctttttttttttttttttttgaggcagagtcttgttctgtcgcccaggctggagtgcagtggcgcgatctcggctcactgcaagctctgcctcccgggttcacgccattctcctgcctcagcctcctgagtagctgggactacaggcgcccgccaccacgcccggccaattttttttgtatttttagtagagacggggtttcaccgtgttagtcaggatggtctcgatttcctgacctcgtgatccgcccatctcggcctcccaaagtgctgggattacaggcgtgagccaccgtgcccagccttctgttctatttaagaactttgatttccattccattttcatttattactgtttaggccgaattttcgctaaacttctgactttcatataaacatattgcttatagaacatcagaagactcgtctttgtgatgcccaaatgaaaaagttggtgaaggtagtaccattgtatgtatgttaatattaaagcaactgagtgtagatttgc

SEQ ID NO: 189691 - DNA, 460 bp, Homo sapiens
  Payload ID: 17453
  Gene Symbol: TBCCD1
  Gene Name: TBCC domain containing 1
  ENST ID: ENST00000430560
  CDS Start-End: 17-460
tgtccttagagataatatggatcagtccagagttctcctctgggtgaaagcagaaccctttatagtgggtgccttgcaggtcccccctccatccaagtttagtcttcactatctcaggaagatatccacctatgtgcaaatccgggccacagaaggagcttacccgcgcctctactggtctacatggaggcacatcgcttgtgggaagctgcagttggccaaggacctggcgtggctttacttcgaaatatttgatagtctttcaatgaagacacctgaggagcgcctggaatggtctgaggttctgtccaactgcatgtctgaggaggaagttgaaaagcagagaaatcagttgaacaaggtctccctaaggacatctttgattggcgaagagtggcccagtcccagaaacaaatctcagtctcctgacctgactgaaaaatctaattgtcataataag

SEQ ID NO: 189692 - DNA, 3058 bp, Homo sapiens
  Payload ID: 17453
  Gene Symbol: TBCCD1
  Gene Name: TBCC domain containing 1
  Uniprot ID: Q9NVR7
  ENST ID: ENST00000424280
  CDS Start-End: 481-2154
acgtcagagggtcgcgccgctgcaggaacccgctctgcctgagctaccgcgagtcgtagaaaattacgtaatgatagggggccggtcagagtgagggcacctgaggtacacgaaatccctccggcttgcccacttcctcggactttccaccaatcaggagcttcctccccagcaccaaccaattgtgggagagaagttttctctgtgctacaagcccggaatttcattcatacccagctacgctccgaatgagggagcagaggtacagcggccgaatgagcgggaacagttattccacgacaggtgtacatcagacgcattgcttaggcctcttattttacgttctccaagcaactccataagacaactgtctcggaaaggctacagtgatgacagaccgacttaagttcggattcggcttccaccgcttcttagtggtatgcaaagaagccttttcaccctgatgtccttagagataatatggatcagtccagagttctcctctgggtgaaagcagaaccctttatagtgggtgccttgcaggtcccccctccatccaagtttagtcttcactatctcaggaagatatccacctatgtgcaaatccgggccacagaaggagcttacccgcgcctctactggtctacatggaggcacatcgcttgtgggaagctgcagttggccaaggacctggcgtggctttacttcgaaatatttgatagtctttcaatgaagacacctgaggagcgcctggaatggtctgaggttctgtccaactgcatgtctgaggaggaagttgaaaagcagagaaatcagctttcagtggacacgctacagtttctgctcttcttatacattcaacagttgaacaaggtctccctaaggacatctttgattggcgaagagtggcccagtcccagaaacaaatctcagtctcctgacctgactgaaaaatctaattgtcataataagaactggaatgattacagtcaccaagcttttgtctatgatcatctgtctgatctcctcgagctgcttttagatccaaaacaactcactgcatcatttcattcaacccatagtagtctagtgtctcgagaagctgttgtggcgctcagcttccttattgaaggtacaataagtagagccaggaagatctatccacttcatgaacttgcactgtggcaaccactgcatgcagatagtggcttctcaaagatctctaagactttctctttctacaaactggaaacctggttgaggtcctgtttgactgggaatccatttggtacatcagcttgcctcaagtctggaaagaaattggcttgggctcatcaagttgaagggaccaccaaaagagctaagattgcttgtaatactcatgtggcccctaggatgcaccgactggtagtgatgagccaggtttacaagcagacactggctaagagctcagacactctggcgggggcacatgtaaagattcatcgttgcaacgaatcttttatatatctgctctctcccttacgatctgtgacaattgagaagtgcaggaatagcatctttgtcttgggccctgtagggactacacttcacctccacagttgtgacaatgttaaagtcattgctgtttgccatcgtttgtccatctcttctacaacaggttgcatctttcacgttcttacgcctacacgcccacttattctctctgggaaccagacagtaacttttgccccttttcatacacattacccaatgctagaggaccatatggccaggactggccttgctacagtgcctaactattgggataatccaatggttgtgtgcagagagaacagcgacacaagagtcttccagcttttaccaccttgtgaattctatgtatttattattccctttgaaatggaaggggacacaacagagatacccgggggtcttccatctgtatatcagaaagcactgggtcaaagagaacagaagatacagatctggcagaaaactgtgaaggaggctcatttgacaaaggatcaaaggaagcagttccaggtactggtagagaacaagttttatgaatggttgattaatacaggacatcgccaacagctggacagccttgtaccccctgcagcaggctccaaacaagcagctggataaggatcttacatgcagacactgggccctggaaatacaaggataaatggaggatggtgctcatcttgaaacttgaaactaaattgggaaggtgctattgctgcttaagagacattgggacttttctgtctttttttttttttttttttgaggcagagtcttgttctgtcgcccaggctggagtgcagtggcgcgatctcggctcactgcaagctctgcctcccgggttcacgccattctcctgcctcagcctcctgagtagctgggactacaggcgcccgccaccacgcccggccaattttttttgtatttttagtagagacggggtttcaccgtgttagtcaggatggtctcgatttcctgacctcgtgatccgcccatctcggcctcccaaagtgctgggattacaggcgtgagccaccgtgcccagccttctgttctatttaagaactttgatttccattccattttcatttattactgtttaggccgaattttcgctaaacttctgactttcatataaacatattgcttatagaacatcagaagactcgtctttgtgatgcccaaatgaaaaagttggtgaaggtagtaccattgtatgtatgttaatattaaagcaactgagtgtagatttgcaactatagtgtgtatcttcatttgtgtgatgaaagagttttattctttctagagttaaataagagttttatagttctttgtaactatttaaaaggaaattgctactccttttaaaaaataattggaaaggaagtatgatttgttggtatatagacatagaaatagttttatactatattttagtccttaaagtatggaacttaatgaaattgtttaaaaaaatctttatttttcacttcctgcttcaaattttcaataaacaaactct

SEQ ID NO: 189693 - DNA, 4121 bp, Homo sapiens
  Payload ID: 17454
  Gene Symbol: TBKBP1
  Gene Name: TBK1 binding protein 1
  Uniprot ID: A7MCY6
  ENST ID: ENST00000361722
  CDS Start-End: 850-2697
gagagaagtacacacgcaccccctcactgcctactcctgctttcgggagcctgagtcattcctgccccctcgtagggttccccatttcccggtgcgcgggcaccctgagacagccttgggaattcgttcgcgtccccttccacctgggtccccttccccagtttgcgccccgtaacactcagccaaggacttcctgtgggtcccaggtcaggggccaaggggtcctggaccgctgccacagccccggtgcgcccgggggaggcgcttccttttcctgaactctgggatcctgcgggaggaagtggggaagttgggcgggggtgcagccgagggcgtgccgactgtggaggggccgaccctcgcgcagctctgggccttccttggggaggagctggggtgccagaggcccaggctgaggagcttggcggcgaggtatttggggaagtaaggcctggggtggagaagcgcggaggaatgggccgggcccggctgggaaggcagccctctcccatccacaggtctccctgggttctggcaggagcctgcccctgctgccggcctggcttacttgtccctacttgtcaacaccctggcagcggggtcttcacctggttccagccccttttccccaaggcggcagagaggatggggctgaggagtctgggaaggggccatgggagtccctgctgagctcggggcaggaagtttctgggttgcatcttagccggccccagggagtgcagagccagggagaggggtaccagggacaaaccctagacagacggccctgtccacggttgctcctgctctcctaggaggccccgtgtgggccgcggcccggccctcaccatggagtccatgttcgaggacgacatcagcatcctgacgcaggaggccctggggcctagtgaggtgtggctggacagtcccggagacccctcgcttgggggcgacatgtgctccgcctcccactttgccctcatcactgcttacggagacatcaaggaacggctggggggcctggagagggagaacgccaccctccgacgccgcctcaaagtctacgagatcaagtacccactgatcagtgactttggagaggagcatggcttttctctgtatgaaatcaaggatggctccctgctggaggtggagaaggtcagcctgcagcaacggctcaaccagttccagcatgagttacagaagaacaaggagcaggaagaacagcttggagagatgatccaggcctacgagaaactctgcgtggagaagagtgacttggagacagagctgagggagatgagggccctggtggagacgcacctgcgtcagatctgtggtttggagcagcagctgcggcaacagcaaggcctccaggatgcagccttctccaacctgagcccaccgccagcccccgcccctccctgcactgatttagacctgcactacctggcactgagagggggatctggcttgagtcatgcaggctggccgggctccacacccagtgtgagtgacctggagcggcggcggctagaagaggctttggaggccgcgcagggagaggcccggggggctcagctccgggaggagcagctccaggccgagtgcgagcggctgcagggggagctgaagcagctgcaggagacccgggcccaggatctggcctccaaccagtcggagcgagacatggcgtgggtgaaaagagttggggatgatcaggtgaatttggcgctggcctacaccgagctgacggaggagctgggccggcttcgggagttgagttccctacaggggagaatcttgaggactctgttgcaggaacaggcccggagtggcggccagaggcactcgccgctgtcacaacgccactccccggccccccagtgcccctccccctccccgcctgcccgagcggctcccccgtgccccccgtgccagtcccccgtcccccagcgccgctctcccgtgcccccgtgcccctcgccgcagcagcgccgctctccggcctcaccctcctgcccgtcgcccgtcccgcagcgccgctcgccggtgccgccgtcgtgccagtcccccagcccgcagcgccgttccccggtgccccccagctgcccggccccgcagccccggccaccgccgccgcccccgccgggcgagaggacgctggccgagcgcgcctacgccaagccgcccagccaccacgtgaaggccggcttccagggccgccgcagctactctgagctggcggagggcgcggcctacgcgggcgcctccccgccctggctgcaggccgaagcggccactctccccaagccccgggcctacggcagcgagctctacggccctggcaggcccctcagcccgcggcgcgccttcgagggcatccggctgcgcttcgagaagcagccgtcggaggaggacgagtgggctgtgcccaccagcccgcccagcccggaggtgggcaccatccgctgcgcctccttctgcgcgggcttccccatccccgagtcgcccgccgccaccgcctacgcccacgccgagcacgcgcagtcctggccgtccatcaacttgctgatggagacggtgggctccgacatccgcagctgccccctctgccagctgggtttccctgtcgggtacccggatgatgccctcatcaaacacattgactcccacctggagaacagcaagatctagggcaccagccccacccactggctgtttctccgtcctctcctatcacccccaaacactcactttgaatgctgcatgaatctcgtggggggtccctgcccttgcgacccccagatacctccacttgctaccgagtcaacgtgtgtgccatcttccctggtccaggcaccactcagctctggctcttcctgggaggtcagccgaggctccccccatgctcctggtttctgcttaggaggtggggacttgggctgggatggggacggcatacccctcccaggcctctccctctgcctttctgttcttaatcagggttggatccaagaaggtgtccagtgcttgggcctggggtggggggaaggtgttagaggactccaggagctcctgcacccctccccaaatgtccatctttctcagacggggctctgtctggggagcacccacaggctgcctttggggtcccagagcctgctctgtgcactgaccccagttcctccatcctgtggccagcctagggctcatggcatgggcccccactgggggagggaggcatcttgtttcttgtggttccctgcaggccagtcctgtcctcctttccctgttctgcccactctggggaatagggaggggaggagaggagaggagagggaggatcctggaggactgggaagatctagcctaaagaggcttctctgagggccagggccctacagcatgcccctacggccaggggactgtctgccagcctcccaggcccatgccctcctggtgcccctggcactgaggcacagatcgtcaaggcaggtaccccctcaacccttcttccactggagcccctgacaccacaggtgccctggagcccttgtgtgactcagcctctgttagctgggtgggtgtcatcagcccctgcctcccaggccagaacctgagaacgggcccagggtgctgtggagatcaacttcaaaagagctaaccccttcccacactccacccacccacctacatttcctctgtgaaatctacctcagagttgtaccctcagaaggacgggtaagcaggaggccagggggtccccagggctgaggtggggagccttctacggcgaaagcctgccaccccacaatgaatccaccctgctccactgcgcgcctctcccaggtctcagctctgggtggggagcagtggccgctaccgacagcgcatgtcccgctcttatccaactcttccaggccccacctccctgcacccctcccctctatagagcaggggagtgaaggggtatgtcaggcggggaaggggccaaggacacgtcattgtaccctgagcgtccccagggagtggaaatggggaagggggcctggagaggggaggcaggggcccctgtgctctctgaacaagttgaaagtccaaataaaacttacctgttc

SEQ ID NO: 189694 - DNA, 705 bp, Homo sapiens
  Payload ID: 17454
  Gene Symbol: TBKBP1
  Gene Name: TBK1 binding protein 1
  ENST ID: ENST00000537587
  CDS Start-End: 80-705
gggcgctgggcccagagaggaatgcggaggaaggaggcatttgtggaggccccgtgtgggccgcggcccggccctcaccatggagtccatgttcgaggacgacatcagcatcctgacgcaggaggccctggggcctagtgaggtgtggctggacagtcccggagacccctcgcttgggggcgacatgtgctccgcctcccactttgccctcatcactgcttacggagacatcaaggaacggctggggggcctggagagggagaacgccaccctccgacgccgcctcaaagtctacgagatcaagtacccactgatcagtgactttggagaggagcatggcttttctctgtatgaaatcaaggatggctccctgctggaggtggagaaggtcagcctgcagcaacggctcaaccagttccagcatgagttacagaagaacaaggagcaggaagaacagcttggagagatgatccaggcctacgagaaactctgcgtggagaagagtgacttggagacagagctgagggagatgagggccctggtggagacgcacctgcgtcagatctgtggtttggagcagcagctgcggcaacagcaaggcctccaggatgcagccttctccaacctgagcccaccgccagcccccgcccctccctgcactgatttagacctgcactacctggcactgagagggggatctggctt

SEQ ID NO: 189695 - DNA, 733 bp, Homo sapiens
  Payload ID: 17454
  Gene Symbol: TBKBP1
  Gene Name: TBK1 binding protein 1
  ENST ID: ENST00000578982
  CDS Start-End: 149-733
gacagggcgaggagcagagcgcggtaccaggggggtgggggcactggtgcccgtttggggagggagcaggcggagggggtaagctgcgattacaagcaggaaccggcagcagctgaggccccgtgtgggccgcggcccggccctcaccatggagtccatgttcgaggacgacatcagcatcctgacgcaggaggccctggggcctagtgaggtgtggctggacagtcccggagacccctcgcttgggggcgacatgtgctccgcctcccactttgccctcatcactgcttacggagacatcaaggaacggctggggggcctggagagggagaacgccaccctccgacgccgcctcaaagtctacgagatcaagtacccactgatcagtgactttggagaggagcatggcttttctctgtatgaaatcaaggatggctccctgctggaggtggagaaggtcagcctgcagcaacggctcaaccagttccagcatgagttacagaagaacaaggagcaggaagaacagcttggagagatgatccaggcctacgagaaactctgcgtggagaagagtgacttggagacagagctgagggagatgagggccctggtggagacgcacctgcgtcagatctgtggtttggagcagcagctgcggcaacagcaaggcctccaggatgcagccttctccaacctgagcccaccgccagcccccgcccctccctgcactgat

SEQ ID NO: 189696 - DNA, 2010 bp, Homo sapiens
  Payload ID: 17454
  Gene Symbol: TBKBP1
  Gene Name: TBK1 binding protein 1
  Uniprot ID: A7MCY6
  ENST ID: ENST00000622396
  CDS Start-End: 429-1097
ttggcggcgaggtatttggggaagtaaggcctggggtggagaagcgcggaggaatgggccgggcccggctgggaaggcagccctctcccatccacaggtctccctgggttctggcaggagcctgcccctgctgccggcctggcttacttgtccctacttgtcaacaccctggcagcggggtcttcacctggttccagccccttttccccaaggcggcagagaggatggggctgaggagtctgggaaggggccatgggagtccctgctgagctcggggcaggaagtttctgggttgcatcttagccggccccagggagtgcagagccagggagaggggtaccagggacaaaccctagacagacggccctgtccacggttgctcctgctctcctaggaggccccgtgtgggccgcggcccggccctcaccatggagtccatgttcgaggacgacatcagcatcctgacgcaggaggccctggggcctagtgaggtgtggctggacagtcccggagacccctcgcttgggggcgacatgtgctccgcctcccactttgccctcatcactgcttacggagacatcaaggaacggctggggggcctggagagggagaacgccaccctccgacgccgcctcaaagtctacgagatcaagtacccactgatcagtgactttggagaggagcatggcttttctctgtatgaaatcaaggatggctccctgctggaggtggagaaggtcagcctgcagcaacggctcaaccagttccagcatgagttacagaagaacaaggagcaggaagaacagcttggagagatgatccaggcctacgagaaactctgcgtggagaagagtgacttggagacagagctgagggagatgagggccctggtggagacgcacctgcgtcagatctgtggtttggagcagcagctgcggcaacagcaaggcctccaggatgcagccttctccaacctgagcccacgccgagcacgcgcagtcctggccgtccatcaacttgctgatggagacggtgggctccgacatccgcagctgccccctctgccagctgggtttccctgtcgggtacccggatgatgccctcatcaaacacattgactcccacctggagaacagcaagatctagggcaccagccccacccactggctgtttctccgtcctctcctatcacccccaaacactcactttgaatgctgcatgaatctcgtggggggtccctgcccttgcgacccccagatacctccacttgctaccgagtcaacgtgtgtgccatcttccctggtccaggcaccactcagctctggctcttcctgggaggtcagccgaggctccccccatgctcctggtttctgcttaggaggtggggacttgggctgggatggggacggcatacccctcccaggcctctccctctgcctttctgttcttaatcagggttggatccaagaaggtgtccagtgcttgggcctggggtggggggaaggtgttagaggactccaggagctcctgcacccctccccaaatgtccatctttctcagacggggctctgtctggggagcacccacaggctgcctttggggtcccagagcctgctctgtgcactgaccccagttcctccatcctgtggccagcctagggctcatggcatgggcccccactgggggagggaggcatcttgtttcttgtggttccctgcaggccagtcctgtcctcctttccctgttctgcccactctggggaatagggaggggaggagaggagaggagagggaggatcctggaggactgggaagatctagcctaaagaggcttctctgagggccagggccctacagcatgcccctacggccaggggactgtctgccagcctcccaggcccatgccctcctggtgcccctggcactgaggcacagatcgtcaaggcaggtaccccctcaacccttcttccactggagcccctgacaccacaggtgccctggagcccttgtg

SEQ ID NO: 189697 - DNA, 1465 bp, Homo sapiens
  Payload ID: 17455
  Gene Symbol: TBX1
  Gene Name: T-box 1
  Uniprot ID: O43435
  ENST ID: ENST00000329705
  CDS Start-End: 130-1326
ccggcagggggagcgaggaggaagggaaccgcggccgggccagcggaggcggcggagcgcaccgcccaccagggctcagggtcctccgaccgggtgaagcttcgctggctgccaggatccccggcagggatgcacttcagcaccgtcaccagggacatggaagccttcacggccagcagcctgagcagcctgggggccgcggggggcttcccgggcgccgcgtcgcccggcgccgacccgtacggcccgcgcgagcccccgccgccgccgccgcgctacgacccgtgcgccgccgccgcccccggcgccccgggcccgccgccgccgccgcacgcctacccgtttgcgccggccgccggggccgccaccagcgccgccgccgagcccgagggccccggggccagctgcgcggccgcagccaaggcgccggtgaagaagaacgcgaaggtggccggtgtgagcgtgcagctagagatgaaggcgctgtgggacgagttcaaccagctgggcaccgagatgatcgtcaccaaggccggcaggcggatgtttcccaccttccaagtgaagctcttcggcatggatcccatggccgactatatgctgctcatggacttcgtgccggtggacgataagcgctaccggtacgccttccacagctcctcctggctggtggcggggaaggccgaccctgccacgccaggccgcgtgcactaccacccggactcgcctgccaagggcgcgcagtggatgaagcaaatcgtgtccttcgacaagctcaagctgaccaacaacctactggacgacaacggccacattattctgaattccatgcacagataccagccccgcttccacgtggtctatgtggacccacgcaaagatagcgagaaatatgccgaggagaacttcaaaacctttgtgttcgaggagacacgattcaccgcggtcactgcctaccagaaccatcggatcacgcagctcaagattgccagcaatcccttcgcgaaaggcttccgggactgtgaccctgaggactggccccggaaccaccggcccggcgcactgccgctcatgagcgccttcgcgcgctcgcggaaccccgtggcttccccgacgcagcccagcggcacggagaaaggtggacatgtcctgaaggacaaggaagtgaaagctgagacgtctaggaacacaccagagagagaagtggagcttctgagggatgcaggtggctgtgtgaacctggggctcccctgccccgcagagtgccaacccttcaatacccagggcctggtggctgggaggaccgcaggtgaccgtctttgttgaatgctgaggccgggccatgggcacatggagttgtcgtgtttcccttcactttggttcatgtttgaaatttccaaaattaaaaaaacagtgacttgttcagtaaattccaatatgaataaagtgcatgttttgtaataaa

SEQ ID NO: 189698 - DNA, 2084 bp, Homo sapiens
  Payload ID: 17455
  Gene Symbol: TBX1
  Gene Name: T-box 1
  Uniprot ID: O43435
  ENST ID: ENST00000332710
  CDS Start-End: 130-1617
ccggcagggggagcgaggaggaagggaaccgcggccgggccagcggaggcggcggagcgcaccgcccaccagggctcagggtcctccgaccgggtgaagcttcgctggctgccaggatccccggcagggatgcacttcagcaccgtcaccagggacatggaagccttcacggccagcagcctgagcagcctgggggccgcggggggcttcccgggcgccgcgtcgcccggcgccgacccgtacggcccgcgcgagcccccgccgccgccgccgcgctacgacccgtgcgccgccgccgcccccggcgccccgggcccgccgccgccgccgcacgcctacccgtttgcgccggccgccggggccgccaccagcgccgccgccgagcccgagggccccggggccagctgcgcggccgcagccaaggcgccggtgaagaagaacgcgaaggtggccggtgtgagcgtgcagctagagatgaaggcgctgtgggacgagttcaaccagctgggcaccgagatgatcgtcaccaaggccggcaggcggatgtttcccaccttccaagtgaagctcttcggcatggatcccatggccgactatatgctgctcatggacttcgtgccggtggacgataagcgctaccggtacgccttccacagctcctcctggctggtggcggggaaggccgaccctgccacgccaggccgcgtgcactaccacccggactcgcctgccaagggcgcgcagtggatgaagcaaatcgtgtccttcgacaagctcaagctgaccaacaacctactggacgacaacggccacattattctgaattccatgcacagataccagccccgcttccacgtggtctatgtggacccacgcaaagatagcgagaaatatgccgaggagaacttcaaaacctttgtgttcgaggagacacgattcaccgcggtcactgcctaccagaaccatcggatcacgcagctcaagattgccagcaatcccttcgcgaaaggcttccgggactgtgaccctgaggactggccccggaaccaccggcccggcgcactgccgctcatgagcgccttcgcgcgctcgcggaaccccgtggcttccccgacgcagcccagcggcacggagaaagacgcggctgaggcccggcgagaattccagcgcgacgcgggcgggccagcagtgctcggggacccggcgcatcctccgcagctgctggcccgggtgctaagcccctcgctgcccggggccggcggcgccggcggcttagtcccgctgcccggcgcgcccggaggccggcccagtcccccgaaccccgagctgcgcctggaggcgcccggcgcatcggagccgctgcaccaccacccctacaaatatccggccgccgcctacgaccactatctcggggccaagagccggccggcgccctacccgctgcccggcctgcgtggccacggctaccacccgcacgcgcatccgcaccaccaccaccaccccgtgagtccagccgccgcggccgccgccgccgctgccgcagctgccgcggccgccaacatgtactcgtcggccggagccgcgccgcccggctcctacgactattgccccagataacacgggccctgtcgcgctcccgccccggtcctgcacagccccgaagttcgccgggcccggccaccctgccccaagggcaagcaaggaatacgttcccccagccccaggggccaccgcggctctccccttccccagcctcgaagccatgggggccccctcgccacccccagccccttgggctatcgaagtatccggttccccagtccctggagccaccgcgggtccttccccggccccgagggccaagggggtccccgcccgccagtgccaaagcgcccggtcggaggcggaaggaagtgatatttattgttctccccgagaccgcgtcgcccgcggcccggccggcagttgcagtgtagacagcccgagagccccgcctgcaggcggtgtagatacatgtagatactgtagatactgtagataccgccccggcgccgacttgataaacggtttcgcctcttttggaa

SEQ ID NO: 189699 - DNA, 1538 bp, Homo sapiens
  Payload ID: 17455
  Gene Symbol: TBX1
  Gene Name: T-box 1
  Uniprot ID: O43435
  ENST ID: ENST00000359500
  CDS Start-End: 130-1248
ccggcagggggagcgaggaggaagggaaccgcggccgggccagcggaggcggcggagcgcaccgcccaccagggctcagggtcctccgaccgggtgaagcttcgctggctgccaggatccccggcagggatgcacttcagcaccgtcaccagggacatggaagccttcacggccagcagcctgagcagcctgggggccgcggggggcttcccgggcgccgcgtcgcccggcgccgacccgtacggcccgcgcgagcccccgccgccgccgccgcgctacgacccgtgcgccgccgccgcccccggcgccccgggcccgccgccgccgccgcacgcctacccgtttgcgccggccgccggggccgccaccagcgccgccgccgagcccgagggccccggggccagctgcgcggccgcagccaaggcgccggtgaagaagaacgcgaaggtggccggtgtgagcgtgcagctagagatgaaggcgctgtgggacgagttcaaccagctgggcaccgagatgatcgtcaccaaggccggcaggcggatgtttcccaccttccaagtgaagctcttcggcatggatcccatggccgactatatgctgctcatggacttcgtgccggtggacgataagcgctaccggtacgccttccacagctcctcctggctggtggcggggaaggccgaccctgccacgccaggccgcgtgcactaccacccggactcgcctgccaagggcgcgcagtggatgaagcaaatcgtgtccttcgacaagctcaagctgaccaacaacctactggacgacaacggccacattattctgaattccatgcacagataccagccccgcttccacgtggtctatgtggacccacgcaaagatagcgagaaatatgccgaggagaacttcaaaacctttgtgttcgaggagacacgattcaccgcggtcactgcctaccagaaccatcggatcacgcagctcaagattgccagcaatcccttcgcgaaaggcttccgggactgtgaccctgaggactggccccggaaccaccggcccggcgcactgccgctcatgagcgccttcgcgcgctcgcggaaccccgtggcttccccgacgcagcccagcggcacggagaaagggctggtcacagaaggctctgggctccaacctggcttgctggacgtgctcttgaagcccccaagtaagaagtctgagtccctgagaccaccacactgcaaggacacttgaaggtactcaggtttcagagcccaagtcaggaggtcaagtgtgcatgcaagaggtggcaggggacagatgtgctgctgttcccaggccacctgcacagctggatggtggaagcagttcacttaaaggccatgagttactcgggaggctgaggcaggaggatcacttgagcctattagttggaggctgcagtaagctatgatcatgccactgcactccagcctgggtgacagagtgagacccccactgtccctggtctcttaaaagaaaaaacaaacaaacaaaccaaaaaa

SEQ ID NO: 189700 - DNA, 1248 bp, Homo sapiens
  Payload ID: 17455
  Gene Symbol: TBX1
  Gene Name: T-box 1
  Uniprot ID: O43435
  ENST ID: ENST00000621939
  CDS Start-End: 130-1248
ccggcagggggagcgaggaggaagggaaccgcggccgggccagcggaggcggcggagcgcaccgcccaccagggctcagggtcctccgaccgggtgaagcttcgctggctgccaggatccccggcagggatgcacttcagcaccgtcaccagggacatggaagccttcacggccagcagcctgagcagcctgggggccgcggggggcttcccgggcgccgcgtcgcccggcgccgacccgtacggcccgcgcgagcccccgccgccgccgccgcgctacgacccgtgcgccgccgccgcccccggcgccccgggcccgccgccgccgccgcacgcctacccgtttgcgccggccgccggggccgccaccagcgccgccgccgagcccgagggccccggggccagctgcgcggccgcagccaaggcgccggtgaagaagaacgcgaaggtggccggtgtgagcgtgcagctagagatgaaggcgctgtgggacgagttcaaccagctgggcaccgagatgatcgtcaccaaggccggcaggcggatgtttcccaccttccaagtgaagctcttcggcatggatcccatggccgactatatgctgctcatggacttcgtgccggtggacgataagcgctaccggtacgccttccacagctcctcctggctggtggcggggaaggccgaccctgccacgccaggccgcgtgcactaccacccggactcgcctgccaagggcgcgcagtggatgaagcaaatcgtgtccttcgacaagctcaagctgaccaacaacctactggacgacaacggccacattattctgaattccatgcacagataccagccccgcttccacgtggtctatgtggacccacgcaaagatagcgagaaatatgccgaggagaacttcaaaacctttgtgttcgaggagacacgattcaccgcggtcactgcctaccagaaccatcggatcacgcagctcaagattgccagcaatcccttcgcgaaaggcttccgggactgtgaccctgaggactggccccggaaccaccggcccggcgcactgccgctcatgagcgccttcgcgcgctcgcggaaccccgtggcttccccgacgcagcccagcggcacggagaaagggctggtcacagaaggctctgggctccaacctggcttgctggacgtgctcttgaagcccccaagtaagaagtctgagtccctgagaccaccacactgcaaggacacttga

SEQ ID NO: 189701 - DNA, 1548 bp, Homo sapiens
  Payload ID: 17456
  Gene Symbol: TBX10
  Gene Name: T-box 10
  Uniprot ID: O75333
  ENST ID: ENST00000335385
  CDS Start-End: 89-1246
acgagtggtgaccaccccttccagcaggcaggttcccagccccagccaagcagtgtttctccaggagccggacagcctctctgtctccatggcagccttcctatctgctggcctcggcatacttgcaccctcagagacctaccccctacctacaaccagctctggctgggagccccggctggggtcaccattcccatcaggcccttgcaccagctctactggggcccaagctgtggccgagcccactgggcagggccccaagaacccacgtgtgtccagagtgacagttcagctggagatgaagcctctgtgggaggaattcaaccagctgggcactgagatgatcgtcaccaaggcaggcaggaggatgttcccccccttccaggtgaagatcctgggcatggactccctggccgactacgccctgctcatggacttcatccccctggacgacaagagatacaggtatgccttccacagctcggcctggctggtggcgggcaaggcagacccagccacacctggccgcgtgcacttccaccccgactcgccagccaagggtgcccagtggatgcgccagattgtgtcctttgacaagctcaagctgaccaacaacctgctggatgacaatggccacatcattctcaactctatgcaccgctaccagccccgtttccacgtggtcttcgtggacccacgcaaggacagtgagcgctatgcccaggagaacttcaagtccttcatcttcacagagacccagttcacagcagtgacagcctatcagaaccacaggatcacccagctgaaaatcgccagcaacccttttgccaaaggctttagagagagtgacctggactcctggcctgtggccccacggcccctgctcagtgtcccagcccggagtcacagcagcctcagtccctgtgtgctgaagggtgccacagacagggagaaagaccccaacaaagcttcagcttccacctccaagacccctgcttggctccatcatcagctgctgcccccacctgaggtcctgctggccccggccacctacaggcctgtcacgtatcagagcctgtactctggagccccgagccacctagggatcccaaggacccgaccagcaccataccccctccccaacatccgggctgatagggatcaaggaggcctgcctctcccagctgggctggggctcctgtcccccactgtggtgtgcctggggcctggccaggactcccagtgatgccagaagccctggggggaagccctgctaccctggaccttacaccgggtgtgggaatcagcctctgccccgccccctccagccccatctctgtctcaaggagagcagggtaggtgaaagtctagagaaagaggctacctgcccagggtcacagcaaggctgggaccatggcaagcttggaaccaggacttctatctcccaaccccagcagcctgaatactgtgccctcttgctttgggggtaactcccgaaaaccctgccttacctctcccttccccctaacattaaactatttggcatga

SEQ ID NO: 189702 - DNA, 3492 bp, Homo sapiens
  Payload ID: 17457
  Gene Symbol: TBX15
  Gene Name: T-box 15
  Uniprot ID: Q96SF7
  ENST ID: ENST00000207157
  CDS Start-End: 316-1806
tctttccggcttctttgcaaaaggatagaaccgtctcgaccagggcactaggactggaagatcgggctgtgtctaggccgctgtccgcgaaatccgagacgttttttcagcttggctaggaccgacttcgctgccggtttgagctttctctgcactcgggggtctcctgccgtcctcgaccggtggcgtaacttgggaagagattctgagcagagcactggttcagattctgaggtcctcactgagcggacttcctgctccttcagtactcacactgacctggcctctggtgctgcaggccctgtgcctgctgccatgtcttccatggaggagattcaggtggagctgcaatgtgctgacctctggaagcggttccatgatattggaactgaaatgatcatcaccaaagcaggcaggaggatgtttcctgccatgagagtgaaaatcactggcctagatccacatcagcagtactacatagcaatggacattgtgcctgtggacaataaaagatacagatatgtgtatcatagctccaagtggatggtggctggcaatgctgattcccctgtgcccccaagagtttatatacaccctgattctctagcttctggagacacctggatgagacaggtggtcagttttgacaaactcaagcttaccaacaatgagttggatgatcaaggacatatcattctgcactctatgcacaaataccagcctcgagttcatgtgattcgcaaagacttcagcagtgacctttcacccactaagcctgttcctgttggggatggggtgaaaacgttcaactttcctgagactgtgttcaccacagttacggcctatcagaatcagcagattaccagattaaaaattgaccgaaacccttttgctaaaggattcagagattctgggagaaacagaactggacttgaagccatcatggagacatatgcattctggagacctcctgtgcgcacactcaccttcgaagacttcaccaccatgcagaagcagcaaggaggcagcacaggcacttccccaaccacctccagcactgggacaccatccccttcggcttcttctcatcttttatctccatcctgttctcctccaacttttcatctggcccccaacactttcaatgtgggctgccgagaaagccagctgtgtaatctaaacctctctgattatccaccatgtgcccgaagcaacatggctgccttgcagagctacccagggctgagtgacagtggctacaacaggcttcagagtggcaccacttcagccactcagccctctgaaaccttcatgcctcagaggactccatccctgatctcaggaataccaactcctccctcgttgcctggcaacagcaagatggaagcctacggtggccagctggggtcctttcccacttcccagtttcagtatgtcatgcaggcaggcaatgctgcctccagctcctcatcaccacacatgttcgggggcagccacatgcagcagagctcctacaatgccttctcccttcacaacccttacaacctgtatggatacaatttccccacttcccctaggctagctgcaagcccggaaaaactgagcgcctctcaaagcactttactctgttcttctccttccaacggggcctttggagagaggcagtacctgccgtcagggatggagcacagcatgcacatgattagcccttcacccaataaccaacaggcaaccaacacttgtgatggccggcagtatggggcagttccaggctcctcctcccagatgtccgtgcacatggtttaaaggccagtccaaacaccacggagcatttggcaatcaaggccccagagtctccgtggtcagatcctcctctttgggagtccagtgtctttgaaaaacaggaaccgtgttttttttttttttttttttctggccgaagacatatacccaagaacaagagatacctttaagccagtgaaggatacttgcgatagaatcatccgcaactcagtggccattcttctgccttcccagaccttagttttataaagcattgtctgttccagagtggcctttgaagagactgaataatcacttcgtcataatgttaagggagatgctagtgtgtggcagccatgaaaagttacacatacacacccacatacagacagacctacctatacatacgtgcacacacacatacatattcatacacaattcatacacatgcaatcatacatgcacactgactctgaactgggtgaactctgtggagggaggcccagaatgggtgctttcaccaagaatttgtctgtgtacaactctagatggagtgggccagcagtagctgccagtctttctcccctgcagcttcctctgcttctggaatgaaccatgtatcctggagaccctcccaatggatgagagtggaaagacatcagtacaactggacttggcttccggaaaaagattgcttttgaactttggctctcttcacttgtatgctatcattgatattcccagtggtgcccgtggaaagagggagaaagagaagctgaacaggagaaagacaaacagaaagaatagagaacaggaacgaggtggagagcaagactgacagagaaagtgtgagcaatgatgagaattttaattcaccaaggagacgtgtttttggtttgtccccccaaaccccgcccgccccactacaggttatggaaagaatcatggcattactgaggagtaaacctctctggcacactgagcatggtcagggcattggtcagagggacagagcaaggaatgcatcctgagcccacagctttgaccactgtgatccagaagagaggtgcactacgtgggaagtgctgattccacagcatgcagcctggtaggggaaggaaaataaaagggtgtgaagaaggaatagttttataatctcggaagatgataccaagagcagaggcaacaaatagaggcctggcctccaggtgccggatccagacacctgacctagaatgcctgcccgctatccctgtggcaggaaatatcccctcatgtcccagggaattgcagatgggtcttctatacccttctacctgcccttagatctccatttttatcaaatagtacattgcattttgaagttttgggttttgtccttcatctttccctttcccttcaaatcttttaatggtaagaaagcaagtgaagcttggtgcaagctaaaatttttaaatggtgtggaaatgcaaataataccaagtaaaataatacagatattattaaagtttctggttttgaggtgttgtagataaatgtatttatgtgcctagtggggaatccaatattatgaatatgaaaaagggggcaataaaagggtatgtaaaatatgtatgaagaaaaggtgtacaaaaatttgcccttatgcacggaactctgtttctaagtgccaagcacagaaagccgctaaataaaatctttgcaattgtt

SEQ ID NO: 189703 - DNA, 3504 bp, Homo sapiens
  Payload ID: 17457
  Gene Symbol: TBX15
  Gene Name: T-box 15
  Uniprot ID: Q96SF7
  ENST ID: ENST00000369429
  CDS Start-End: 11-1819
ggcggctaaaatgagtgaaaggagaagatctgcagtcgccctgagctcgcgagcacatgccttctccgttgaagccttgatcggctcaaataaaaaacggaaactgcgagactgggaggagaaggggctggacctgtctatggaggcgctgagccccgcgggcccactcggagacacggaggacgcggcggcacacggcctggagcctcacccggattctgagcagagcactggttcagattctgaggtcctcactgagcggacttcctgctccttcagtactcacactgacctggcctctggtgctgcaggccctgtgcctgctgccatgtcttccatggaggagattcaggtggagctgcaatgtgctgacctctggaagcggttccatgatattggaactgaaatgatcatcaccaaagcaggcaggaggatgtttcctgccatgagagtgaaaatcactggcctagatccacatcagcagtactacatagcaatggacattgtgcctgtggacaataaaagatacagatatgtgtatcatagctccaagtggatggtggctggcaatgctgattcccctgtgcccccaagagtttatatacaccctgattctctagcttctggagacacctggatgagacaggtggtcagttttgacaaactcaagcttaccaacaatgagttggatgatcaaggacatatcattctgcactctatgcacaaataccagcctcgagttcatgtgattcgcaaagacttcagcagtgacctttcacccactaagcctgttcctgttggggatggggtgaaaacgttcaactttcctgagactgtgttcaccacagttacggcctatcagaatcagcagattaccagattaaaaattgaccgaaacccttttgctaaaggattcagagattctgggagaaacagaactggacttgaagccatcatggagacatatgcattctggagacctcctgtgcgcacactcaccttcgaagacttcaccaccatgcagaagcagcaaggaggcagcacaggcacttccccaaccacctccagcactgggacaccatccccttcggcttcttctcatcttttatctccatcctgttctcctccaacttttcatctggcccccaacactttcaatgtgggctgccgagaaagccagctgtgtaatctaaacctctctgattatccaccatgtgcccgaagcaacatggctgccttgcagagctacccagggctgagtgacagtggctacaacaggcttcagagtggcaccacttcagccactcagccctctgaaaccttcatgcctcagaggactccatccctgatctcaggaataccaactcctccctcgttgcctggcaacagcaagatggaagcctacggtggccagctggggtcctttcccacttcccagtttcagtatgtcatgcaggcaggcaatgctgcctccagctcctcatcaccacacatgttcgggggcagccacatgcagcagagctcctacaatgccttctcccttcacaacccttacaacctgtatggatacaatttccccacttcccctaggctagctgcaagcccggaaaaactgagcgcctctcaaagcactttactctgttcttctccttccaacggggcctttggagagaggcagtacctgccgtcagggatggagcacagcatgcacatgattagcccttcacccaataaccaacaggcaaccaacacttgtgatggccggcagtatggggcagttccaggctcctcctcccagatgtccgtgcacatggtttaaaggccagtccaaacaccacggagcatttggcaatcaaggccccagagtctccgtggtcagatcctcctctttgggagtccagtgtctttgaaaaacaggaaccgtgttttttttttttttttttttctggccgaagacatatacccaagaacaagagatacctttaagccagtgaaggatacttgcgatagaatcatccgcaactcagtggccattcttctgccttcccagaccttagttttataaagcattgtctgttccagagtggcctttgaagagactgaataatcacttcgtcataatgttaagggagatgctagtgtgtggcagccatgaaaagttacacatacacacccacatacagacagacctacctatacatacgtgcacacacacatacatattcatacacaattcatacacatgcaatcatacatgcacactgactctgaactgggtgaactctgtggagggaggcccagaatgggtgctttcaccaagaatttgtctgtgtacaactctagatggagtgggccagcagtagctgccagtctttctcccctgcagcttcctctgcttctggaatgaaccatgtatcctggagaccctcccaatggatgagagtggaaagacatcagtacaactggacttggcttccggaaaaagattgcttttgaactttggctctcttcacttgtatgctatcattgatattcccagtggtgcccgtggaaagagggagaaagagaagctgaacaggagaaagacaaacagaaagaatagagaacaggaacgaggtggagagcaagactgacagagaaagtgtgagcaatgatgagaattttaattcaccaaggagacgtgtttttggtttgtccccccaaaccccgcccgccccactacaggttatggaaagaatcatggcattactgaggagtaaacctctctggcacactgagcatggtcagggcattggtcagagggacagagcaaggaatgcatcctgagcccacagctttgaccactgtgatccagaagagaggtgcactacgtgggaagtgctgattccacagcatgcagcctggtaggggaaggaaaataaaagggtgtgaagaaggaatagttttataatctcggaagatgataccaagagcagaggcaacaaatagaggcctggcctccaggtgccggatccagacacctgacctagaatgcctgcccgctatccctgtggcaggaaatatcccctcatgtcccagggaattgcagatgggtcttctatacccttctacctgcccttagatctccatttttatcaaatagtacattgcattttgaagttttgggttttgtccttcatctttccctttcccttcaaatcttttaatggtaagaaagcaagtgaagcttggtgcaagctaaaatttttaaatggtgtggaaatgcaaataataccaagtaaaataatacagatattattaaagtttctggttttgaggtgttgtagataaatgtatttatgtgcctagtggggaatccaatattatgaatatgaaaaagggggcaataaaagggtatgtaaaatatgtatgaagaaaaggtgtacaaaaatttgcccttatgcacggaactctgtttctaagtgccaagcacagaaagccgctaaataaaatctttgcaattgt

SEQ ID NO: 189704 - DNA, 2678 bp, Homo sapiens
  Payload ID: 17457
  Gene Symbol: TBX15
  Gene Name: T-box 15
  ENST ID: ENST00000449873
  CDS Start-End: 1-993
gggagaaacagaactggacttgaagccatcatggagacatatgcattctggagacctcctgtgcgcacactcaccttcgaagacttcaccaccatgcagaagcagcaagcctcaaagaagacttctcaaggatacacagtgaatcagcactcctcagagacagatgccattgaattatacgagagaagagtctggctcatggaacgaagaggcagcacaggcacttccccaaccacctccagcactgggacaccatccccttcggcttcttctcatcttttatctccatcctgttctcctccaacttttcatctggcccccaacactttcaatgtgggctgccgagaaagccagctgtgtaatctaaacctctctgattatccaccatgtgcccgaagcaacatggctgccttgcagagctacccagggctgagtgacagtggctacaacaggcttcagagtggcaccacttcagccactcagccctctgaaaccttcatgcctcagaggactccatccctgatctcaggaataccaactcctccctcgttgcctggcaacagcaagatggaagcctacggtggccagctggggtcctttcccacttcccagtttcagtatgtcatgcaggcaggcaatgctgcctccagctcctcatcaccacacatgttcgggggcagccacatgcagcagagctcctacaatgccttctcccttcacaacccttacaacctgtatggatacaatttccccacttcccctaggctagctgcaagcccggaaaaactgagcgcctctcaaagcactttactctgttcttctccttccaacggggcctttggagagaggcagtacctgccgtcagggatggagcacagcatgcacatgattagcccttcacccaataaccaacaggcaaccaacacttgtgatggccggcagtatggggcagttccaggctcctcctcccagatgtccgtgcacatggtttaaaggccagtccaaacaccacggagcatttggcaatcaaggccccagagtctccgtggtcagatcctcctctttgggagtccagtgtctttgaaaaacaggaaccgtgttttttttttttttttttttctggccgaagacatatacccaagaacaagagatacctttaagccagtgaaggatacttgcgatagaatcatccgcaactcagtggccattcttctgccttcccagaccttagttttataaagcattgtctgttccagagtggcctttgaagagactgaataatcacttcgtcataatgttaagggagatgctagtgtgtggcagccatgaaaagttacacatacacacccacatacagacagacctacctatacatacgtgcacacacacatacatattcatacacaattcatacacatgcaatcatacatgcacactgactctgaactgggtgaactctgtggagggaggcccagaatgggtgctttcaccaagaatttgtctgtgtacaactctagatggagtgggccagcagtagctgccagtctttctcccctgcagcttcctctgcttctggaatgaaccatgtatcctggagaccctcccaatggatgagagtggaaagacatcagtacaactggacttggcttccggaaaaagattgcttttgaactttggctctcttcacttgtatgctatcattgatattcccagtggtgcccgtggaaagagggagaaagagaagctgaacaggagaaagacaaacagaaagaatagagaacaggaacgaggtggagagcaagactgacagagaaagtgtgagcaatgatgagaattttaattcaccaaggagacgtgtttttggtttgtccccccaaaccccgcccgccccactacaggttatggaaagaatcatggcattactgaggagtaaacctctctggcacactgagcatggtcagggcattggtcagagggacagagcaaggaatgcatcctgagcccacagctttgaccactgtgatccagaagagaggtgcactacgtgggaagtgctgattccacagcatgcagcctggtaggggaaggaaaataaaagggtgtgaagaaggaatagttttataatctcggaagatgataccaagagcagaggcaacaaatagaggcctggcctccaggtgccggatccagacacctgacctagaatgcctgcccgctatccctgtggcaggaaatatcccctcatgtcccagggaattgcagatgggtcttctatacccttctacctgcccttagatctccatttttatcaaatagtacattgcattttgaagttttgggttttgtccttcatctttccctttcccttcaaatcttttaatggtaagaaagcaagtgaagcttggtgcaagctaaaatttttaaatggtgtggaaatgcaaataataccaagtaaaataatacagatattattaaagtttctggttttgaggtgttgtagataaatgtatttatgtgcctagtggggaatccaatattatgaatatgaaaaagggggcaataaaagggtatgtaaaatatgtatgaagaaaaggtgtacaaaaatttgcccttatgcacggaactctgtttctaagtgccaagcacagaaagccgctaaataaaatctttgcaattgt

SEQ ID NO: 189705 - DNA, 6245 bp, Homo sapiens
  Payload ID: 17458
  Gene Symbol: TBX18
  Gene Name: T-box 18
  Uniprot ID: O95935
  ENST ID: ENST00000369663
  CDS Start-End: 339-2162
ttttttacccatgttagtcctctctggcgcatcagttgaggcagacctcggagcagcaggaggaggtggaaggggtgggagcaaaggagtgcatcagtgagagagcgcgcgagagagacccaggaaaggagacttggccggcgcgtcgccggttcctggatcccaacacaagcgagaaagcggaaacgccaaatctgttttttgcccgcggtggggaagggggcagatctcgggaggccccgagagccttttagtttttggtgggggaagagcgagagcgcgcgtgtgcccgcgtgagtgtatatgagagaggggcgggcgggcgcggggcgggggggatggccgagaagcgaaggggctcgccgtgcagcatgctaagcctcaaggcgcacgctttctcggtggaggcgctgatcggcgccgagaagcagcaacagcttcagaagaagcggcgaaaactgggcgccgaagaggcggcgggggccgtggacgacggaggctgcagccgcggcggcggcgcgggcgaaaagggttcttctgagggagacgaaggcgctgcgctcccgccgccggctggggcgacgtctgggccggctcggagtggcgcagacctggagcgcggagccgcgggcggctgtgaggacggcttccagcagggagcttcccctctggcgtcaccgggaggctcccccaaggggtctccggcgcgctccctggcccggcccgggacccctctgccctcgccgcaggccccgcgggtggatctgcagggagccgagctctggaagcgctttcatgagataggcactgagatgatcatcaccaaggccggcaggcgcatgtttccagcaatgagagtgaagatctctggattagatcctcaccagcaatattacattgccatggatattgtaccagtggacaacaaaagatacaggtatgtttaccacagttcgaaatggatggtggcaggtaatgctgactcgcctgtgccaccccgtgtgtacattcatccagactcgcctgcctcgggggagacttggatgagacaagttatcagcttcgacaagctgaagctcaccaacaatgaactggatgaccaaggccatattattcttcattctatgcacaaataccaaccgcgagtgcacgtcatccgtaaagactgtggagacgatctttctcccatcaagcctgttccatccggggagggagtaaaggcattctcctttccagaaactgtcttcacaaccgtcactgcctatcagaatcagcagattactcgcctgaagatagataggaatccatttgctaaaggcttccgagactccgggcgcaacagaatgggtttggaagccttggtggaatcatatgcattctggcgaccatcactacggactctgacctttgaagatatccctggaattcccaagcaaggcaatgcaagttcctccaccttgctccaaggtactgggaatggcgttcctgccactcaccctcaccttttgtctggctcctcttgctcctctcctgccttccatctggggcccaacaccagccagctgtgtagtctggcccctgctgactattctgcctgtgcccgctcaggcctcaccctcaaccgatacagcacatctttggcagagacctacaacaggctcaccaaccaggctggtgagacctttgccccgcccaggactccctcctatgtgggcgtgagcagcagcacctccgtgaacatgtccatgggtggcactgatggggacaccttcagctgcccacagaccagcttatccatgcagatttcgggaatgtccccccagctccagtatatcatgccatcaccctccagcaatgccttcgccactaaccagacccatcagggttcctataatacttttagattacacagcccctgtgcactatatggatataacttctccacatcccccaaactggctgccagtcctgagaaaattgtttcttcccaaggaagtttcttggggtcctcaccgagtgggaccatgacggatcggcagatgttgccccctgtggaaggagtgcacctgcttagcagtgggggtcagcagagtttctttgactctaggaccctaggaagcttaactctgtcatcatctcaagtatctgcacatatggtctgatgaagcctttaagttaaatgacatttggatctgtctaacatattttctttttcttttttaaaagctatgtggaaagaaactctctgtggtttataaaatgtacatataatagaaaatgaaggctcactgggttttttgactttatcatggtgagattgtaattatctatggtatatatgtatgctgtatatacatagcacatggagtatcacggcccctattgttcccctgtttcatccagttgcacggagtattggcatgcgtgtagtatgtttaagcaaagttctcagactcttttaaaaacaagatggtaaacttaaaacttggcaattatactatccagaagaacacttataacttaatttatcagaaaaatgctctaaacggtttcatacttgatgtattgataaccagcagtaaccagcatgtagagtcttgtgatttctgttattcttggacacagtgtgagaatctaaaatacaaaagccagttgaagtcttagtgttagtcctgaggtatttgtaatcatgaaggatcagctttttcattcctgcttattatttaccacacatactatatgaccttgggtctataaaaaaatcataacccataataattgttattttcttaaggaaggtaaaggagaggcttgtgatttttttttttacactttccattgggcacataagaggttcttattcatctgtagagaacaaatttccagtattttcgattttttgcttattttatatatcaaatagaccattaaagaatgttctataaacatttttaaattccaattttcaccaggggaggaatatgtgatatgagtggaatggcaaaaggaaaataaatccacctcaaattcattgattccaatgagaaatgtctatcttttaaatcaagagtaatactattgttaactataccttatgtttttgtatagtttgtttttaaatttagaatattttttccatcttgctctgagcttcctgaccgatagtatataagtaaaaaaaatgcatttatgctacttatttatatcttgtaattcctacacattgaacccttttccccttcttaaccttgtccgtctgcctgagtctttcccaaaacagatagttcctaggcctgtatggtgttaaataacacggtgaggaatttcagtaggttatctccagcaatctgtcttttgggagctatagtgcaaaggccaaagcccattactataaagaccctcttggaggactaagaaggaagatactaattatgataaaggaactataaaacttttaacctcaacagaatttgtaatgtcagaactggagaaattaaaatcagtattaaattttttaattcctaaaataatatatgcatggttgaagagttaaaaacaagtaactttgagagcacagtatgagataaataaaaaaggctaagaatacatgatgaggcacattccccttctgaggagaaagcgaaataacatgtctgtgcattgacccattcattacatttcatgtatcttaagcaaaagagcatgattttctctcattgctaaaaagagttgctttaactcatccctggatttggtggggaaagggtacaactcctgatttgctgtttcactttgaaacaacacaatttgttagatacttagggagatatactgttgaatttgcacaggatgtgactctgtttatacatattaacaaatttccttttggattccttagcagttcatcaaattagtattaaatttttaaatttaaaactagcatgaagggacatgaaatatttgcagtaggtggatctatgtaagatgtttgggtatggcattaatagcttgacaaagatttggggaaaggtgttaagaatgagtccatctcagccaatagtgcttggtgtataattcaagaacagagagttttccatcttgaaaaaacatggaaagtaatgctctatacccatatgtattaataagagcattttccttcttgccgttgatcatttcagatgataccacaatatgagtataattttttattaatcttttttctggtaaaattttagcaatattgtacaaatgctttttttaggttttactgtaaatattaatcaccacgtcacttcagagactagccttttattgctgaattaaatgacatgcatacattgataattatatatctgtattttattaaaaagtacttaaaattatattaaaatatgttattaaacccttttatgattttggagggtaatcattttaatgtctaaaaatattgatccaagaataagcacacacatgcacaccccaaacgcaaattctgtacctctcaaatacatggcagaaagaaatgggcctgctgttcatgtttcatgtgttaaatgtaatttcttggtgtgttgaccatgtcattgaaggtgaaggccctgacaaatgttgaacacatgaaaatttgaatgtgagaggaaagggatggggtggtatgttttgttttgggtccaggggagaaaggcaaggttacaagaatgagtggcttgcaccactgactagtgatgacagattacttctatgccccttgactagtaaacattccaagggacatcgcgatggggtgaggttgctgctatcaagaccagtcacattttgaaaattaacacttgcttccttacaagctgccttccagaggtcaacagcttttcacaagtgaggcacccagttgctgacccttgatttctggaatgtaaggggtcaggaatccttggtggcccccagagaaggttggggcacagtgtaacctatataaggaaggatcatactcactctttacatcaattagcaaaattttgaggaaaaagaatctcacttttaaaatgtaaatagctcttcattacccctccagacttaatcctaccagtaactcacaccttagtgtgaaattaataaacagcagctttggagatagctggaggtttgacttagaggaaaaagtaatttttgtagcaggacaattctgggaagatttgtatgggaaggagaaggtgcaagaagagagatccctaactaaactctgcagtgtcccatgaagtcctggtgcagagcattaaaaataatcatttcataaacttctttcaggaaccttggtagaggtggtggatgctacctaccctgatgctgtctctaattagagaggtttgtaaagattcctttgttgcaaagtgtaacacagtgttatttcctcatgagaaatttattggctcatctacatgaagttttttctaagctttcccttaagaactaattgtattaaattattaccatgttgtgttttaatctcattgttcatcctttctaaaaagaaatgctcagataagttgagagtaaggttaaatatatgagcagttaagtactcatacatgattacagcattctaagagttcaaaccttaaaaattatcagtgctagaaatcgacaaatatattcaagtatacaaacattcaacagatatataaacttagtatccctctacatgctgatatattttcaaataatgtgctttcttttcattgaactgtggtatgatgagaataacatgtcctcgggaattagagaacttagtttgagactatggatttctcaatcatgattttgggtaaaaaaattagctgctttatgtctcagttttgctatgtgtgaaaggaatggctgggatgataattgttagtattccttttagtttccaattcatatggtcctattatataaatatttagcttaatattgggaaactagttttataaaactattatatcttttggaatatattctgtttatttttggatatatatatatatatactgtatctgtggctttacaaagaatataacactatcagtattattttcaacttgttgaattatgtgaaatttatcctttaaatggaactgtgctttagttttacaggataaattttagtattttaatatcagaaggaagctatacttagtaacgtatttgctactttatagtgaatagtaaaagacattaataaaatttctttttcatgatgctcttaa

SEQ ID NO: 189706 - DNA, 742 bp, Homo sapiens
  Payload ID: 17458
  Gene Symbol: TBX18
  Gene Name: T-box 18
  ENST ID: ENST00000606325
  CDS Start-End: 213-742
ggcatatttggaaacttggtttcccgaagggcggctgtgaggacggcttccagcagggagcttcccctctggcgtcaccgggaggctcccccaaggggtctccggcgcgctccctggcccggcccgggacccctctgccctcgccgcaggccccgcgggtggatctgcagggagccgagctctggaagcgctttcatgagataggcactgagatgatcatcaccaaggccggcaggcgcatgtttccagcaatgagagtgaagatctctggattagatcctcaccagcaatattacattgccatggatattgtaccagtggacaacaaaagatacaggtatgtttaccacagttcgaaatggatggtggcaggtaatgctgactcgcctgtgccaccccgtgtgtacattcatccagactcgcctgcctcgggggagacttggatgagacaagttatcagcttcgacaagctgaagctcaccaacaatgaactggatgaccaaggccatattattcttcattctatgcacaaataccaaccgcgagtgcacgtcatccgtaaagactgtggagacgatctttctcccatcaagcctgttccatccggggagggagtaaaggcattctcctttccagaaactgtcttcacaaccgtcactgcctatcagaatcagcagattactcgcctgaagatagataggaatccatttgctaaaggcttccgagactccgggcgcaacag

SEQ ID NO: 189707 - DNA, 1230 bp, Homo sapiens
  Payload ID: 17458
  Gene Symbol: TBX18
  Gene Name: T-box 18
  ENST ID: ENST00000606784
  CDS Start-End: 213-911
ggcatatttggaaacttggtttcccgaagggcggctgtgaggacggcttccagcagggagcttcccctctggcgtcaccgggaggctcccccaaggggtctccggcgcgctccctggcccggcccgggacccctctgccctcgccgcaggccccgcgggtggatctgcagggagccgagctctggaagcgctttcatgagataggcactgagatgatcatcaccaaggccggcaggcgcatgtttccagcaatgagagtgaagatctctggattagatcctcaccagcaatattacattgccatggatattgtaccagtggacaacaaaagatacaggtatgtttaccacagttcgaaatggatggtggcaggtaatgctgactcgcctgtgccaccccgtgtgtacattcatccagactcgcctgcctcgggggagacttggatgagacaagttatcagcttcgacaagctgaagctcaccaacaatgaactggatgaccaaggccatattattcttcattctatgcacaaataccaaccgcgagtgcacgtcatccgtaaagactgtggagacgatctttctcccatcaagcctgttccatccggggagggagtaaaggcattctcctttccagaaactgtcttcacaaccgtcactgcctatcagaatcagcagattactcgcctgaagatagataggaatccatttgctaaaggcttccgagactccgggcgcaacagaatgggtttggaagccttggtggaatcatatgcattctggcgaccatcactacggactctgacctttgaagatatccctggaattcccaagcaagaatacagggacttgaagacagactacatttttcctgagcgagacaatttggtctcaagggaaaccaaactgtagcacagaatgtgagagagagcaacaataggatggaatgcataaaatccttccccagagcaagcttctcccacttcttgaaaggctttatttttatatagcctctggaagccagacaaagtatcacttagaaagcgagcctcacagggcggctctggagagatctgaaggctgcgttcataagttcagaaagaacaaagtttatgctttaggccgctagaccgtaagctctttgagttcagtttttatcttcattgtatttcaagaactgtgcaagtatctggtacctggaatatgctcaataaatgtttgaataaagatt

SEQ ID NO: 189708 - DNA, 717 bp, Homo sapiens
  Payload ID: 17458
  Gene Symbol: TBX18
  Gene Name: T-box 18
  ENST ID: ENST00000606621
  CDS Start-End: 621-717
gcttttcacacttttctctgctgggctggaagcgcagggcgccgggagtttggcgaaagcggggtctgaagagccttctagaagatgcctccggcccggcccaaaagaaggcccaaagcgaggcgccgcagacgcttatggcttaaggaggcccaggctcttgggaccagagtccgggcgcttttgctgcttgcgcttcgaggcgcaggttgcgtcggagtttgcactggggactctggacccgggagctcctctgactccgtcgggcaagcgtcccagaccccggcggcggcgtgaagccttttctgctggggccttggccctgcggaggcccagcgggtggggtggacgctgcccgcgcgcctctcccgggcttgggacttggggaccaagcaggccacactggagctctgaatgcgccccttcgacaggcagaatgcggctgtgaggacggcttccagcagggagcttcccctctggcgtcaccgggaggctcccccaaggggtctccggcgcgctccctggcccggcccgggacccctctgccctcgccgcaggccccgcgggtggatctgcagggagccgagctctggaagcgctttcatgagataggcactgagatgatcatcaccaaggccggcaggcgcatgtttccagcaatgagagtgaagatctctggattagatcctcaccagcaatattacattgccatggata

SEQ ID NO: 189709 - DNA, 2822 bp, Homo sapiens
  Payload ID: 17459
  Gene Symbol: TBX19
  Gene Name: T-box 19
  Uniprot ID: O60806
  ENST ID: ENST00000367821
  CDS Start-End: 52-1398
tagaagcaggcaagttgggtaacggctctcggcaaagttcgagaagtgcctatggccatgagtgagctgggcactcggaagcccagcgatggcactgtttctcatctgctcaatgtggtggagagtgagcttcaggcagggagggaaaaaggcgaccctacggagaagcaacttcagatcatcctggaggatgcacctctctggcagagattcaaggaagtcactaatgagatgattgtgaccaagaatggcagacggatgtttccagtcctaaagattagtgtcacagggttggaccccaatgccatgtactccctcctgctggactttgtccctacggacagtcaccgctggaagtacgtcaacggggaatgggtgcccgctggcaagccagaggtctccagccacagctgcgtctacattcacccggactcccccaactttggggcccactggatgaaagctcccatctccttcagcaaagtgaagctgaccaacaagctcaatggaggcgggcagataatgttgaattctctgcataaatatgaaccccaggttcacatagtgcgtgttggaagtgcccatcgaatggtaacaaactgctccttccctgaaacccagttcatagccgtgactgcctatcagaatgaggagataacggctctcaaaatcaagtacaatccttttgccaaagccttcttggatgccaaggaaagaaatcacctaagagacgtaccggaggctatctctgagagccagcatgtgacctattctcacttgggaggctggatcttttccaatccagatggagtgtgcacagcaggaaactccaattaccagtatgccgctcctctgcctctgcctgctccccacacccaccatggctgtgagcactattcgggtctccgaggacaccggcaggctccctacccttctgcgtacatgcacagaaaccattctccctcagtgaatttgatagaaagctcaagcaataatctgcaagttttctcgggacctgacagctggacttccttatcctccacaccccatgccagcatcctgtctgtaccccacaccaacggaccaatcaatccagggcccagcccctacccgtgcctgtggaccatcagcaatggtgccggaggccccagtgggccaggcccggaggtgcacgccagcaccccaggagcatttctcctcggaaacccagctgtgacttcacccccttctgtgctctccacccaagcacccacttcggctggtgtggaggttctgggggagccctcgctaaccagcattgctgtgtccacctggacagcagtggcctcgcatcccttcgcgggctggggtggcccaggagcgggtgggcaccattctccttcctcactggatggttaagcaggatcctaggagcctctttgcacagcgatccttccatgtgtagagtgcttagaaaccccatcaactgatctagtgagtcagactgtggaatctcccttcccactagctggaggtggaggtgggttattacagaagtcatactgggagagggttcagtttggatgatgctagttagatcatttgcatctctccaccattttcttctgcactcccattttctctgcagcttattcttgccatgcttaggtgacagaagtttgttaagtaccatccttgtgccctgcctcttattctcaaatcgttctggaaagcctcacttccttttctgtggagaaggtgcaaagctgttaaatgagctcagagtttacctagctaaggccactgcttcctgctttgtgaagcctggaaagtatgtgtggccacagggctcaggttcacacttctgctttgagaccaggatggggtgtaagccatagagtaaggttaacaaaaagaataaagctaatcatgtattacaaacagcagtgtgcccagacttgtggaaatgaagtcatgtcactcctctgctcagaaaccttcaatggttcaccattaccagtggaatgaagtcaattctcctcactataactgggtgtggtagtttaagcctataatctcagcccttttggaggccaaggtaagaggatcgcttgaggtcaggagttcgagaccagcttgtgcaacaaagtgagagcctgtctctacaaaaaatagtcatgcacacaaaattagctgggcatggtggcctgtgcctatagtcccaactacttagaggaggatcgcttgatctcaggaggttgaggctgcagtgaattatgattgtggcattgcactccagcctgggtggtagatcaaggctttgtttcatttgaaaaaaaagaaagaaagaaagaaagaaagaaatcctactacgagcgatcacaccatctggcctgaaaccacttccccagcttaggtccctctgttatcctgttggcctcctatgtattggtcaaggcaggcatctctgttctctgaacattcattgcactttcccacctctataccttgcctgtgccttagtgtcctcttttttccagttcacctgtgcgaatccgacccacctcccagagcctggctgaaacgtcactccctgcatccaacatctgatctgctgagatatgtctgatctatctctgctcgctgttctcccgttgtttttgcctctgccatagagctcacctcattttgccttgtatttttgttacctgtgagtgtgtctctccctattagactgtaagcctctcgagggtgaggcctagccttcttgtctttgtaacccacagcagctggtactgtgccttgcctattgtaggtgcccaataaacatttgctgaactgaa

SEQ ID NO: 189710 - DNA, 1757 bp, Homo sapiens
  Payload ID: 17459
  Gene Symbol: TBX19
  Gene Name: T-box 19
  ENST ID: ENST00000441464
  CDS Start-End: 1-844
aaaagagagggaattaaactggttttacagaagacaaagggttctgtttgcccatgtgtatcctacttttactaacacttcttgtctttgtaaatgcaagataacggctctcaaaatcaagtacaatccttttgccaaagccttcttggatgccaaggaaagaaatcacctaagagacgtaccggaggctatctctgagagccagcatgtgacctattctcacttgggaggctggatcttttccaatccagatggagtgtgcacagcaggaaactccaattaccagtatgccgctcctctgcctctgcctgctccccacacccaccatggctgtgagcactattcgggtctccgaggacaccggcaggctccctacccttctgcgtacatgcacagaaaccattctccctcagtgaatttgatagaaagctcaagcaataatctgcaagttttctcgggacctgacagctggacttccttatcctccacaccccatgccagcatcctgtctgtaccccacaccaacggaccaatcaatccagggcccagcccctacccgtgcctgtggaccatcagcaatggtgccggaggccccagtgggccaggcccggaggtgcacgccagcaccccaggagcatttctcctcggaaacccagctgtgacttcacccccttctgtgctctccacccaagcacccacttcggctggtgtggaggttctgggggagccctcgctaaccagcattgctgtgtccacctggacagcagtggcctcgcatcccttcgcgggctggggtggcccaggagcgggtgggcaccattctccttcctcactggatggttaagcaggatcctaggagcctctttgcacagcgatccttccatgtgtagagtgcttagaaaccccatcaactgatctagtgagtcagactgtggaatctcccttcccactagctggaggtggaggtgggttattacagaagtcatactgggagagggttcagtttggatgatgctagttagatcatttgcatctctccaccattttcttctgcactcccattttctctgcagcttattcttgccatgcttaggtgacagaagtttgttaagtaccatccttgtgccctgcctcttattctcaaatcgttctggaaagcctcacttccttttctgtggagaaggtgcaaagctgttaaatgagctcagagtttacctagctaaggccactgcttcctgctttgtgaagcctggaaagtatgtgtggccacagggctcaggttcacacttctgctttgagaccaggatggggtgtaagccatagagtaaggttaacaaaaagaataaagctaatcatgtattacaaacagcagtgtgcccagacttgtggaaatgaagtcatgtcactcctctgctcagaaaccttcaatggttcaccattaccagtggaatgaagtcaattctcctcactataactgggtgtggtagtttaagcctataatctcagcccttttggaggccaaggtaagaggatcgcttgaggtcaggagttcgagaccagcttgtgcaacaaagtgagagcctgtctctacaaaaaatagtcatgcacacaaaattagctgggcatggtggcctgtgcctatagtcccaactacttagaggaggatcgcttgatctcaggaggttgaggctgcagtgaattatgattgtggcattgcactccagcctgggtggtagatcaaggctttgtttcatttg

SEQ ID NO: 189711 - DNA, 2377 bp, Homo sapiens
  Payload ID: 17459
  Gene Symbol: TBX19
  Gene Name: T-box 19
  ENST ID: ENST00000431969
  CDS Start-End: 1-955
acggatgtttccagtcctaaagattagtgtcacagggttggaccccaatgccatgtactccctcctgctggactttgtccctacggacagtcaccgctggaagtacgtcaacggggaatgggtgcccgctggcaagccagaggtctccagccacagctgcgtctacattcacccggactcccccaactttggggcccactggatgaaagctcccatctccttcagcaaagtgaagctgaccaacaagctcaatggaggcgggcagataatgttgaattctctgcataaatatgaaccccaggttcacatagtgcgtgttggaagtgcccatcgaatggtaacaaactgctccttccctgaaacccagttcatagccgtgactgcctatcagaatgaggagataacggctctcaaaatcaagtacaatccttttgccaaagccttcttggatgccaaggaaagaaatcacctaagagacgtaccggaggctatctctgagagccagcatgtgacctattctcacttgaatttgatagaaagctcaagcaataatctgcaagttttctcgggacctgacagctggacttccttatcctccacaccccatgccagcatcctgtctgtaccccacaccaacggaccaatcaatccagggcccagcccctacccgtgcctgtggaccatcagcaatggtgccggaggccccagtgggccaggcccggaggtgcacgccagcaccccaggagcatttctcctcggaaacccagctgtgacttcacccccttctgtgctctccacccaagcacccacttcggctggtgtggaggttctgggggagccctcgctaaccagcattgctgtgtccacctggacagcagtggcctcgcatcccttcgcgggctggggtggcccaggagcgggtgggcaccattctccttcctcactggatggttaagcaggatcctaggagcctctttgcacagcgatccttccatgtgtagagtgcttagaaaccccatcaactgatctagtgagtcagactgtggaatctcccttcccactagctggaggtggaggtgggttattacagaagtcatactgggagagggttcagtttggatgatgctagttagatcatttgcatctctccaccattttcttctgcactcccattttctctgcagcttattcttgccatgcttaggtgacagaagtttgttaagtaccatccttgtgccctgcctcttattctcaaatcgttctggaaagcctcacttccttttctgtggagaaggtgcaaagctgttaaatgagctcagagtttacctagctaaggccactgcttcctgctttgtgaagcctggaaagtatgtgtggccacagggctcaggttcacacttctgctttgagaccaggatggggtgtaagccatagagtaaggttaacaaaaagaataaagctaatcatgtattacaaacagcagtgtgcccagacttgtggaaatgaagtcatgtcactcctctgctcagaaaccttcaatggttcaccattaccagtggaatgaagtcaattctcctcactataactgggtgtggtagtttaagcctataatctcagcccttttggaggccaaggtaagaggatcgcttgaggtcaggagttcgagaccagcttgtgcaacaaagtgagagcctgtctctacaaaaaatagtcatgcacacaaaattagctgggcatggtggcctgtgcctatagtcccaactacttagaggaggatcgcttgatctcaggaggttgaggctgcagtgaattatgattgtggcattgcactccagcctgggtggtagatcaaggctttgtttcatttgaaaaaaaagaaagaaagaaagaaagaaagaaatcctactacgagcgatcacaccatctggcctgaaaccacttccccagcttaggtccctctgttatcctgttggcctcctatgtattggtcaaggcaggcatctctgttctctgaacattcattgcactttcccacctctataccttgcctgtgccttagtgtcctcttttttccagttcacctgtgcgaatccgacccacctcccagagcctggctgaaacgtcactccctgcatccaacatctgatctgctgagatatgtctgatctatctctgctcgctgttctcccgttgtttttgcctctgccatagagctcacctcattttgccttgtatttttgttacctgtgagtgtgtctctccctattagactgtaagcctctcgagggtgaggcctagccttcttgtctttgtaacccacagcagctggtactgtgccttgcctattgtaggtgcccaataaacatttgctgaactg

SEQ ID NO: 189712 - DNA, 3339 bp, Homo sapiens
  Payload ID: 17460
  Gene Symbol: TBX2
  Gene Name: T-box 2
  Uniprot ID: Q13207
  ENST ID: ENST00000240328
  CDS Start-End: 282-2420
cagagatcacgacaagatctaaccagtcgcgcgtggtccccggcgccggagcgggccagctcagcccggcccagcccggccccgcgcagagcccccgccgcccccgcgcacagagccgggtgccccttgcggtgcgccggacgggaagccccgaggagcagctgctgcgcccgccacccgggtcgtccgtccaccgcgcgcgccgccgcccgggccgggggtccgagccgcgcgcccccggccccggccccggcccccgggcgcctgggccggatgtcccgatgagagagccggcgctggcggccagcgccatggcttaccacccgttccacgcgccacggcccgccgacttccccatgtccgcctttctggcggcggcgcagccctccttcttcccggcactcgcgctgccgcccggcgcgctggccaagccgctgcccgacccgggcctggcgggggcggcggccgcggcggcggcggcggcagcagcggccgaggcggggctgcacgtctcggcactgggcccgcacccgcccgccgcgcatctgcgctccctcaagagcctggagcccgaggacgaggtggaggacgaccccaaggtgacgctggaggccaaggagctgtgggaccagttccacaagctaggcacggagatggtcatcaccaagtccgggaggcggatgttcccccccttcaaggtgcgagtcagcggcctggacaagaaggccaagtatatcctgctgatggacattgtagccgctgacgattgccgctataagttccacaactcgcgctggatggtggcgggcaaggccgaccctgagatgcccaaacgcatgtacatccacccagacagcccagccacgggggagcagtggatggctaagcctgtggccttccacaagctgaagctgaccaacaacatctctgacaagcacggcttcaccatcctaaactccatgcacaagtaccagccgcgcttccacatagtgcgagccaacgacatcctgaagctgccttacagcaccttccgcacctacgtgttcccggagaccgacttcatcgccgtcactgcctaccagaatgacaagatcacacagctgaagatcgacaacaacccgtttgccaagggcttccgggacaccgggaacggccggcgggagaaaaggaagcagctgacgctgccgtctctacgcttgtacgaggagcactgcaaacccgagcgcgatggcgcggagtcagacgcctcgtcgtgcgaccctccccccgcgcgggaaccacccacctccccgggcgcagcgcccagtccgctgcgcctgcaccgggcccgagctgaggagaagtcgtgcgccgcggacagcgacccggagcctgagcggttgagcgaggagcgtgcgggggcgccgctaggccgcagcccggctccagacagcgccagccccactcgcttgaccgaacccgagcgcgcccgggagcggcgtagtcccgagaggggcaaggagccggccgagagcggcggggacggcccgttcggcctgaggagcctggagaaggagcgcgccgaagctcggaggaaggacgaggggcgcaaggaggcggccgagggcaaggagcagggcctggcgccgctggtggtgcagacagacagtgcgtcccccctgggcgccggacacctgcccggcctggccttttccagccacttgcacgggcagcagttctttgggccgctgggagccggccagccgctcttcctgcaccctggacagttcaccatgggccctggcgccttctccgccatgggcatgggtcacctactggcctcggtggcaggcggcggcaacggcggaggtggcgggcctgggaccgccgcggggctggacgcaggcgggctgggtcccgcggccagcgcagcaagcaccgccgcgcccttcccgttccacctctcccagcacatgctggcatctcagggaattccaatgcccactttcggaggcctcttcccctacccctacacctacatggcagcagcagccgcagccgcctcggctttgcccgccactagtgctgcagctgccgccgccgcagccgccggctccctctcccggagccccttcctgggcagtgcccggccccgactgcgtttcagcccctatcagatcccggtcaccatcccgcctagcactagcctcctcaccaccgggctggcctctgagggctccaaggccgctggtggaaacagccgggagcctagccccctgcccgagctggctctccgcaaagtaggggccccatcccgcggtgccctgtcgcccagtggctcggccaaggaggcggccaatgaactgcagagcatccagagactggtgagtgggctggagagccagcgagccctctccccaggccgggagtcgcccaagtgaggggctgcccagctgctcccctgccacgcaggccacccgggctgcctgcccctgctgcttgggacgtgtacagcacagaatgagtatttatttaaataaaggagaaaagtgggctgcagcagccggaatagagcctcgtctggcaagtcggggcctgggacacttccctgggcctcaacaaggatcaggctgctggaaacacagtcacttgggagctgctgggctaggtccagatccgctccagcgtcaaggtggcatccgaaggtgtctctggtcttccagcgaggtgggagaggcctcatccagggcccagcggtccctgcagaagccagaaggtgcaggggccaggggtgggagcatcggagggagtcccagagccctggaccttgggcctagaccgcgtgataaaactgggttgagggatgctggaaccagttacgactgaagtcagtgtagacctgagctgggagggaacctgttagtctccccacctcttccctgaagagacaggcacccctcccagccgtggtcaacggagggagtggcacttctgccttgagtccccaggggaaaaaaaaaaaagatatttatgaaataaatggtaatttgtgtaaataagctttaaggttcccagaatatgcaaattggtattaatttattcaaaggtgtacattgctgtgtacatatatttagagattaactcatacatttaaagtttttttcattttacgtgagcatctatattgtacagggctgggggggcccttggctgcgggagaaggcccagagccctggaggagccaccaccccgccggcccctcgacccctcggcccctcggcccctccgcccgggtttggctcgcccggcccgcgggctccacctcaggttttcacttttcgctccggagcgagaacgaaa

SEQ ID NO: 189713 - DNA, 3344 bp, Homo sapiens
  Payload ID: 17460
  Gene Symbol: TBX2
  Gene Name: T-box 2
  ENST ID: ENST00000419047
  CDS Start-End: 268-708
agatctaaccagtcgcgcgtggtccccggcgccggagcgggccagctcagcccggcccagcccggccccgcgcagagcccccgccgcccccgcgcacagagccgggtgccccttgcggtgcgccggacgggaagccccgaggagcagctgctgcgcccgccacccgggtcgtccgtccaccgcgcgcgccgccgcccgggccgggggtccgagccgcgcgcccccggccccggccccggcccccgggcgcctgggccggatgtcccgatgagagagccggcgctggcggccagcgccatggcttaccacccgttccacgcgccacggcccgccgacttccccatgtccgcctttctggcggcggcgcagccctccttcttcccggcactcgcgctgccgcccggcgcgctggccaagccgctgcccgacccgggcctggcgggggcggcggccgcggcggcggcggcggcagcagcggccgaggcggggctgcacgtctcggcactgggcccgcacccgcccgccgcgcatctgcgctccctcaagagcctggagcccgaggacgaggtggaggacgaccccaaggtgacgctggaggccaaggagctgtgggaccagttccacaagctaggcacggagatggtcatcaccaagtccgggaggtgcgagtcagcggcctggacaagaaggccaagtatatcctgctgatggacattgtagccgctgacgattgccgctataagttccacaactcgcgctggatggtggcgggcaaggccgaccctgagatgcccaaacgcatgtacatccacccagacagcccagccacgggggagcagtggatggctaagcctgtggccttccacaagctgaagctgaccaacaacatctctgacaagcacggcttcaccatcctaaactccatgcacaagtaccagccgcgcttccacatagtgcgagccaacgacatcctgaagctgccttacagcaccttccgcacctacgtgttcccggagaccgacttcatcgccgtcactgcctaccagaatgacaagatcacacagctgaagatcgacaacaacccgtttgccaagggcttccgggacaccgggaacggccggcgggagaaaaggaagcagctgacgctgccgtctctacgcttgtacgaggagcactgcaaacccgagcgcgatggcgcggagtcagacgcctcgtcgtgcgaccctccccccgcgcgggaaccacccacctccccgggcgcagcgcccagtccgctgcgcctgcaccgggcccgagctgaggagaagtcgtgcgccgcggacagcgacccggagcctgagcggttgagcgaggagcgtgcgggggcgccgctaggccgcagcccggctccagacagcgccagccccactcgcttgaccgaacccgagcgcgcccgggagcggcgtagtcccgagaggggcaaggagccggccgagagcggcggggacggcccgttcggcctgaggagcctggagaaggagcgcgccgaagctcggaggaaggacgaggggcgcaaggaggcggccgagggcaaggagcagggcctggcgccgctggtggtgcagacagacagtgcgtcccccctgggcgccggacacctgcccggcctggccttttccagccacttgcacgggcagcagttctttgggccgctgggagccggccagccgctcttcctgcaccctggacagttcaccatgggccctggcgccttctccgccatgggcatgggtcacctactggcctcggtggcaggcggcggcaacggcggaggtggcgggcctgggaccgccgcggggctggacgcaggcgggctgggtcccgcggccagcgcagcaagcaccgccgcgcccttcccgttccacctctcccagcacatgctggcatctcagggaattccaatgcccactttcggaggcctcttcccctacccctacacctacatggcagcagcagccgcagccgcctcggctttgcccgccactagtgctgcagctgccgccgccgcagccgccggctccctctcccggagccccttcctgggcagtgcccggccccgactgcgtttcagcccctatcagatcccggtcaccatcccgcctagcactagcctcctcaccaccgggctggcctctgagggctccaaggccgctggtggaaacagccgggagcctagccccctgcccgagctggctctccgcaaagtaggggccccatcccgcggtgccctgtcgcccagtggctcggccaaggaggcggccaatgaactgcagagcatccagagactggtgagtgggctggagagccagcgagccctctccccaggccgggagtcgcccaagtgaggggctgcccagctgctcccctgccacgcaggccacccgggctgcctgcccctgctgcttgggacgtgtacagcacagaatgagtatttatttaaataaaggagaaaagtgggctgcagcagccggaatagagcctcgtctggcaagtcggggcctgggacacttccctgggcctcaacaaggatcaggctgctggaaacacagtcacttgggagctgctgggctaggtccagatccgctccagcgtcaaggtggcatccgaaggtgtctctggtcttccagcgaggtgggagaggcctcatccagggcccagcggtccctgcagaagccagaaggtgcaggggccaggggtgggagcatcggagggagtcccagagccctggaccttgggcctagaccgcgtgataaaactgggttgagggatgctggaaccagttacgactgaagtcagtgtagacctgagctgggagggaacctgttagtctccccacctcttccctgaagagacaggcacccctcccagccgtggtcaacggagggagtggcacttctgccttgagtccccaggggaaaaaaaaaaaagatatttatgaaataaatggtaatttgtgtaaataagctttaaggttcccagaatatgcaaattggtattaatttattcaaaggtgtacattgctgtgtacatatatttagagattaactcatacatttaaagtttttttcattttacgtgagcatctatattgtacagggctgggggggcccttggctgcgggagaaggcccagagccctggaggagccaccaccccgccggcccctcgacccctcggcccctcggcccctccgcccgggtttggctcgcccggcccgcgggctccacctcaggttttcacttttcgctccggagcgagaacgaaacgacaaaaacgcaagaaaacaataaaacgctagaaagcgaa

SEQ ID NO: 189714 - DNA, 1871 bp, Homo sapiens
  Payload ID: 17461
  Gene Symbol: TBX20
  Gene Name: T-box 20
  Uniprot ID: Q9UMR3
  ENST ID: ENST00000408931
  CDS Start-End: 528-1871
ggatcgccgccgccagcaaattaaggcgcagggcagcgagcgccagggctcactgtccgtagttccgcgccgcgctccccacgccagcgtcctagcagccgcgctcggctggtggccacctcagcctgggacatcccggctgtccccagccccagagggaggaaggacgcggaggggatgctccaggaccccaggactttgtgcagttgatgctcgtttccgccttcgggctgtgcagactgtcgtcctgccgagcgccccggggcgtgcgcacccgccgtagtgctcggtgggccctctcctctccggctgccttcgaagtctctgcggctctggggctttgcggtggggaatagaggccagtgtgcagctctggagtcgttggagctgacacttctggagtccctggccccgctgtgactgctctcggaaactttgagctgtgtttcgggtctttgtctcccttggggaatctggacggcagttcggacgaccccgtccctggccaggaccgcgtgctggggaccatggagttcacggcgtcccccaagccccaactctcctctcgggccaacgccttctccattgccgcgctcatgtcgagcggcggctctaaggagaaggaggcgacggagaacacaatcaaacccctggagcaatttgtggagaagtcgtcctgtgcccagcccctgggtgagctgaccagcctggatgctcatggggagtttggtggaggcagtggcagcagcccgtcctcctcctctctgtgcactgagccactgatccccaccacccccatcatccccagtgaggaaatggccaaaattgcctgcagcctggagaccaaggagctttgggacaaattccatgagctgggcaccgagatgatcatcaccaagtcgggcaggaggatgtttccaaccatccgggtgtccttttcgggggtggatcctgaggccaagtacatagtcctgatggacatcgtccctgtggacaacaagaggtaccgctacgcctaccaccggtcctcctggctggtggctggcaaggccgacccgccgttgccagccaggctctatgtgcatccagattctccttttaccggtgagcaactactcaaacagatggtgtcttttgaaaaggtgaaactcaccaacaatgaactggatcaacatggccatataattttgaactcaatgcataagtaccagccaagggtgcacatcattaagaagaaagaccacacagcctcattgctcaacctgaagtctgaagaatttagaactttcatctttccagaaacagtttttacggcagtcactgcctaccagaatcaactgataacgaagctgaaaatagatagcaatccttttgccaaaggattccgggattcctccaggctcactgacattgagagggaaagtgtggagagcctgattcaaaagcattcctatgcacgctcacccatccgtacctacggaggagaagaagatgtcttgggggatgagagtcagacaaccccaaatcgagggtcagcctttacaacatctgataatttgtctctcagctcctgggtatcatcttcttccagttttcctgggtttcagcacccacagtccctgactgctcttggcaccagcacagcatccatagcaacacccattcctcaccccatccagggttctctgccaccatatagccgactgggaatgcctctgacaccatcggccattgccagctccatgcaagggagtggccccacattcccttcattccacatgccgcgataccatcactattttcagcaggggccctatgctgccattcaaggactacgccattcctctgctgtgatgacgccatttgtatga

SEQ ID NO: 189715 - DNA, 2572 bp, Homo sapiens
  Payload ID: 17462
  Gene Symbol: TBX21
  Gene Name: T-box 21
  Uniprot ID: Q9UL17
  ENST ID: ENST00000177694
  CDS Start-End: 212-1819
cggcccgctggagaggaagcccgagagctgccgcgcgcctgccggacgagggcgtagaagccaggcgtcagagcccgggctccggtggggtcccccacccggccctcgggtcccccgccccctgctccctgcccatcccagcccacgcgaccctctcgcgcgcggaggggcgggtcctcgacggctacgggaaggtgccagcccgccccggatgggcatcgtggagccgggttgcggagacatgctgacgggcaccgagccgatgccggggagcgacgagggccgggcgcctggcgccgacccgcagcaccgctacttctacccggagccgggcgcgcaggacgcggacgagcgtcgcgggggcggcagcctggggtctccctacccggggggcgccttggtgcccgccccgccgagccgcttccttggagcctacgcctacccgccgcgaccccaggcggccggcttccccggcgcgggcgagtccttcccgccgcccgcggacgccgagggctaccagccgggcgagggctacgccgccccggacccgcgcgccgggctctacccggggccgcgtgaggactacgcgctacccgcgggactggaggtgtcggggaaactgagggtcgcgctcaacaaccacctgttgtggtccaagtttaatcagcaccagacagagatgatcatcaccaagcagggacggcggatgttcccattcctgtcatttactgtggccgggctggagcccaccagccactacaggatgtttgtggacgtggtcttggtggaccagcaccactggcggtaccagagcggcaagtgggtgcagtgtggaaaggccgagggcagcatgccaggaaaccgcctgtacgtccacccggactcccccaacacaggagcgcactggatgcgccaggaagtttcatttgggaaactaaagctcacaaacaacaagggggcgtccaacaatgtgacccagatgattgtgctccagtccctccataagtaccagccccggctgcatatcgttgaggtgaacgacggagagccagaggcagcctgcaacgcttccaacacgcatatctttactttccaagaaacccagttcattgccgtgactgcctaccagaatgccgagattactcagctgaaaattgataataacccctttgccaaaggattccgggagaactttgagtccatgtacacatctgttgacaccagcatcccctccccgcctggacccaactgtcaattccttgggggagatcactactctcctctcctacccaaccagtatcctgttcccagccgcttctaccccgaccttcctggccaggcgaaggatgtggttccccaggcttactggctgggggccccccgggaccacagctatgaggctgagtttcgagcagtcagcatgaagcctgcattcttgccctctgcccctgggcccaccatgtcctactaccgaggccaggaggtcctggcacctggagctggctggcctgtggcaccccagtaccctcccaagatgggcccggccagctggttccgccctatgcggactctgcccatggaacccggccctggaggctcagagggacggggaccagaggaccagggtccccccttggtgtggactgagattgcccccatccggccggaatccagtgattcaggactgggcgaaggagactctaagaggaggcgcgtgtccccctatccttccagtggtgacagctcctcccctgctggggccccttctccttttgataaggaagctgaaggacagttttataactattttcccaactgagcagatgacatgatgaaaggaacagaaacagtgttattaggttggaggacaccgactaatttgggaaacggatgaaggactgagaaggcccccgctccctctggcccttctctgtttagtagttggttggggaagtggggctcaagaaggattttggggttcaccagatgcttcctggcccacgatgaaacctgagaggggtgtccccttgccccatcctctgccctaactacagtcgtttacctggtgctgcgtcttgcttttggtttccagctggagaaaagaagacaagaaagtcttgggcatgaaggagctttttgcatctagtgggtgggaggggtcaggtgtgggacatgggagcaggagactccactttcttcctttgtacagtaactttcaaccttttcgttggcatgtgtgttaatccctgatccaaaaagaacaaatacacgtatgttataaccatcagcccgccagggtcagggaaaggactcacctgactttggacagctggcctgggctccccctgctcaaacacagtggggatcagagaaaaggggctggaaaggggggaatggcccacatctcaagaagcaagatattgtttgtggtggttgtgtgtgggtgtgtgttttttctttttctttctttttattttttttgaatgggggaggctatttattgtactgagagtggtgtctggatatattccttttgtcttcatcactttctgaaaataaacataaaactgtt

SEQ ID NO: 189716 - DNA, 2249 bp, Homo sapiens
  Payload ID: 17463
  Gene Symbol: TBX22
  Gene Name: T-box 22
  Uniprot ID: Q9Y458
  ENST ID: ENST00000373294
  CDS Start-End: 29-1591
gcaaagaatcccttcaccccctccagggatggctctgagctctcgggcgcgtgccttctccgtggaagccttggtggggagacccagcaaaagaaaactccaagacccaatacaggcggagcagcctgagctgcgggagaaaaagggcggagaggaagaggaggagagaaggagcagcgctgcagggaagagcgagccgcttgaaaaacaacctaagacagagccctcaacatctgcttcctctggctgcggcagcgacagcggctacggcaacagctctgaaagtctggaagagaaagatattcaaatggagcttcaaggatctgaactgtggaaaagattccatgacatcgggactgagatgatcattactaaagcgggcaggcggatgttcccctctgttcgggtcaaggtgaaagggttggatccagggaagcagtaccatgtggccatcgatgtggtgccggtggattccaaacgctataggtacgtctatcacagctcacagtggatggtagctgggaatacagaccatttgtgcatcattcctagattctatgttcacccggactcaccctgctcgggagagacctggatgcggcagatcatcagctttgatcgcatgaaactcaccaacaatgagatggatgacaaaggccacatcattctgcaatccatgcataagtacaaaccccgagtgcacgtgatagagcaaggcagcagtgttgacctgtcccagattcagtccttgcccactgaaggtgttaaaacattctcctttaaagaaactgagttcaccacagtaacggcttaccaaaaccaacagattacgaaactaaaaatagaaagaaatccttttgctaaaggatttagagatactggaagaaacaggggtgtattggatgggcttttagagacctacccatggaggccttctttcactctcgattttaaaacctttggcgcagacacacaaagtggaagcagtggctcatctccagtgacctctagtggaggggccccctctcctttgaactccttactttctccactttgcttttcacctatgtttcatttacctacaagctcccttggaatgccctgtccagaggcatacctgcccaatgtcaacctgcctctatgctacaagatttgtccaactaatttttggcaacagcaacctcttgttttaccggctcctgaaagactagcaagcagcaacagttctcagtctttagccccactcatgatggaagtgcctatgttatcttccctgggggtcaccaattcaaaaagcggttcatctgaagactccagtgatcagtatctacaagcacctaattctaccaatcaaatgttatatggattacagtcacctggaaatatttttctgccaaactccatcaccccagaagcacttagttgctcctttcatccttcctatgacttttatagatacaatttctctatgccatctagactgataagtggttccaaccatcttaaagtgaatgacgacagtcaagtttcttttggagaaggcaaatgtaatcatgttcattggtatccagcaattaaccattacctttagtaagacaatagcatttctagaacaattacatgtaaacaaatattttctttatttgtagccaaagaaatttcaacagttattgggcttaaaaagcatcattacaatacagtatttctttgttatacatttaaagatttaaagtgccttatcaaataatattcatgaagagttgtttataatgtcaaatgaaacctacaggaatctctgattacagtggccttgagcttcaaaatgagatatgcaataaatattatttgatgatactccaccagtgaaaattgatgctaagtgatgggattttcaattatactgaagctagttcaccacgttaactgcattttacacattgacaatgacaaaaagaagatggatgtaattctcatgaaagcagtgaagcaatttcagttttaaaaatgaagatcggctttcatgtaattatctagtagttgtagaagaaaatttaattatttgtttgcctcatgcctttatactttgctgttgaagaaactactaatctcaatttaagatacaaataaggacacaaactttcaagtattatattttatttatctttgtagcctaaagaccatttaatcttgaaggaacacaaagatcaaatgaaaagtaaaacactctaaataaatttgcttttattttc

SEQ ID NO: 189717 - DNA, 2355 bp, Homo sapiens
  Payload ID: 17463
  Gene Symbol: TBX22
  Gene Name: T-box 22
  Uniprot ID: Q9Y458
  ENST ID: ENST00000373296
  CDS Start-End: 135-1697
cttctctgggctcttgagaagagctgctgcaggcatttgcagagtgaatgagctctgactgagacttgacttcagaaccactgggctggcctggcctcttgacacagcaacacactgcttcttgccttccagggatggctctgagctctcgggcgcgtgccttctccgtggaagccttggtggggagacccagcaaaagaaaactccaagacccaatacaggcggagcagcctgagctgcgggagaaaaagggcggagaggaagaggaggagagaaggagcagcgctgcagggaagagcgagccgcttgaaaaacaacctaagacagagccctcaacatctgcttcctctggctgcggcagcgacagcggctacggcaacagctctgaaagtctggaagagaaagatattcaaatggagcttcaaggatctgaactgtggaaaagattccatgacatcgggactgagatgatcattactaaagcgggcaggcggatgttcccctctgttcgggtcaaggtgaaagggttggatccagggaagcagtaccatgtggccatcgatgtggtgccggtggattccaaacgctataggtacgtctatcacagctcacagtggatggtagctgggaatacagaccatttgtgcatcattcctagattctatgttcacccggactcaccctgctcgggagagacctggatgcggcagatcatcagctttgatcgcatgaaactcaccaacaatgagatggatgacaaaggccacatcattctgcaatccatgcataagtacaaaccccgagtgcacgtgatagagcaaggcagcagtgttgacctgtcccagattcagtccttgcccactgaaggtgttaaaacattctcctttaaagaaactgagttcaccacagtaacggcttaccaaaaccaacagattacgaaactaaaaatagaaagaaatccttttgctaaaggatttagagatactggaagaaacaggggtgtattggatgggcttttagagacctacccatggaggccttctttcactctcgattttaaaacctttggcgcagacacacaaagtggaagcagtggctcatctccagtgacctctagtggaggggccccctctcctttgaactccttactttctccactttgcttttcacctatgtttcatttacctacaagctcccttggaatgccctgtccagaggcatacctgcccaatgtcaacctgcctctatgctacaagatttgtccaactaatttttggcaacagcaacctcttgttttaccggctcctgaaagactagcaagcagcaacagttctcagtctttagccccactcatgatggaagtgcctatgttatcttccctgggggtcaccaattcaaaaagcggttcatctgaagactccagtgatcagtatctacaagcacctaattctaccaatcaaatgttatatggattacagtcacctggaaatatttttctgccaaactccatcaccccagaagcacttagttgctcctttcatccttcctatgacttttatagatacaatttctctatgccatctagactgataagtggttccaaccatcttaaagtgaatgacgacagtcaagtttcttttggagaaggcaaatgtaatcatgttcattggtatccagcaattaaccattacctttagtaagacaatagcatttctagaacaattacatgtaaacaaatattttctttatttgtagccaaagaaatttcaacagttattgggcttaaaaagcatcattacaatacagtatttctttgttatacatttaaagatttaaagtgccttatcaaataatattcatgaagagttgtttataatgtcaaatgaaacctacaggaatctctgattacagtggccttgagcttcaaaatgagatatgcaataaatattatttgatgatactccaccagtgaaaattgatgctaagtgatgggattttcaattatactgaagctagttcaccacgttaactgcattttacacattgacaatgacaaaaagaagatggatgtaattctcatgaaagcagtgaagcaatttcagttttaaaaatgaagatcggctttcatgtaattatctagtagttgtagaagaaaatttaattatttgtttgcctcatgcctttatactttgctgttgaagaaactactaatctcaatttaagatacaaataaggacacaaactttcaagtattatattttatttatctttgtagcctaaagaccatttaatcttgaaggaacacaaagatcaaatgaaaagtaaaacactctaaataaatttgcttttattttc

SEQ ID NO: 189718 - DNA, 2355 bp, Homo sapiens; identical to SEQ ID NO: 189717
  Payload ID: 17463
  Gene Symbol: TBX22
  Gene Name: T-box 22
  Uniprot ID: Q9Y458
  ENST ID: ENST00000619509
  CDS Start-End: 135-1697

SEQ ID NO: 189719 - DNA, 1955 bp, Homo sapiens
  Payload ID: 17463
  Gene Symbol: TBX22
  Gene Name: T-box 22
  ENST ID: ENST00000625441
  CDS Start-End: 135-518
cttctctgggctcttgagaagagctgctgcaggcatttgcagagtgaatgagctctgactgagacttgacttcagaaccactgggctggcctggcctcttgacacagcaacacactgcttcttgccttccagggatggctctgagctctcgggcgcgtgccttctccgtggaagccttggtggggagacccagcaaaagaaaactccaagacccaatacaggcggagcagcctgagctgcgggagaaaaagggcggagaggaagaggaggagagaaggagcagcgctgcagggaagagcgagccgcttgaaaaacaacctaagacagagccctcaacatctgcttcctctggctgcggcagcgacagcggctacggcaacagctctgaaagtctggaagagaaagatattcaaatggagcttcaaggatctgaactgtggaaaagattccatgacatcgggactgagatgatcattactaaagcgggcggatgttcccctctgttcgggtcaaggtgaaagggttggatccagggaagcagtaccatgtggccatcgatgtggtgccggtggattccaaacgctataggtacgtctatcacagctcacagtggatggtagctgggaatacagaccatttgtgcatcattcctagattctatgttcacccggactcaccctgctcgggagagacctggatgcggcagatcatcagctttgatcgcatgaaactcaccaacaatgagatggatgacaaaggccacatcattctgcaatccatgcataagtacaaaccccgagtgcacgtgatagagcaaggcagcagtgttgacctgtcccagattcagtccttgcccactgaaggtgttaaaacattctcctttaaagaaactgagttcaccacagtaacggcttaccaaaaccaacagattacgaaactaaaaatagaaagaaatccttttgctaaaggatttagagatactggaagaaacaggggtgtattggatgggcttttagagacctacccatggaggccttctttcactctcgattttaaaacctttggcgcagacacacaaagtggaagcagtggctcatctccagtgacctctagtggaggggccccctctcctttgaactccttactttctccactttgcttttcacctatgtttcatttacctacaagctcccttggaatgccctgtccagaggcatacctgcccaatgtcaacctgcctctatgctacaagatttgtccaactaatttttggcaacagcaacctcttgttttaccggctcctgaaagactagcaagcagcaacagttctcagtctttagccccactcatgatggaagtgcctatgttatcttccctgggggtcaccaattcaaaaagcggttcatctgaagactccagtgatcagtatctacaagcacctaattctaccaatcaaatgttatatggattacagtcacctggaaatatttttctgccaaactccatcaccccagaagcacttagttgctcctttcatccttcctatgacttttatagatacaatttctctatgccatctagactgataagtggttccaaccatcttaaagtgaatgacgacagtcaagtttcttttggagaaggcaaatgtaatcatgttcattggtatccagcaattaaccattacctttagtaagacaatagcatttctagaacaattacatgtaaacaaatattttctttatttgtagccaaagaaatttcaacagttattgggcttaaaaagcatcattacaatacagtatttctttgttatacatttaaagatttaaagtgccttatcaaataatattcatgaagagttgtttataatgtcaaatgaaacctacaggaatctctgattacagtggccttgagcttcaaaatgagatatgcaataaatattatttgatgat

SEQ ID NO: 189720 - DNA, 2100 bp, Homo sapiens
  Payload ID: 17463
  Gene Symbol: TBX22
  Gene Name: T-box 22
  ENST ID: ENST00000628739
  CDS Start-End: 1-215
ctaagacagagccctcaacatctgcttcctctggctgcggcagcgacagcggctacggcaacagctctgaaagtctggaagagaaagatattcaaatggagcttcaaggatctgaactgtggaaaagattccatgacatcgggactgagatgatcattactaaagcgggcaggttcggttctgcccaagctgttcacaagggtcacacacattaggcacttaatttaccgctctggcggatgttcccctctgttcgggtcaaggtgaaagggttggatccagggaagcagtaccatgtggccatcgatgtggtgccggtggattccaaacgctataggtacgtctatcacagctcacagtggatggtagctgggaatacagaccatttgtgcatcattcctagattctatgttcacccggactcaccctgctcgggagagacctggatgcggcagatcatcagctttgatcgcatgaaactcaccaacaatgagatggatgacaaaggccacatcattctgcaatccatgcataagtacaaaccccgagtgcacgtgatagagcaaggcagcagtgttgacctgtcccagattcagtccttgcccactgaaggtgttaaaacattctcctttaaagaaactgagttcaccacagtaacggcttaccaaaaccaacagattacgaaactaaaaatagaaagaaatccttttgctaaaggatttagagatactggaagaaacaggggtgtattggatgggcttttagagacctacccatggaggccttctttcactctcgattttaaaacctttggcgcagacacacaaagtggaagcagtggctcatctccagtgacctctagtggaggggccccctctcctttgaactccttactttctccactttgcttttcacctatgtttcatttacctacaagctcccttggaatgccctgtccagaggcatacctgcccaatgtcaacctgcctctatgctacaagatttgtccaactaatttttggcaacagcaacctcttgttttaccggctcctgaaagactagcaagcagcaacagttctcagtctttagccccactcatgatggaagtgcctatgttatcttccctgggggtcaccaattcaaaaagcggttcatctgaagactccagtgatcagtatctacaagcacctaattctaccaatcaaatgttatatggattacagtcacctggaaatatttttctgccaaactccatcaccccagaagcacttagttgctcctttcatccttcctatgacttttatagatacaatttctctatgccatctagactgataagtggttccaaccatcttaaagtgaatgacgacagtcaagtttcttttggagaaggcaaatgtaatcatgttcattggtatccagcaattaaccattacctttagtaagacaatagcatttctagaacaattacatgtaaacaaatattttctttatttgtagccaaagaaatttcaacagttattgggcttaaaaagcatcattacaatacagtatttctttgttatacatttaaagatttaaagtgccttatcaaataatattcatgaagagttgtttataatgtcaaatgaaacctacaggaatctctgattacagtggccttgagcttcaaaatgagatatgcaataaatattatttgatgatactccaccagtgaaaattgatgctaagtgatgggattttcaattatactgaagctagttcaccacgttaactgcattttacacattgacaatgacaaaaagaagatggatgtaattctcatgaaagcagtgaagcaatttcagttttaaaaatgaagatcggctttcatgtaattatctagtagttgtagaagaaaatttaattatttgtttgcctcatgcctttatactttgctgttgaagaaactactaatctcaatttaagatacaaataaggacacaaactttcaagtattatattttatttatctttgtagcctaaagaccatttaatcttgaaggaacacaaagatcaaatgaaaagtaaaacactctaaataaatttgcttttattttc

SEQ ID NO: 189721 - DNA, 2249 bp, Homo sapiens; identical to SEQ ID NO: 189716
  Payload ID: 17463
  Gene Symbol: TBX22
  Gene Name: T-box 22
  Uniprot ID: Q9Y458
  ENST ID: ENST00000628957
  CDS Start-End: 29-1591

SEQ ID NO: 189722 - DNA, 1955 bp, Homo sapiens; identical to SEQ ID NO: 189719
  Payload ID: 17463
  Gene Symbol: TBX22
  Gene Name: T-box 22
  ENST ID: ENST00000626498
  CDS Start-End: 135-518

SEQ ID NO: 189723 - DNA, 4208 bp, Homo sapiens
  Payload ID: 17464
  Gene Symbol: TBX3
  Gene Name: T-box 3
  Uniprot ID: O15119
  ENST ID: ENST00000257566
  CDS Start-End: 391-2622
gcagggctggagtgtctatttcgagctcagcggcagggctcgggcgcgagtcgagaccctgctcgctcctctcgcttctgaaaccgacgttcaggagcggctttttaaaaacgcaaggcacaaggacggtcacccgcgcgactatgtttgctgatttttcgccttgccctctttaaaagcggcctcccattctccaaaagacacttcccctcctccctttgaagtgcattagttgtgatttctgcctccttttcttttttctttcttttttgttttgctttttccccccttttgaattatgtgctgctgttaaacaacaacaaaaaaacaacaaaacacagcagctgcggacttgtccccggctggagcccagcgccccgcctggagtggatgagcctctccatgagagatccggtcattcctgggacaagcatggcctaccatccgttcctacctcaccgggcgccggacttcgccatgagcgcggtgctgggtcaccagccgccgttcttccccgcgctgacgctgcctcccaacggcgcggcggcgctctcgctgccgggcgccctggccaagccgatcatggatcaattggtgggggcggccgagaccggcatcccgttctcctccctggggccccaggcgcatctgaggcctttgaagaccatggagcccgaagaagaggtggaggacgaccccaaggtgcacctggaggctaaagaactttgggatcagtttcacaagcggggcaccgagatggtcattaccaagtcgggaaggcgaatgtttcctccatttaaagtgagatgttctgggctggataaaaaagccaaatacattttattgatggacattatagctgctgatgactgtcgttataaatttcacaattctcggtggatggtggctggtaaggccgaccccgaaatgccaaagaggatgtacattcacccggacagccccgctactggggaacagtggatgtccaaagtcgtcactttccacaaactgaaactcaccaacaacatttcagacaaacatggatttactttggccttcccaagtgatcacgctacgtggcaggggaattatagttttggtactcagactatattgaactccatgcacaaataccagccccggttccacattgtaagagccaatgacatcttgaaactcccttatagtacatttcggacatacttgttccccgaaactgaattcatcgctgtgactgcataccagaatgataagataacccagttaaaaatagacaacaacccttttgcaaaaggtttccgggacactggaaatggccgaagagaaaaaagaaaacagctcaccctgcagtccatgagggtgtttgatgaaagacacaaaaaggagaatgggacctctgatgagtcctccagtgaacaagcagctttcaactgcttcgcccaggcttcttctccagccgcctccactgtagggacatcgaacctcaaagatttatgtcccagcgagggtgagagcgacgccgaggccgagagcaaagaggagcatggccccgaggcctgcgacgcggccaagatctccaccaccacgtcggaggagccctgccgtgacaagggcagccccgcggtcaaggctcaccttttcgctgctgagcggccccgggacagcgggcggctggacaaagcgtcgcccgactcacgccatagccccgccaccatctcgtccagcactcgcggcctgggcgcggaggagcgcaggagcccggttcgcgagggcacagcgccggccaaggtggaagaggcgcgcgcgctcccgggcaaggaggccttcgcgccgctcacggtgcagacggacgcggccgccgcgcacctggcccagggccccctgcctggcctcggcttcgccccgggcctggcgggccaacagttcttcaacgggcacccgctcttcctgcaccccagccagtttgccatggggggcgccttctccagcatggcggccgctggcatgggtcccctcctggccacggtttctggggcctccaccggtgtctcgggcctggattccacggccatggcctctgccgctgcggcgcagggactgtccggggcgtccgcggccaccctgcccttccacctccagcagcacgtcctggcctctcagggcctggccatgtcccctttcggaagcctgttcccttacccctacacgtacatggccgcagcggcggccgcctcctctgcggcagcctccagctcggtgcaccgccaccccttcctcaatctgaacaccatgcgcccgcggctgcgctacagcccctactccatcccggtgccggtcccggacggcagcagtctgctcaccaccgccctgccctccatggcggcggccgcggggcccctggacggcaaagtcgccgccctggccgccagcccggcctcggtggcagtggactcgggctctgaactcaacagccgctcctccacgctctcctccagctccatgtccttgtcgcccaaactctgcgcggagaaagaggcggccaccagcgaactgcagagcatccagcggttggttagcggcttggaagccaagccggacaggtcccgcagcgcgtccccgtagacccgtcccagacacgtcttttcattccagtccagttcaggctgccgtgcactttgtcggatataaaataaaccacgggcccgccatggcgttagcccttccttttgcagttgcgtctgggaaggggccccggactccctcgagagaatgtgctagagacagcccctgtcttcttggcgtggtttatatgtccgggatctggatcagattctgggggctcagaaacgtcggttgcattgagctactgggggtaggagttccaacatttatgtccagagcaacttccagcaaggctggtctgggtctctgcccaccaggcggggaggtgttcaaagacatctccctcagtgcggatttatatatatatttttccttcactgtgtcaagtggaaacaaaaacaaaatctttcaaaaaaaaaatcgggacaagtgaacacattaacatgattctgtttgtgcagattaaaaactttatagggacttgcattatcggttctcaataaattactgagcagctttgtttggggagggaagtccctaccatccttgtttagtctatattaagaaaatctgtgtctttttaatattcttgtgatgttttcagagccgctgtaggtctcttcttgcatgtccacagtaatgtatttgtggtttttattttgaacgcttgcttttagagagaaaacaatatagccccctacccttttcccaatcctttgccctcaaatcagtgacccaagggagggggggatttaaagggaaggagtgggcaaaacacataaaatgaatttattatatctaagctctgtagcaggattcatgtcgttctttgacagttctttctctttcctgtatatgcaataacaaggttttaaaaaaataataaagaagtgagactattagacaaagtatttatgtaattatttgataactcttgtaaataggtggaatatgaatgcttggaaaattaaactttaatttattgacattgtacatagctctgtgtaaatagaattgcaactgtcaggttttgtgttcttgttttcctttagttgggtttatttccaggtcacagaattgctgttaacactagaaaacacacttcctgcaccaacaccaataccctttcaaaagagttgtctgcaacatttttgttttcttttttaatgtccaaaagtgggggaaagtgctatttcctattttcaccaaaattggggaaggagtgccactttccagctccacttcaaattccttaaaatataactgagattgctgtggggagggaggagggcagaggctgcggtttgactttttaatttttcttttgttatttgtatttgctagtctctgatttcctcaaaacgaagtggaatttactactgttgtcagtatcggtgttttgaattggtgcctgcctatagagatatattcacagttcaaaagtcaggtgctgagagatggtttaaagacaaattcatgaaggtatattttgtgttatagttgttgatgagttctttggttttctgtatttttccccctctctttaaaacatcactgaaatttcaataaatttttattgaaatgtc

SEQ ID NO: 189724 - DNA, 4723 bp, Homo sapiens
  Payload ID: 17464
  Gene Symbol: TBX3
  Gene Name: T-box 3
  Uniprot ID: O15119
  ENST ID: ENST00000349155
  CDS Start-End: 965-3136
gaattctagaggcggcggagggtggcgaggagctctcgctttctctcgctccctccctctccgactccgtctctctctctctctctctctctcccctccctctctttccctctgttccattttttccccctctaaatcctccctgccctgcgcgcctggacacagatttaggaagcgaattcgctcacgttttaggacaaggaagagagagaggcacgggagaagagcccagcaagatttggattgaaaccgagacaccctccggaggctcggagcagaggaaggaggaggagggcggcgaacggaagccagtttgcaattcaagttttgatagcgctggtagaagggggtttaaatcagatttttttttttttaaaggagagagactttttccgctctctcgctccctgttaaagccgggtctagcacagctgcagacgccaccagcgagaaagagggagaggaagacagatagggggcgggggaagaagaaaaagaaaggtaaaaagtcttctaggagaacctttcacatttgcaacaaaagacctaggggctggagagagattcctgggacgcagggctggagtgtctatttcgagctcagcggcagggctcgggcgcgagtcgagaccctgctcgctcctctcgcttctgaaaccgacgttcaggagcggctttttaaaaacgcaaggcacaaggacggtcacccgcgcgactatgtttgctgatttttcgccttgccctctttaaaagcggcctcccattctccaaaagacacttcccctcctccctttgaagtgcattagttgtgatttctgcctccttttcttttttctttcttttttgttttgctttttccccccttttgaattatgtgctgctgttaaacaacaacaaaaaaacaacaaaacacagcagctgcggacttgtccccggctggagcccagcgccccgcctggagtggatgagcctctccatgagagatccggtcattcctgggacaagcatggcctaccatccgttcctacctcaccgggcgccggacttcgccatgagcgcggtgctgggtcaccagccgccgttcttccccgcgctgacgctgcctcccaacggcgcggcggcgctctcgctgccgggcgccctggccaagccgatcatggatcaattggtgggggcggccgagaccggcatcccgttctcctccctggggccccaggcgcatctgaggcctttgaagaccatggagcccgaagaagaggtggaggacgaccccaaggtgcacctggaggctaaagaactttgggatcagtttcacaagcggggcaccgagatggtcattaccaagtcgggaaggcgaatgtttcctccatttaaagtgagatgttctgggctggataaaaaagccaaatacattttattgatggacattatagctgctgatgactgtcgttataaatttcacaattctcggtggatggtggctggtaaggccgaccccgaaatgccaaagaggatgtacattcacccggacagccccgctactggggaacagtggatgtccaaagtcgtcactttccacaaactgaaactcaccaacaacatttcagacaaacatggatttactatattgaactccatgcacaaataccagccccggttccacattgtaagagccaatgacatcttgaaactcccttatagtacatttcggacatacttgttccccgaaactgaattcatcgctgtgactgcataccagaatgataagataacccagttaaaaatagacaacaacccttttgcaaaaggtttccgggacactggaaatggccgaagagaaaaaagaaaacagctcaccctgcagtccatgagggtgtttgatgaaagacacaaaaaggagaatgggacctctgatgagtcctccagtgaacaagcagctttcaactgcttcgcccaggcttcttctccagccgcctccactgtagggacatcgaacctcaaagatttatgtcccagcgagggtgagagcgacgccgaggccgagagcaaagaggagcatggccccgaggcctgcgacgcggccaagatctccaccaccacgtcggaggagccctgccgtgacaagggcagccccgcggtcaaggctcaccttttcgctgctgagcggccccgggacagcgggcggctggacaaagcgtcgcccgactcacgccatagccccgccaccatctcgtccagcactcgcggcctgggcgcggaggagcgcaggagcccggttcgcgagggcacagcgccggccaaggtggaagaggcgcgcgcgctcccgggcaaggaggccttcgcgccgctcacggtgcagacggacgcggccgccgcgcacctggcccagggccccctgcctggcctcggcttcgccccgggcctggcgggccaacagttcttcaacgggcacccgctcttcctgcaccccagccagtttgccatggggggcgccttctccagcatggcggccgctggcatgggtcccctcctggccacggtttctggggcctccaccggtgtctcgggcctggattccacggccatggcctctgccgctgcggcgcagggactgtccggggcgtccgcggccaccctgcccttccacctccagcagcacgtcctggcctctcagggcctggccatgtcccctttcggaagcctgttcccttacccctacacgtacatggccgcagcggcggccgcctcctctgcggcagcctccagctcggtgcaccgccaccccttcctcaatctgaacaccatgcgcccgcggctgcgctacagcccctactccatcccggtgccggtcccggacggcagcagtctgctcaccaccgccctgccctccatggcggcggccgcggggcccctggacggcaaagtcgccgccctggccgccagcccggcctcggtggcagtggactcgggctctgaactcaacagccgctcctccacgctctcctccagctccatgtccttgtcgcccaaactctgcgcggagaaagaggcggccaccagcgaactgcagagcatccagcggttggttagcggcttggaagccaagccggacaggtcccgcagcgcgtccccgtagacccgtcccagacacgtcttttcattccagtccagttcaggctgccgtgcactttgtcggatataaaataaaccacgggcccgccatggcgttagcccttccttttgcagttgcgtctgggaaggggccccggactccctcgagagaatgtgctagagacagcccctgtcttcttggcgtggtttatatgtccgggatctggatcagattctgggggctcagaaacgtcggttgcattgagctactgggggtaggagttccaacatttatgtccagagcaacttccagcaaggctggtctgggtctctgcccaccaggcggggaggtgttcaaagacatctccctcagtgcggatttatatatatatttttccttcactgtgtcaagtggaaacaaaaacaaaatctttcaaaaaaaaaatcgggacaagtgaacacattaacatgattctgtttgtgcagattaaaaactttatagggacttgcattatcggttctcaataaattactgagcagctttgtttggggagggaagtccctaccatccttgtttagtctatattaagaaaatctgtgtctttttaatattcttgtgatgttttcagagccgctgtaggtctcttcttgcatgtccacagtaatgtatttgtggtttttattttgaacgcttgcttttagagagaaaacaatatagccccctacccttttcccaatcctttgccctcaaatcagtgacccaagggagggggggatttaaagggaaggagtgggcaaaacacataaaatgaatttattatatctaagctctgtagcaggattcatgtcgttctttgacagttctttctctttcctgtatatgcaataacaaggttttaaaaaaataataaagaagtgagactattagacaaagtatttatgtaattatttgataactcttgtaaataggtggaatatgaatgcttggaaaattaaactttaatttattgacattgtacatagctctgtgtaaatagaattgcaactgtcaggttttgtgttcttgttttcctttagttgggtttatttccaggtcacagaattgctgttaacactagaaaacacacttcctgcaccaacaccaataccctttcaaaagagttgtctgcaacatttttgttttcttttttaatgtccaaaagtgggggaaagtgctatttcctattttcaccaaaattggggaaggagtgccactttccagctccacttcaaattccttaaaatataactgagattgctgtggggagggaggagggcagaggctgcggtttgactttttaatttttcttttgttatttgtatttgctagtctctgatttcctcaaaacgaagtggaatttactactgttgtcagtatcggtgttttgaattggtgcctgcctatagagatatattcacagttcaaaagtcaggtgctgagagatggtttaaagacaaattcatgaaggtatattttgtgttatagttgttgatgagttctttggttttctgtatttttccccctctctttaaaacatcactgaaatttcaataaatttttattgaaatgtct

SEQ ID NO: 189725 - DNA, 2430 bp, Homo sapiens
  Payload ID: 17464
  Gene Symbol: TBX3
  Gene Name: T-box 3
  ENST ID: ENST00000613550
  CDS Start-End: 262-2430
tcacccgcgcgactatgtttgctgatttttcgccttgccctctttaaaagcggcctcccattctccaaaagacacttcccctcctccctttgaagtgcattagttgtgatttctgcctccttttcttttttctttcttttttgttttgctttttccccccttttgaattatgtgctgctgttaaacaacaacaaaaaaacaacaaaacacagcagctgcggacttgtccccggctggagcccagcgccccgcctggagtggatgagcctctccatgagagatccggtcattcctgggacaagcatggcctaccatccgttcctacctcaccgggcgccggacttcgccatgagcgcggtgctgggtcaccagccgccgttcttccccgcgctgacgctgcctcccaacggcgcggcggcgctctcgctgccgggcgccctggccaagccgatcatggatcaattggtgggggcggccgagaccggcatcccgttctcctccctggggccccaggcgcatctgaggcctttgaagaccatggagcccgaagaagaggtggaggacgaccccaaggtgcacctggaggctaaagaactttgggatcagtttcacaagcggggcaccgagatggtcattaccaagtcgggaaggcgaatgtttcctccatttaaagtgagatgttctgggctggataaaaaagccaaatacattttattgatggacattatagctgctgatgactgtcgttataaatttcacaattctcggtggatggtggctggtaaggccgaccccgaaatgccaaagaggatgtacattcacccggacagccccgctactggggaacagtggatgtccaaagtcgtcactttccacaaactgaaactcaccaacaacatttcagacaaacatggatttactatattgaactccatgcacaaataccagccccggttccacattgtaagagccaatgacatcttgaaactcccttatagtacatttcggacatacttgttccccgaaactgaattcatcgctgtgactgcataccagaatgataagataacccagttaaaaatagacaacaacccttttgcaaaaggtttccgggacactggaaatggccgaagagaaaaaagaaaacagctcaccctgcagtccatgagggtgtttgatgaaagacacaaaaaggagaatgggacctctgatgagtcctccagtgaacaagcagctttcaactgcttcgcccaggcttcttctccagccgcctccactgtagggacatcgaacctcaaagatttatgtcccagcgagggtgagagcgacgccgaggccgagagcaaagaggagcatggccccgaggcctgcgacgcggccaagatctccaccaccacgtcggaggagccctgccgtgacaagggcagccccgcggtcaaggctcaccttttcgctgctgagcggccccgggacagcgggcggctggacaaagcgtcgcccgactcacgccatagccccgccaccatctcgtccagcactcgcggcctgggcgcggaggagcgcaggagcccggttcgcgagggcacagcgccggccaaggtggaagaggcgcgcgcgctcccgggcaaggaggccttcgcgccgctcacggtgcagacggacgcggccgccgcgcacctggcccagggccccctgcctggcctcggcttcgccccgggcctggcgggccaacagttcttcaacgggcacccgctcttcctgcaccccagccagtttgccatggggggcgccttctccagcatggcggccgctggcatgggtcccctcctggccacggtttctggggcctccaccggtgtctcgggcctggattccacggccatggcctctgccgctgcggcgcagggactgtccggggcgtccgcggccaccctgcccttccacctccagcagcacgtcctggcctctcagggcctggccatgtcccctttcggaagcctgttcccttacccctacacgtacatggccgcagcggcggccgcctccctgcggcagcctccagctcggtgcaccgccccccttctcaatctgaacaccatgcgcccgcggctgcgctacagcccctactccatcccggtgccggtcccggacggcagcagtctgctcaccaccgccctgccctccatggcggcggccgcggggcccctggacggcaaagtcgccgccctggccgccagcccggcctcggtggcagtggactcgggctctgaactcaacagccgctcctccacgctctcctccagctccatgtccttgtcgcccaaactctgcgcggagaaagaggcggccaccagcgaactgcagagcatccagcggttggttagcggcttggaagccaagccggacaggtcccgcagcgcgtccccgtag

SEQ ID NO: 189726 - DNA, 2470 bp, Homo sapiens
  Payload ID: 17465
  Gene Symbol: TBX4
  Gene Name: T-box 4
  Uniprot ID: P57082
  ENST ID: ENST00000240335
  CDS Start-End: 46-1683
tgtggacctgggcgagtgactcgttgtgtgctgtgcccgcaggagatgctgcaggataagggcctgtccgagagcgaggaggccttccgggccccgggcccagcgctcggagaggccagcgcagccaacgcccccgagcccgcgctggcagcgccgggcctcagcggagccgcgctaggcagccccccgggacccggggccgacgtcgtcgccgccgccgccgcggagcagaccatcgagaacatcaaggtggggctgcatgagaaggagctctggaagaagttccacgaggcgggcaccgagatgatcatcactaaggctggcaggaggatgttccccagctacaaggtaaaagtcacaggcatgaaccccaagaccaagtatatcctgctgattgacattgtccctgccgatgaccatcgctacaagttctgtgacaacaaatggatggtggcagggaaggctgagccagccatgccaggaaggctgtatgtccacccggattctcctgccacaggagcccactggatgcggcagctggtctccttccagaagctgaagctgacaaacaaccacctggacccctttggccatatcatcctcaactctatgcacaagtaccagccgcggctccacatcgttaaggctgatgagaacaatgctttcggctccaaaaacactgctttctgcacccacgtgttcccagagacctccttcatctctgtgacctcctaccagaatcacaagatcacccagctgaaaattgagaacaacccttttgccaagggattccggggcagtgatgacagtgacctgcgtgtggcccgactgcagagcaaagaataccccgtgatttccaaaagcatcatgaggcagaggctcatctccccccagctctcagccacaccggacgtgggccccctgctcggcacccaccaggcactccagcactaccagcacgagaacggggcacactcacagctcgcggagccgcaggacctgcccctcagcacctttcccacccagagggactcaagcctcttctatcactgcctgaaaagacgagacggtacccgccacctggacttaccttgcaagcgatcctatctggaagccccctcttcggtgggggaggatcactatttccgttccccccctccctacgaccagcaaatgctgagcccctcctactgcagtgaggtgacccccagagaagcatgtatgtactcaggttcagggcccgagattgccggggtgtctggggtggacgacctgcccccacctccgctgagctgtaacatgtggacttcagtgtcgccgtacaccagctatagcgtgcagacgatggagactgtgccgtaccagcccttccccacgcacttcaccgccaccaccatgatgccgcggctgcccaccctctccgctcagagctcccagccaccaggaaatgcccactttagtgtctacaatcagctctcccagtctcaggtccgagagcgggggcccagcgcctcattcccaagagagcgcggcctcccccaagggtgtgagaggaagccaccctcgccacatctaaatgctgccaatgagtttctctactctcaaaccttctccttgtcccgagaatcttccttacagtaccattcaggaatggggactgtggagaactggactgacggatgactctcacgtctcctccatagccccgggaccgtgttgctccagtattaacctctgtgggtggcctgcactctaccaagaaacacaggaaggtattccagtgtgtgtgtgtgtgtgtgtgtgtgtgtgtgtgtgtgtgtatacacgagcatgtatgtatttggagagcatccatcttctgacatacaactgaggtcatgacaaggaaaaaaaacaccacatttatctaagaagtgattttggctgcaggacctgggtctattgttatctgacatctcttgacatgcccgtgggtgggatgggagtggagggttcatatgagttattgagagggttttataatggttgatttactcaggggccaggtggggagttctctcccatggggaaagattctcactgctggggtgggaagattctcgctgctggggtgtgaggactctgtgcacaccttagagttcctggccttctctttgcaaggggagctgagaatctggttttggtagcaggaggcccactcctttgacttctggagagtctgtgagactgcctgagaggtgggctcagctaagccacaatgtgtactttgatagtacagctggctgctcagtgagtggcctagacattgatgactggagctctgaggtctgagggatgacgttcggaaagggtcatgggctaaatgtcacctgaggggtatttttaaagggtttttttttcccttcaagaggagggaaaatgcaaccagtagcatctctgtcatcattcagattttgtaataaagtacaga

SEQ ID NO: 189727 - DNA, 3398 bp, Homo sapiens
  Payload ID: 17465
  Gene Symbol: TBX4
  Gene Name: T-box 4
  Uniprot ID: P57082
  ENST ID: ENST00000393853
  CDS Start-End: 164-1804
ctccagagccgggatgtgtccagccccgagggcacggcaggcagctggaccctgacccagcggcgcggagtcggagccccggccgtcccgcgctcctcggacccgaacctgcaggggacctcgggccgctggcgcctccgcatgcggcaccgcaattagggagatgctgcaggataagggcctgtccgagagcgaggaggccttccgggccccgggcccagcgctcggagaggccagcgcagccaacgcccccgagcccgcgctggcagcgccgggcctcagcggagccgcgctaggcagccccccgggacccggggccgacgtcgtcgccgccgccgccgcggagcagaccatcgagaacatcaaggtggggctgcatgagaaggagctctggaagaagttccacgaggcgggcaccgagatgatcatcactaaggctggcaggaggatgttccccagctacaaggtaaaagtcacaggcatgaaccccaagaccaagtatatcctgctgattgacattgtccctgccgatgaccatcgctacaagttctgtgacaacaaatggatggtggcagggaaggctgagccagccatgccaggaaggctgtatgtccacccggattctcctgccacaggagcccactggatgcggcagctggtctccttccagaagctgaagctgacaaacaaccacctggacccctttggccatatcatcctcaactctatgcacaagtaccagccgcggctccacatcgttaaggctgatgagaacaatgctttcggctccaaaaacactgctttctgcacccacgtgttcccagagacctccttcatctctgtgacctcctaccagaatcacaagatcacccagctgaaaattgagaacaacccttttgccaagggattccggggcagtgatgacagtgacctgcgtgtggcccgactgcagagcaaagaataccccgtgatttccaaaagcatcatgaggcagaggctcatctccccccagctctcagccacaccggacgtgggccccctgctcggcacccaccaggcactccagcactaccagcacgagaacggggcacactcacagctcgcggagccgcaggacctgcccctcagcacctttcccacccagagggactcaagcctcttctatcactgcctgaaaagacgagcagacggtacccgccacctggacttaccttgcaagcgatcctatctggaagccccctcttcggtgggggaggatcactatttccgttccccccctccctacgaccagcaaatgctgagcccctcctactgcagtgaggtgacccccagagaagcatgtatgtactcaggttcagggcccgagattgccggggtgtctggggtggacgacctgcccccacctccgctgagctgtaacatgtggacttcagtgtcgccgtacaccagctatagcgtgcagacgatggagactgtgccgtaccagcccttccccacgcacttcaccgccaccaccatgatgccgcggctgcccaccctctccgctcagagctcccagccaccaggaaatgcccactttagtgtctacaatcagctctcccagtctcaggtccgagagcgggggcccagcgcctcattcccaagagagcgcggcctcccccaagggtgtgagaggaagccaccctcgccacatctaaatgctgccaatgagtttctctactctcaaaccttctccttgtcccgagaatcttccttacagtaccattcaggaatggggactgtggagaactggactgacggatgactctcacgtctcctccatagccccgggaccgtgttgctccagtattaacctctgtgggtggcctgcactctaccaagaaacacaggaaggtattccagtgtgtgtgtgtgtgtgtgtgtgtgtgtgtgtgtgtgtgtatacacgagcatgtatgtatttggagagcatccatcttctgacatacaactgaggtcatgacaaggaaaaaaaacaccacatttatctaagaagtgattttggctgcaggacctgggtctattgttatctgacatctcttgacatgcccgtgggtgggatgggagtggagggttcatatgagttattgagagggttttataatggttgatttactcaggggccaggtggggagttctctcccatggggaaagattctcactgctggggtgggaagattctcgctgctggggtgtgaggactctgtgcacaccttagagttcctggccttctctttgcaaggggagctgagaatctggttttggtagcaggaggcccactcctttgacttctggagagtctgtgagactgcctgagaggtgggctcagctaagccacaatgtgtactttgatagtacagctggctgctcagtgagtggcctagacattgatgactggagctctgaggtctgagggatgacgttcggaaagggtcatgggctaaatgtcacctgaggggtatttttaaagggtttttttttcccttcaagaggagggaaaatgcaaccagtagcatctctgtcatcattcagattttgtaataaagtacagagcccttccccctaggtccccaacatacagtctctcactctggtgtgtggagagtcagcctcccaggcaccataccatctgcatcctatgatgatgggcaattatgaaacacgcctcagctggcatcatccccaggaggccacactggagctgatgtctggcatctccagggcctgttctgctctcagaaaatctacgcttctggagcgagaaaggccaacagaaataaagatagttgaaaaaaatttgtttcttccagtaaattcagccggtgagctcagaggagcaaagagaattctccagtgtggcgctcacaaagtcctcagccctgcgttttagcattgaataccaccaggccatcagtgtggctggggtgaactctccatcaaacttgggaaatcactaaactctttgcatgctgaatagctatttatatattatataaataaataaatatatatattatatatcgctctctctcacaaatgcaggccacatgtcaaattcagctttgctttctacaaatgaatgaacttaataaaaataaacgttggagggggtatttggaaagacatctatttaaatttttattacatgtttgatattaaaaactaagaatggtttagataaaacatataaataaatatatatatatatatatatatatataaacacacacacactacagataaggcttttttagaaaacacattagctaacaggtgatatggaacttcaagtgttttgttatatagcatggatgttttattttgcatatcggaacataaagccattttacaactgtgaa

SEQ ID NO: 189728 - DNA, 584 bp, Homo sapiens
  Payload ID: 17465
  Gene Symbol: TBX4
  Gene Name: T-box 4
  ENST ID: ENST00000589003
  CDS Start-End: 180-584
agatcaagggcccgctccagagccgggatgtgtccagccccgagggcacggcaggcagccccccgggacccggggccgacgtcgtcgccgccgccgccgcggagcagaccatcgagaacatcaaggtggggctgcatgagaaggagctctggaagaagttccacgaggcgggcaccgagatgatcatcactaaggctggcaggaggatgttccccagctacaaggtaaaagtcacaggcatgaaccccaagaccaagtatatcctgctgattgacattgtccctgccgatgaccatcgctacaagttctgtgacaacaaatggatggtggcagggaaggctgagccagccatgccaggaaggctgtatgtccacccggattctcctgccacaggagcccactggatgcggcagctggtctccttccagaagctgaagctgacaaacaaccacctggacccctttggccatatcatcctcaactctatgcacaagtaccagccgcggctccacatcgttaaggctgatgagaacaatgctttcggctccaaaaacactgctttctgcacccacgtgttcccagag

SEQ ID NO: 189729 - DNA, 3825 bp, Homo sapiens
  Payload ID: 17466
  Gene Symbol: TBX5
  Gene Name: T-box 5
  Uniprot ID: Q99593
  ENST ID: ENST00000310346
  CDS Start-End: 668-2224
catgccttatgcaagagacctcagtcccccggaacaactcgatttccttccaatagaggtctgaggtggactcccacctcccttcgtgaagagttccctcctctcccccttcctaagaaagtcgatcttggctctatttgtgtcttatgttcatcaccctcattcctccggagaaagccgggttggtttatgtctttatttattcccggggccaagacgtccggaacctgtggctgcgcagacccggcactgataggcgaagacggagagaaatttacctcccgccgctgccccccagccaaacgtgacagcgcgcgggccggttgcgtgactcgtgacgtctccaagtcctataggtgcagcggctggtgagatagtcgctatcgcctggttgcctctttattttactggggtatgcctggtaataaacagtaatatttaatttgtcggagaccacaaaccaaccttgagctgggaggtacgtgctcttcttgacagacgttggaagaagacctggcctaaagaggtctcttttggtggtccttttcaaagtcttcacctgagccctgctctccagcgaggcgcactcctggcttttgcgctccaaagaagaggtgggatagttggagagcagaaccttgcgcgggcacagggccctgggcgcaccatggccgacgcagacgagggctttggcctggcgcacacgcctctggagcctgacgcaaaagacctgccctgcgattcgaaacccgagagcgcgctcggggcccccagcaagtccccgtcgtccccgcaggccgccttcacccagcagggcatggagggaatcaaagtgtttctccatgaaagagaactgtggctaaaattccacgaagtgggcacggaaatgatcataaccaaggctggaaggcggatgtttcccagttacaaagtgaaggtgacgggccttaatcccaaaacgaagtacattcttctcatggacattgtacctgccgacgatcacagatacaaattcgcagataataaatggtctgtgacgggcaaagctgagcccgccatgcctggccgcctgtacgtgcacccagactcccccgccaccggggcgcattggatgaggcagctcgtctccttccagaaactcaagctcaccaacaaccacctggacccatttgggcatattattctaaattccatgcacaaataccagcctagattacacatcgtgaaagcggatgaaaataatggatttggctcaaaaaatacagcgttctgcactcacgtctttcctgagactgcgtttatagcagtgacttcctaccagaaccacaagatcacgcaattaaagattgagaataatccctttgccaaaggatttcggggcagtgatgacatggagctgcacagaatgtcaagaatgcaaagtaaagaatatcccgtggtccccaggagcaccgtgaggcaaaaagtggcctccaaccacagtcctttcagcagcgagtctcgagctctctccacctcatccaatttggggtcccaataccagtgtgagaatggtgtttccggcccctcccaggacctcctgcctccacccaacccatacccactgccccaggagcatagccaaatttaccattgtaccaagaggaaagaggaagaatgttccaccacagaccatccctataagaagccctacatggagacatcacccagtgaagaagattccttctaccgctctagctatccacagcagcagggcctgggtgcctcctacaggacagagtcggcacagcggcaagcttgcatgtatgccagctctgcgccccccagcgagcctgtgcccagcctagaggacatcagctgcaacacgtggccaagcatgccttcctacagcagctgcaccgtcaccaccgtgcagcccatggacaggctaccctaccagcacttctccgctcacttcacctcggggcccctggtccctcggctggctggcatggccaaccatggctccccacagctgggagagggaatgttccagcaccagacctccgtggcccaccagcctgtggtcaggcagtgtgggcctcagactggcctgcagtcccctggcacccttcagccccctgagttcctctactctcatggcgtgccaaggactctatcccctcatcagtaccactctgtgcacggagttggcatggtgccagagtggagcgacaatagctaaagtgaggcctgcttcacaacagacatttcctagagaaagagagagagagaggagaaagagagagaaggagagagacagtagccaagagaaccccacggacaagatttttcatttcacccaatgttcacatctgcactcaaggtcgctggatgctgatctaatcagtagcttgaaaccacaattttaaaaatgtgactttcttgttttgtctcaaaacttaaaaaaacaaacacaaaaagatgagtcccaccccccactaccaccacacccatcaaccagccacattcacgctactccccagatctcttcccccattccttcttttgggctctagaaagtcttgcctcattgagtgtttttccctagtgcgtagttggagtctgtccctgtcttggtgttaatgttgacattgttatataataaatgataatatatttttttctttcaattttcttaatgggacccagtcccttatttggggggaggtctgaggcaagtatatttcaaaatatgtacttgcgggattcccttcaagtaaaccatccctgaaacctaaattcacgtttccccttgactaagaaaagcacctacctctgccatgtgatgtttctgaaaagcctctgtatgtccccatttgctttggttttgtcctgccttctccaatatcacgtgctcagttttgcctctacttacccatggagtcaggataacactgacgctccctggcatcctatcttattcagccctaccatcttgccagctctgtctttccagctgtctgtcgctaaaacgtggcctatagcttcccttccggaaagcttgctttgaaaaacttaaaaagcccccgtttacatgtaggcaggactgtgataacagtgcaagctctgtgttgacaagagttgtggacaaaaagccaaaataaatattcttcctgattaaaaaaattttttttgaaaaaaacaaggccagccccaaccttccaaacctccatcaccaacaacccaaactggatgtcaagcaaaatgcacaattcctacagaagaggcaagacacagtcaccaatgatatctcgccaaagaaaccacgcccacaccaatgccaacacaaaactgtgtttactgaaagccgaaaacagtattaaaaaaagtgtgtaagtaaagtgttatggtagggttcttcagatgtaatattttactggtactatttatttataaataggaattctaattaagtaataacatgaaatgaaacccagcataggagctggccaagagcttttaattttattgatactcaaaaccaagtttgtgtttttttgtttttttttgtttttttcctctttcgaatgtgctttgctttttttgattaaaaagaattttttttttccttttttataaacagaccctaataaagagaacagggtaagatgtgaggctgagtgtgtttaagtacgtgagagagtgtgagtgtgtttgtaagtgagtgtccctatgcgattatgtctctttacgttgctaaggggggagggtgaggattaagtactcgtgccttatatttgtgtgccaattaatgcctaataaataccatgtgcttaaacaagt

SEQ ID NO: 189730 - DNA, 3585 bp, Homo sapiens
  Payload ID: 17466
  Gene Symbol: TBX5
  Gene Name: T-box 5
  Uniprot ID: Q99593
  ENST ID: ENST00000349716
  CDS Start-End: 578-1984
gaggtctgaggtggactcccacctcccttcgtgaagagttccctcctctcccccttcctaagaaagtcgatcttggctctatttgtgtcttatgttcatcaccctcattcctccggagaaagccgggttggtttatgtctttatttattcccggggccaagacgtccggaacctgtggctgcgcagacccggcactgataggcgaagacggagagaaatttacctcccgccgctgccccccagccaaacgtgacagcgcgcgggccggttgcgtgactcgtgacgtctccaagtcctataggtgcagcggctggtgagatagtcgctatcgcctggttgcctctttattttactggggtatgcctggtaataaacagtaatatttaatttgtcggagaccacaaaccaaccttgagctgggaggtacgtgctcttcttgacagacgttggaagaagacctggcctaaagaggtctcttttggtggtccttttcaaagtcttcacctgagccctgctctccagcgaggcgcactcctggcttttgcgctccaaagaagaggtgggatagttggagggcatggagggaatcaaagtgtttctccatgaaagagaactgtggctaaaattccacgaagtgggcacggaaatgatcataaccaaggctggaaggcggatgtttcccagttacaaagtgaaggtgacgggccttaatcccaaaacgaagtacattcttctcatggacattgtacctgccgacgatcacagatacaaattcgcagataataaatggtctgtgacgggcaaagctgagcccgccatgcctggccgcctgtacgtgcacccagactcccccgccaccggggcgcattggatgaggcagctcgtctccttccagaaactcaagctcaccaacaaccacctggacccatttgggcatattattctaaattccatgcacaaataccagcctagattacacatcgtgaaagcggatgaaaataatggatttggctcaaaaaatacagcgttctgcactcacgtctttcctgagactgcgtttatagcagtgacttcctaccagaaccacaagatcacgcaattaaagattgagaataatccctttgccaaaggatttcggggcagtgatgacatggagctgcacagaatgtcaagaatgcaaagtaaagaatatcccgtggtccccaggagcaccgtgaggcaaaaagtggcctccaaccacagtcctttcagcagcgagtctcgagctctctccacctcatccaatttggggtcccaataccagtgtgagaatggtgtttccggcccctcccaggacctcctgcctccacccaacccatacccactgccccaggagcatagccaaatttaccattgtaccaagaggaaagaggaagaatgttccaccacagaccatccctataagaagccctacatggagacatcacccagtgaagaagattccttctaccgctctagctatccacagcagcagggcctgggtgcctcctacaggacagagtcggcacagcggcaagcttgcatgtatgccagctctgcgccccccagcgagcctgtgcccagcctagaggacatcagctgcaacacgtggccaagcatgccttcctacagcagctgcaccgtcaccaccgtgcagcccatggacaggctaccctaccagcacttctccgctcacttcacctcggggcccctggtccctcggctggctggcatggccaaccatggctccccacagctgggagagggaatgttccagcaccagacctccgtggcccaccagcctgtggtcaggcagtgtgggcctcagactggcctgcagtcccctggcacccttcagccccctgagttcctctactctcatggcgtgccaaggactctatcccctcatcagtaccactctgtgcacggagttggcatggtgccagagtggagcgacaatagctaaagtgaggcctgcttcacaacagacatttcctagagaaagagagagagagaggagaaagagagagaaggagagagacagtagccaagagaaccccacggacaagatttttcatttcacccaatgttcacatctgcactcaaggtcgctggatgctgatctaatcagtagcttgaaaccacaattttaaaaatgtgactttcttgttttgtctcaaaacttaaaaaaacaaacacaaaaagatgagtcccaccccccactaccaccacacccatcaaccagccacattcacgctactccccagatctcttcccccattccttcttttgggctctagaaagtcttgcctcattgagtgtttttccctagtgcgtagttggagtctgtccctgtcttggtgttaatgttgacattgttatataataaatgataatatatttttttctttcaattttcttaatgggacccagtcccttatttggggggaggtctgaggcaagtatatttcaaaatatgtacttgcgggattcccttcaagtaaaccatccctgaaacctaaattcacgtttccccttgactaagaaaagcacctacctctgccatgtgatgtttctgaaaagcctctgtatgtccccatttgctttggttttgtcctgccttctccaatatcacgtgctcagttttgcctctacttacccatggagtcaggataacactgacgctccctggcatcctatcttattcagccctaccatcttgccagctctgtctttccagctgtctgtcgctaaaacgtggcctatagcttcccttccggaaagcttgctttgaaaaacttaaaaagcccccgtttacatgtaggcaggactgtgataacagtgcaagctctgtgttgacaagagttgtggacaaaaagccaaaataaatattcttcctgattaaaaaaattttttttgaaaaaaacaaggccagccccaaccttccaaacctccatcaccaacaacccaaactggatgtcaagcaaaatgcacaattcctacagaagaggcaagacacagtcaccaatgatatctcgccaaagaaaccacgcccacaccaatgccaacacaaaactgtgtttactgaaagccgaaaacagtattaaaaaaagtgtgtaagtaaagtgttatggtagggttcttcagatgtaatattttactggtactatttatttataaataggaattctaattaagtaataacatgaaatgaaacccagcataggagctggccaagagcttttaattttattgatactcaaaaccaagtttgtgtttttttgtttttttttgtttttttcctctttcgaatgtgctttgctttttttgattaaaaagaattttttttttccttttttataaacagaccctaataaagagaacagggtaagatgtgaggctgagtgtgtttaagtacgtgagagagtgtgagtgtgtttgtaagtgagtgtccctatgcgattatgtctctttacgttgctaaggggggagggtgaggattaagtactcgtgccttatatttgtgtgccaattaatgcctaataaataccatgtgcttaaacaagt

SEQ ID NO: 189731 - DNA, 2203 bp, Homo sapiens
  Payload ID: 17466
  Gene Symbol: TBX5
  Gene Name: T-box 5
  Uniprot ID: Q99593
  ENST ID: ENST00000405440
  CDS Start-End: 496-2052
ttcagagagagagagagagggagagagagtgagagagactgactcttacctcgaatccgggaactttaatcctgaaagctgcgctcagaaaggacttcgaccattcactgggcttccaactttccctccctgggggtgtaaaggaggagcggggcactgagattatatggttgccggtgctcttggaggctattttgtgttctttggcgcttgccaactgggaagtatttagggagagcaagcgcacagcagaggaggtgtgtgttggaggtgggcagtcgccgcggaggctccagcggtaggtgcgccctagtaggcagcagtagccgctattctgggtaagcagtaaaccccgcataaaccccggagccaccatgcctgctcccccgcctcaccgccggcttccctgctaggagcagcagaggatgtggtgaatgcaccggcttcaccgaacgagagcagaaccttgcgcgggcacagggccctgggcgcaccatggccgacgcagacgagggctttggcctggcgcacacgcctctggagcctgacgcaaaagacctgccctgcgattcgaaacccgagagcgcgctcggggcccccagcaagtccccgtcgtccccgcaggccgccttcacccagcagggcatggagggaatcaaagtgtttctccatgaaagagaactgtggctaaaattccacgaagtgggcacggaaatgatcataaccaaggctggaaggcggatgtttcccagttacaaagtgaaggtgacgggccttaatcccaaaacgaagtacattcttctcatggacattgtacctgccgacgatcacagatacaaattcgcagataataaatggtctgtgacgggcaaagctgagcccgccatgcctggccgcctgtacgtgcacccagactcccccgccaccggggcgcattggatgaggcagctcgtctccttccagaaactcaagctcaccaacaaccacctggacccatttgggcatattattctaaattccatgcacaaataccagcctagattacacatcgtgaaagcggatgaaaataatggatttggctcaaaaaatacagcgttctgcactcacgtctttcctgagactgcgtttatagcagtgacttcctaccagaaccacaagatcacgcaattaaagattgagaataatccctttgccaaaggatttcggggcagtgatgacatggagctgcacagaatgtcaagaatgcaaagtaaagaatatcccgtggtccccaggagcaccgtgaggcaaaaagtggcctccaaccacagtcctttcagcagcgagtctcgagctctctccacctcatccaatttggggtcccaataccagtgtgagaatggtgtttccggcccctcccaggacctcctgcctccacccaacccatacccactgccccaggagcatagccaaatttaccattgtaccaagaggaaagaggaagaatgttccaccacagaccatccctataagaagccctacatggagacatcacccagtgaagaagattccttctaccgctctagctatccacagcagcagggcctgggtgcctcctacaggacagagtcggcacagcggcaagcttgcatgtatgccagctctgcgccccccagcgagcctgtgcccagcctagaggacatcagctgcaacacgtggccaagcatgccttcctacagcagctgcaccgtcaccaccgtgcagcccatggacaggctaccctaccagcacttctccgctcacttcacctcggggcccctggtccctcggctggctggcatggccaaccatggctccccacagctgggagagggaatgttccagcaccagacctccgtggcccaccagcctgtggtcaggcagtgtgggcctcagactggcctgcagtcccctggcacccttcagccccctgagttcctctactctcatggcgtgccaaggactctatcccctcatcagtaccactctgtgcacggagttggcatggtgccagagtggagcgacaatagctaaagtgaggcctgcttcacaacagacatttcctagagaaagagagagagagaggagaaagagagagaaggagagagacagtagccaagagaaccccacggacaagatttttcatttcacccaatgttcacatctgcactcaaggtcgctggat

SEQ ID NO: 189732 - DNA, 1050 bp, Homo sapiens
  Payload ID: 17466
  Gene Symbol: TBX5
  Gene Name: T-box 5
  Uniprot ID: Q99593
  ENST ID: ENST00000526441
  CDS Start-End: 1-1050
atggccgacgcagacgagggctttggcctggcgcacacgcctctggagcctgacgcaaaagacctgccctgcgattcgaaacccgagagcgcgctcggggcccccagcaagtccccgtcgtccccgcaggccgccttcacccagcagggcatggagggaatcaaagtgtttctccatgaaagagaactgtggctaaaattccacgaagtgggcacggaaatgatcataaccaaggctggaaggcggatgtttcccagttacaaagtgaaggtgacgggccttaatcccaaaacgaagtacattcttctcatggacattgtacctgccgacgatcacagatacaaattcgcagataataaatggtctgtgacgggcaaagctgagcccgccatgcctggccgcctgtacgtgcacccagactcccccgccaccggggcgcattggatgaggcagctcgtctccttccagaaactcaagctcaccaacaaccacctggacccatttgggcatattattctaaattccatgcacaaataccagcctagattacacatcgtgaaagcggatgaaaataatggatttggctcaaaaaatacagcgttctgcactcacgtctttcctgagactgcgtttatagcagtgacttcctaccagaaccacaagatcacgcaattaaagattgagaataatccctttgccaaaggatttcggggcagtgatgacatggagctgcacagaatgtcaagaatgcaaagtaaagaatatcccgtggtccccaggagcaccgtgaggcaaaaagtggcctccaaccacagtcctttcagcagcgagtctcgagctctctccacctcatccaatttggggtcccaataccagtgtgagaatggtgtttccggcccctcccaggacctcctgcctccacccaacccatacccactgccccaggagcatagccaaatttaccattgtaccaagaggaaaggtgagtgtgatcacccctggtcaatttgctttctttcttaccttttcctttccttgggttgggggtga

SEQ ID NO: 189733 - DNA, 1796 bp, Homo sapiens
  Payload ID: 17467
  Gene Symbol: TBX6
  Gene Name: T-box 6
  Uniprot ID: O95947
  ENST ID: ENST00000279386
  CDS Start-End: 57-1367
tctcgcagcaccgggggccctaagcagcgagacctgaggccagacggaactacaacatgtaccatccacgagaattgtacccgtccctgggggccggctaccgcctggggcccgcccaacctggggccgactccagcttcccacccgccctagcggagggctaccgctaccccgaactggacacccctaaactggattgcttcctctccgggatggaggctgctccccgcaccctggccgcgcacccacctctgccccttctgccccctgccatgggcactgagccggccccatcagctccagaggccctccattccctcccgggggtcagcctgagcctggagaaccgggagctatggaaggagttcagctctgtgggaacagaaatgatcatcaccaaagctgggaggcgcatgttccctgcctgccgagtgtcagtcactggcctggaccccgaggcccgctacttgtttcttctggatgtgattccggtggatggggctcgctaccgctggcagggccggcgctgggagcccagcggcaaggcagagccccgcctgcctgaccgtgtctacattcaccccgactctcctgccactggtgcacattggatgcggcagcctgtgtctttccatcgtgtcaagctcaccaacagcacgctggacccccacggccacctgatcctgcactccatgcacaagtaccaaccccgcatacacctagttcgggcagcccagctctgcagccagcactgggggggcatggcctccttccgcttccccgagaccacattcatctccgtgacagcctaccagaacccacagatcacacaactgaagattgcagccaatccctttgccaaaggcttccgggagaacggcagaaactgtaagagggagcgagacgcccgtgtgaagaggaaactgcggggcccagagccagcagccacagaggcctatgggagcggagacacaccaggtggtccctgcgactccaccctgggtggagacattcgtgaatcagatccagaacaggccccagcccccggggaagccaccgctgccccggcacctctgtgtggtggccccagtgctgaggcctacctcctgcaccctgcggctttccatggggcccccagtcaccttcccaccaggagccccagcttcccggaggctccagactccgggcgctcagccccctactcggctgcatttctggagctgccgcacgggtcagggggctccgggtacccagcggctccaccggcggtaccctttgccccgcactttctccaagggggccccttccctctaccatacaccgcgcctgggggctatctggatgtgggctccaaacccatgtactgaaccactgctgggcccctctgcctccatcacaaacctcccgctcccttcccccagccctggagccccctcacctccaccggccccatcccccacaccaaatggccgccttgggcctgcccacccaccccctcaacttcacaccttgatttcactcccacccccctctggcttcaaagcctaaccaaggctgctgggagtccagctggggccggcttccccttcccggctctcacctccgtgtgaatggaaggggctctgcctggccaaatggggccacagaccagcatccccacttaccaggcctccccatgggctctggaggggctcaatccccacccccccacacacactggtgcaggccacaccagtctgttgttctgggaccagagtatttttgttaataaaactcaaaagccatccatgctcagg

SEQ ID NO: 189734 - DNA, 1803 bp, Homo sapiens
  Payload ID: 17467
  Gene Symbol: TBX6
  Gene Name: T-box 6
  Uniprot ID: O95947
  ENST ID: ENST00000395224
  CDS Start-End: 61-1371
agctgtcggactcaccgggggccctaagcagcgagacctgaggccagacggaactacaacatgtaccatccacgagaattgtacccgtccctgggggccggctaccgcctggggcccgcccaacctggggccgactccagcttcccacccgccctagcggagggctaccgctaccccgaactggacacccctaaactggattgcttcctctccgggatggaggctgctccccgcaccctggccgcgcacccacctctgccccttctgccccctgccatgggcactgagccggccccatcagctccagaggccctccattccctcccgggggtcagcctgagcctggagaaccgggagctatggaaggagttcagctctgtgggaacagaaatgatcatcaccaaagctgggaggcgcatgttccctgcctgccgagtgtcagtcactggcctggaccccgaggcccgctacttgtttcttctggatgtgattccggtggatggggctcgctaccgctggcagggccggcgctgggagcccagcggcaaggcagagccccgcctgcctgaccgtgtctacattcaccccgactctcctgccactggtgcacattggatgcggcagcctgtgtctttccatcgtgtcaagctcaccaacagcacgctggacccccacggccacctgatcctgcactccatgcacaagtaccaaccccgcatacacctagttcgggcagcccagctctgcagccagcactgggggggcatggcctccttccgcttccccgagaccacattcatctccgtgacagcctaccagaacccacagatcacacaactgaagattgcagccaatccctttgccaaaggcttccgggagaacggcagaaactgtaagagggagcgagacgcccgtgtgaagaggaaactgcggggcccagagccagcagccacagaggcctatgggagcggagacacaccaggtggtccctgcgactccaccctgggtggagacattcgtgaatcagatccagaacaggccccagcccccggggaagccaccgctgccccggcacctctgtgtggtggccccagtgctgaggcctacctcctgcaccctgcggctttccatggggcccccagtcaccttcccaccaggagccccagcttcccggaggctccagactccgggcgctcagccccctactcggctgcatttctggagctgccgcacgggtcagggggctccgggtacccagcggctccaccggcggtaccctttgccccgcactttctccaagggggccccttccctctaccatacaccgcgcctgggggctatctggatgtgggctccaaacccatgtactgaaccactgctgggcccctctgcctccatcacaaacctcccgctcccttcccccagccctggagccccctcacctccaccggccccatcccccacaccaaatggccgccttgggcctgcccacccaccccctcaacttcacaccttgatttcactcccacccccctctggcttcaaagcctaaccaaggctgctgggagtccagctggggccggcttccccttcccggctctcacctccgtgtgaatggaaggggctctgcctggccaaatggggccacagaccagcatccccacttaccaggcctccccatgggctctggaggggctcaatccccacccccccacacacactggtgcaggccacaccagtctgttgttctgggaccagagtatttttgttaataaaactcaaaagccatccatgctcaggaaa

SEQ ID NO: 189735 - DNA, 1543 bp, Homo sapiens
  Payload ID: 17467
  Gene Symbol: TBX6
  Gene Name: T-box 6
  Uniprot ID: O95947
  ENST ID: ENST00000567664
  CDS Start-End: 21-908
aggccagacggaactacaacatgtaccatccacgagaattgtacccgtccctgggggccggctaccgcctggggcccgcccaacctggggccgactccagcttcccacccgccctagcggagggctaccgctaccccgaactggacacccctaaactggattgcttcctctccgggatggaggctgctccccgcaccctggccgcgcacccacctctgccccttctgccccctgccatgggcactgagccggccccatcagctccagaggccctccattccctcccgggggtcagcctgagcctggagaaccgggagctatggaaggagttcagctctgtgggaacagaaatgatcatcaccaaagctgggaggcgcatgttccctgcctgccgagtgtcagtcactggcctggaccccgaggcccgctacttgtttcttctggatgtgattccggtggatggggctcgctaccgctggcagggccggcgctgggagcccagcggcaaggcagagccccgcctgcctgaccgtgtctacattcaccccgactctcctgccactggtgcacattggatgcggcagcctgtgtctttccatcgtgtcaagctcaccaacagcacgctggacccccacggccacctgatcctgcactccatgcacaagtaccaaccccgcatacacctagttcgggcagcccagctctgcagccagcactgggggggcatggcctccttccgcttccccgagaccacattcatctccgtgacagcctaccagaacccacagatcacacaactgaagattgcagccaatccctttgccaaaggcttccgggagaacggcagaaactgtaagaggtgggagttgttcattcatttgttcatgcattcaacaaatgtttattaatcactcactgtgtgccaggcaccgtgctggacatcagaaatgcagtgacacaccaggtggtccctgcgactccaccctgggtggagacattcgtgaatcagatccagaacaggccccagcccccggggaagccaccgctgccccggcacctctgtgtggtggccccagtgctgaggcctacctcctgcaccctgcggctttccatggggcccccagtcaccttcccaccaggagccccagcttcccggaggctccagactccgggcgctcagccccctactcggctgcatttctggagctgccgcacgggtcagggggctccgggtacccagcggctccaccggcggtaccctttgccccgcactttctccaagggggccccttccctctaccatacaccgcgcctgggggctatctggatgtgggctccaaacccatgtactgaaccactgctgggcccctctgcctccatcacaaacctcccgctcccttcccccagccctggagccccctcacctccaccggccccatcccccacaccaaatggccgccttgggcctgcccacccaccccctcaacttcacaccttgatttcactcccacccccctctggcttcaaagcctaaccaaggctg

SEQ ID NO: 189736 - DNA, 2162 bp, Homo sapiens
  Payload ID: 17467
  Gene Symbol: TBX6
  Gene Name: T-box 6
  Uniprot ID: O95947
  ENST ID: ENST00000553607
  CDS Start-End: 695-1582
agaagctgtcggactgtgagcgccttcgaactttggaggcttggctcgggatggaggtttttttagcatggggaccagggaggactacggtgctcgggactgggctgcggcctcctcgcggccccgagtgccctgtgaaatcagctcaggccgcgtccctctagcctgcactttccctctgttcacgctgcttccctccagggcccggcctccaagtgaaggggggcggagggcggtcacctgccagaaggtctggggcgccaaggtgtgtcccgggactcttggctccgtccaggttccaggccccgccccccagcttatccctagccggggctccccaccgtgggaacggggaccagctggccggaagcgccaaactgcgtccctgtccgagccctggggatcaatcaagccgaggagttaattatgtaatgagggggcagggggtcgaggctaatgaagcctcccggggtggggagggaggggaggaggggaccgtacccaggtatccgaccccctctcggaccccttcgaggccccaggggtctccaccccagcccaactccagggccccaaagaggggaggggctgtgatcctggatctggaaggggctgagctgtgagctataaagggggcatctcgcagcaccgggggccctaagcagcgagacctgaggccagacggaactacaacatgtaccatccacgagaattgtacccgtccctgggggccggctaccgcctggggcccgcccaacctggggccgactccagcttcccacccgccctagcggagggctaccgctaccccgaactggacacccctaaactggattgcttcctctccgggatggaggctgctccccgcaccctggccgcgcacccacctctgccccttctgccccctgccatgggcactgagccggccccatcagctccagaggccctccattccctcccgggggtcagcctgagcctggagaaccgggagctatggaaggagttcagctctgtgggaacagaaatgatcatcaccaaagctgggaggcgcatgttccctgcctgccgagtgtcagtcactggcctggaccccgaggcccgctacttgtttcttctggatgtgattccggtggatggggctcgctaccgctggcagggccggcgctgggagcccagcggcaaggcagagccccgcctgcctgaccgtgtctacattcaccccgactctcctgccactggtgcacattggatgcggcagcctgtgtctttccatcgtgtcaagctcaccaacagcacgctggacccccacggccacctgatcctgcactccatgcacaagtaccaaccccgcatacacctagttcgggcagcccagctctgcagccagcactgggggggcatggcctccttccgcttccccgagaccacattcatctccgtgacagcctaccagaacccacagatcacacaactgaagattgcagccaatccctttgccaaaggcttccgggagaacggcagaaactgtaagaggtgggagttgttcattcatttgttcatgcattcaacaaatgtttattaatcactcactgtgtgccaggcaccgtgctggacatcagaaatgcagtggtaagtgaaaacattcattcactgactcagcaaatacttatatagtacctgctatgtgccagggacagttccaggcactggagataaaacaaacaaagcaaaccaaagccccggccctcatgcagctgatttctagtggggagagtagacaagcagacaagagaaataaataaaatgtcatctgttaggaagccattctaaagagaagagagaccaggtgtggtggctcacgcatgtaatcccagcactctgggaggctgaggcgggcagatcacctgaggccaggagttcgagaccagcctgccaacatggtgaaaccctgtctctgctaaaaatacaaaaattagccaggcatggtggcaaacgcctgtaatcccaactacttgggaggctgaggcaggagaatctcttgaacccaggaggtggaggttgcagtgagtcgagatcatgccattgcattccagcctaggcaacacgagcaaaacttcctctcaaaaaaaaaaaaaaaaagaaagaaaagaaaactctgtctc

SEQ ID NO: 189737 - DNA, 1796 bp, Homo sapiens
  Payload ID: 17467
  Gene Symbol: TBX6
  Gene Name: T-box 6
  ENST ID: ENST00000627355
  CDS Start-End: 57-1367
tctcgcagcaccgggggccctaagcagcgagacctgaggccagacggaactacaacatgtaccatccacgagaattgtacccgtccctgggggccggctaccgcctggggcccgcccaacctggggccgactccagcttcccacccgccctagcggagggctaccgctaccccgaactggacacccctaaactggattgcttcctctccgggatggaggctgctccccgcaccctggccgcgcacccacctctgccccttctgccccctgccatgggcactgagccggccccatcagctccagaggccctccattccctcccgggggtcagcctgagcctggagaaccgggagctatggaaggagttcagctctgtgggaacagaaatgatcatcaccaaagctgggaggcgcatgttccctgcctgccgagtgtcagtcactggcctggaccccgaggcccgctacttgtttcttctggatgtgattccggtggatggggctcgctaccgctggcagggccggcgctgggagcccagcggcaaggcagagccccgcctgcctgaccgtgtctacattcaccccgactctcctgccactggtgcacattggatgcggcagcctgtgtctttccatcgtgtcaagctcaccaacagcacgctggacccccacggccacctgatcctgcactccatgcacaagtaccaaccccgcatacacctagttcgggcagcccagctctgcagccagcactgggggggcatggcctccttccgcttccccgagaccacattcatctccgtgacagcctaccagaacccacaggtgagtgaccctgctgggggtggtggccccctgcccagaccatcatcatcatcaccaccactgttccccagggagcgagacgcccgtgtgaagaggaaactgcggggcccagagccagcagccacagaggcctatgggagcggagacacaccaggtggtccctgcgactccaccctgggtggagacattcgtgaatcagatccagaacaggccccagcccccggggaagccaccgctgccccggcacctctgtgtggtggccccagtgctgaggcctacctcctgcaccctgcggctttccatggggcccccagtcaccttcccaccaggagccccagcttcccggaggctccagactccgggcgctcagccccctactcggctgcatttctggagctgccgcacgggtcagggggctccgggtacccagcggctccaccggcggtaccctttgccccgcactttctccaagggggccccttccctctaccatacaccgcgcctgggggctatctggatgtgggctccaaacccatgtactgaaccactgctgggcccctctgcctccatcacaaacctcccgctcccttcccccagccctggagccccctcacctccaccggccccatcccccacaccaaatggccgccttgggcctgcccacccaccccctcaacttcacaccttgatttcactcccacccccctctggcttcaaagcctaaccaaggctgctgggagtccagctggggccggcttccccttcccggctctcacctccgtgtgaatggaaggggctctgcctggccaaatggggccacagaccagcatccccacttaccaggcctccccatgggctctggaggggctcaatccccacccccccacacacactggtgcaggccacaccagtctgttgttctgggaccagagtatttttgttaataaaactcaaaagccatccatgctcagg

SEQ ID NO: 189738 - DNA, 4009 bp, Homo sapiens
  Payload ID: 17468
  Gene Symbol: TBR1
  Gene Name: T-box, brain, 1
  Uniprot ID: Q16650
  ENST ID: ENST00000389554
  CDS Start-End: 318-2366
gtcgctaccaggagccaggtgattatcctaattaatgtctatctaattaaattactgtcagcagctaaccaatggcaggagccgtttcatcggctgcacaagcagcaagatcaaaagtgagccttttctgattgctgcatagtgtcaattggccaatctcttctcccagggaaaaaaaaaagtaaatcaaacctttgagaagcatttgctggttgaagtgctttctgtctagtgagggggtctgtggatttctagtttatgataaataggactttaaaaaccagggacgggagggcgagtgttcaggttctagagctatgcagctggagcactgcctttctccttctatcatgctctccaagaaatttctcaatgtgagcagcagctacccacattcaggcggatccgagcttgtcttgcacgatcatcccattatctcgaccactgacaacctggagagaagttcacctttgaaaaaaattaccagggggatgacgaatcagtcagatacagacaattttcctgactccaaggactcaccaggggacgtccagagaagtaaactctctcctgtcttggacggggtctctgagcttcgtcacagtttcgatggctctgctgcagatcgctacctcctctctcagtccagccagccacagtctgcggccactgctcccagtgccatgttcccgtaccccggccagcacggaccggcgcaccccgccttctccatcggcagccctagccgctacatggcccaccacccggtcatcaccaacggagcctacaacagcctcctgtccaactcctcgccgcagggataccccacggccggctacccctacccacagcagtacggccactcctaccaaggagctccgttctaccagttctcctccacccagccggggctggtgcccggcaaagcacaggtgtacctgtgcaacaggcccctttggctgaaatttcaccggcaccaaacggagatgatcatcaccaaacagggaaggcgcatgtttccttttttaagttttaacatttctggtctcgatcccacggctcattacaatatttttgtggatgtgattttggcggatcccaatcactggaggtttcaaggaggcaaatgggttccttgcggcaaagcggacaccaatgtgcaaggaaatcgggtctatatgcatccggattcccccaacactggggctcactggatgcgccaagaaatctcttttggaaaattaaaacttacgaacaacaaaggagcttcaaataacaatgggcagatggtggttttacagtccttgcacaagtaccagccccgcctgcatgtggtggaagtgaacgaggacggcacggaggacactagccagcccggccgcgtgcagacgttcactttccctgagactcagttcatcgccgtcaccgcctaccagaacacggatattacacaactgaaaatagatcacaacccttttgcaaaaggatttcgggataattatgacacgatctacaccggctgtgacatggaccgcctgaccccctcgcccaacgactcgccgcgctcgcagatcgtgcccggggcccgctacgccatggccggctctttcctgcaggaccagttcgtgagcaactacgccaaggcccgcttccacccgggcgcgggcgcgggccccgggccgggtacggaccgcagcgtgccgcacaccaacgggctgctgtcgccgcagcaggccgaggacccgggcgcgccctcgccgcaacgctggtttgtgacgccggccaacaaccggctggacttcgcggcctcggcctatgacacggccacggacttcgcgggcaacgcggccacgctgctctcttacgcggcggcgggcgtgaaggcgctgccgctgcaggctgcaggctgcactggccgcccgctcggctactacgccgacccgtcgggctggggcgcccgcagtcccccgcagtactgcggcaccaagtcgggctcggtgctgccctgctggcccaacagcgccgcggccgccgcgcgcatggccggcgccaatccctacctgggcgaggaggccgagggcctggccgccgagcgctcgccgctgccgcccggcgccgccgaggacgccaagcccaaggacctgtccgattccagctggatcgagacgccctcctcgatcaagtccatcgactccagcgactcggggatttacgagcaggccaagcggaggcggatctcgccggccgacacgcccgtgtccgagagttcgtccccgctcaagagcgaggtgctggcccagcgggactgcgagaagaactgcgccaaggacattagcggctactatggcttctactcgcacagctaggccgcccctgcccgcccggccccgccgcggcccggacccccagccagcccctcacagctcttccccagctccgcctccccacactcctccttgcgcacccactcattttatttgaccctcgatggccgtctgcagcgaataagtgcaggtctccgagcgtgattttaaccttttttgcacagcagtctctgcaattagctcaccgaccttcaactttgctgtaaaccttttggttttcctacttactcttcttctgtggagttatcctcctacaattcccctccccctcgtctttctcttacctcctacttctctttcttgtaatgaaactcttcacctttaggagacctgggcagtcctgtcaggcagcagcgattccgacccgccaagtctcggcctccacattaaccataggatgttgactctagaacctggacccacccagcgcgtcctttcttatccccgagtggatggatggatggatggatggtagggatgttaataattttagtggaacaaagcctgtgaaatgattgtacatagtgttaatttattgtaacgaatggctagtttttattctcgtcaaggcacaaaaccagttcatgcttaacctttttttcctttcctttctttgcttttctttctctcctctcatactttctcttctctctcttttaattttcttgtgagataatattctaagaggctctagaaacatgaaatactcagtagtgatgggtttcccacttctcctcaatccgttgcatgaaataattactatgtgccctaatgcacacaaatagctaaggagaatccacccaaacacctttaaaggataggtgtctgttcataggcaagtcgattaagtggcatgatgcctgcaaagcaaagtcaactggagttgtatgttccccccaccttctaaatagaatagctcgacatcagcaatattattttgccttatttgtttttccccaaagtgccaaatccattactggtctgtgcaggtgccaaatatgctgacaaactgtttctgaatatctttcagtaccccttcacctttatatgctgtaaatctttgtaatgaatactctattaatgatatagatgactgaattgttggtaactatagtgtagtctagtgaagatgaattgtgtgagttgtatattttactgcattttagttttgaaaatgacttccccaccacctagaaacagctgaaatttgacttccttgggagaacactagcattaatgcaagtaagactgattttcccctaagtcttgttatatttgataaggagcattaatccccctggaaatagattagtaggatttctaatgttgtgtagcaaacctatacttttttgtatttaaaaattaatgtgaaatatgcatcatacacaatattcaatctagattccagtccatggggggatttttcctaataggaattcagggtctaaacgtgtgtatattttggctcttctgtaaatctaatgttgtgatttttatatttgtttcgttttgtctgtgaactgaataatttatacaagaacacactccattgagaaacgttttgttttttgctcgtttgtatcgtctgtgtataacaagtaaaataaacctggtaaaaacgctaa

SEQ ID NO: 189739 - DNA, 1454 bp, Homo sapiens
  Payload ID: 17468
  Gene Symbol: TBR1
  Gene Name: T-box, brain, 1
  Uniprot ID: Q16650
  ENST ID: ENST00000410035
  CDS Start-End: 208-1395
tttgtggactggctcgagcgacttttaaaacgatcggccaatgacttctaaaaggaaacgagggggacagggggacagactgagctgcgagaagggggaggattatgcaaaagctattttaatcacccccagttaataggaagaaagaatggcctaaaaaagccccagttaatgggcttcatggtggagtaaggaaatcgggtctatatgcatccggattcccccaacactggggctcactggatgcgccaagaaatctcttttggaaaattaaaacttacgaacaacaaaggagcttcaaataacaatgggcagatggtggttttacagtccttgcacaagtaccagccccgcctgcatgtggtggaagtgaacgaggacggcacggaggacactagccagcccggccgcgtgcagacgttcactttccctgagactcagttcatcgccgtcaccgcctaccagaacacggatattacacaactgaaaatagatcacaacccttttgcaaaaggatttcgggataattatgacacgatctacaccggctgtgacatggaccgcctgaccccctcgcccaacgactcgccgcgctcgcagatcgtgcccggggcccgctacgccatggccggctctttcctgcaggaccagttcgtgagcaactacgccaaggcccgcttccacccgggcgcgggcgcgggccccgggccgggtacggaccgcagcgtgccgcacaccaacgggctgctgtcgccgcagcaggccgaggacccgggcgcgccctcgccgcaacgctggtttgtgacgccggccaacaaccggctggacttcgcggcctcggcctatgacacggccacggacttcgcgggcaacgcggccacgctgctctcttacgcggcggcgggcgtgaaggcgctgccgctgcaggctgcaggctgcactggccgcccgctcggctactacgccgacccgtcgggctggggcgcccgcagtcccccgcagtactgcggcaccaagtcgggctcggtgctgccctgctggcccaacagcgccgcggccgccgcgcgcatggccggcgccaatccctacctgggcgaggaggccgagggcctggccgccgagcgctcgccgctgccgcccggcgccgccgaggacgccaagcccaaggacctgtccgattccagctggatcgagacgccctcctcgatcaagtccatcgactccagcgactcggggatttacgagcaggccaagcggaggcggatctcgccggccgacacgcccgtgtccgagagttcgtccccgctcaagagcgaggtgctggcccagcgggactgcgagaagaactgcgccaaggacattagcggctactatggcttctactcgcacagctaggccgcccctgcccgcccggccccgccgcggcccggacccccagccagcccctcacagct

SEQ ID NO: 189740 - DNA, 698 bp, Homo sapiens
  Payload ID: 17468
  Gene Symbol: TBR1
  Gene Name: T-box, brain, 1
  ENST ID: ENST00000411412
  CDS Start-End: 1-698
tttcaaggaggcaaatgggttccttgcggcaaagcggacaccaatgtgcaaggaaatcgggtctatatgcatccggattcccccaacactggggctcactggatgcgccaagaaatctcttttggaaaattaaaacttacgaacaacaaaggagcttcaaataacaatgggcagatggtggttttacagtccttgcacaagtaccagccccgcctgcatgtggtggaagtgaacgaggacggcacggaggacactagccagcccggccgcgtgcagacgttcactttccctgagactcagttcatcgccgtcaccgcctaccagaacacggatattacacaactgaaaatagatcacaacccttttgcaaaaggatttcgggataattatgacacgatctacaccggctgtgacatggaccgcctgaccccctcgcccaacgactcgccgcgctcgcagatcgtgcccggggcccgctacgccatggccggctctttcctgcaggaccagttccaggccgaggacccgggcgcgccctcgccgcaacgctggtttgtgacgccggccaacaaccggctggacttcgcggcctcggcctatgacacggccacggacttcgcgggcaacgcggccacgctgctctcttacgcggcggcgggcgtgaaggcgctgccgctgcaggctgcaggctgcactgg

SEQ ID NO: 189741 - DNA, 4228 bp, Homo sapiens
  Payload ID: 17469
  Gene Symbol: TBPL1
  Gene Name: TBP-like 1
  Uniprot ID: P62380
  ENST ID: ENST00000237264
  CDS Start-End: 276-836
atttattgtcgcggggaagctgcggccgcctcgcacccggaacaacaaagcaaggaagacggagtccgagcctcgggggctcctagcaacgggccggggcgggagttccatggagactggggagcgcgcccgtctcatcctcatccttgtcctccagcttctccttcgcatccgacgcaaccggcagcagcgctgccgccgcgtcctcagccaccgctccctcttcccacggatgtgatcttcgtggtggaaagctaaattttaaaaccaccccaatggatgcagacagtgatgttgcattggacattctaattacaaatgtagtctgtgtttttagaacaagatgtcatttaaacttaaggaagattgctttggaaggagcaaatgtaatttataaacgtgatgttggaaaagtattaatgaagcttagaaaacctagaattacagctacaatttggtcctcaggaaaaattatttgcactggagcaacaagtgaagaagaagctaaatttggtgccagacgcttagcccgtagtctgcagaaactaggttttcaggtaatatttacagattttaaggttgttaacgttctggcagtgtgtaacatgccatttgaaatccgtttgccagaattcacaaagaacaatagacctcatgccagttacgaacctgaacttcatcctgctgtgtgctatcggataaaatctctaagagctacattacagattttttcaacaggaagtatcacagtaacagggcccaatgtaaaggctgttgctactgctgtggaacagatttacccatttgtgtttgaaagcaggaaagaaattttataattcaccacttaattggttagaatctctaactgagcaccttttaaacctgctgcacattggactcaaaaggaaaactggaccaacaataattgaggaaatagactcttttattcattcacggctacagtgtaagctccagtccctttggattttattccaaaccttgctgtaatataaaaggaagtttacaagacatgatattgctgcttttacaaaaggacattctatttattttcgcagtaattctcatgtccccataagcagagctgtcacagtgtgcactaccttagattgttttattgtcgtcattgttatttttttccattttgagctaatgtgttttatttgtgaatagtcttttacatttttgtatgctgaatatgggcaccaaagaacctgtaaaagttatctttttcaattgaatgtgcacaaataaaagtttggaaaagatctctcttcattctataacttttattccccattttctattttaacaaaaattgtattcatacttcttttttttaaaatctatgcaagcttaagactttggctaaagtgtgttggcttctttttgaagtgtattttgtgtgtgtgtgtgtgtgtgtgtgtatatatatatatatatatgcaccacatgtgtatagtatcttttaatgctctgttaccaaataacaaataggaattttttttcttgcagattagaaataaaaacgtgtatataaactctagggaaccagactagaagtttatagataaaggataatgttttatgttgctaatttaatatgatagaaaatgttaaataacttgtaaaggttaagaaattgtagttttaagaagagaaacctcttacccactagatggaaatgagaaagaagctgtgatgaatggtgcctcatttggacctttgtttttctggaaagactcaacacctgtagttgtagagaagtgattgaggttcttgactttaatcttgggttgatgcccaagcctatactaagagtcttgtcagaagttggtaacatggagatgttttaacaagaagtgcccataagctgcctctgtgccacagtgtaattatcaaatagccccacttgaatttgaaagccattttgtgtgatactgtccttccccttgctgtatcttatttaatggagttaaagagtgactattcagtatatgagattgctactcttaaagttataataaatatgcatttatgaaacagtgtctctggctcacccaggagccctgatgtggtaatacaggatcaagctgtagttgtgccctgtcatttaggtttaggagtttagtgtaaccaacagtgattatacctagaaataaagctgagtggagagtccaattagcttctcaggagaaacttaatggggacaatattccaacacaatgttccacaaaaacttgtatttccaaaatgtttttaaacctttgtggaaaaattgcaacatcctaatctccatatatagtacattttccttactgtattataaaatcttgaaaacctagcttaggcactgcactgaacaacacatattatttttatcttttttcttctcaatgccttccctaacctcctgcttattccaaagtggaaagcaaaggctaacttacatttttccttcttgtgaaatatttcattgagatttttagacttgtatttttccttttttttaaaaaaaaagtgtttatttcctttattttaagattcagtaggatagccaaattcatagagaataaaattacatgaaagagttacaagctcactgttttaaagacttgacatttttcatttagttttaattaacagtaataagtcacctcctgtttttcaatgttcaccaaaaaaagaaacatagaatagggggaaaacatgcttatatagccaaggtacagatccagatgatgtaacctttttagtattcgcatgacttgaaaactgggcagatcaatagataatcgaagtgctttatctgaagggagagggtaaagacagtgtgaccaggtttgttttcagggctgccgaatgagcctcacctaacagtgtccatgggtaattcgctaaccttaacaaagatgggaagaagtgagtgctctgatgtcttctgctggctctccataagtactgtaaattttttttataaataaaaactgtgaatatatatgtacaagttgtaagtatttccccctttttatttttgaaaatcaagaagcttgatttggtgtggtgcaatggatattggataaaaatttgaagacaaaattgtttagttacagactcaggataataaaagaaaaatataaaagaatgctcaagatactgaagtcaaggtcactagtaataaactggctaggttgataaacaatttcctgcccatttataatgaagggctaaacaaaaaatacctgaagtatatatagagtttgaactataaacacggaaggaaacatggggcagaacacacttcccttctctttccaaaaacaaaaaacaatgcatgctctgatttgcgtatgaaatacaccatgatagaattgagatctccaatctcctttccttttagcttccccctgccaatttttatacagataatacactgcagatccaggccttttagtcagtctcctgagtctctgatatagttttactacttacataggtttatagtctctccacattgttataaaggaatgtaatagatcatgtttccttatatgacattgggacagtttgttaggaaccaataggaaaattccaagctaaataaaaaggagctttggctcttaggattctcttttcttcaggttaatcatattttaaaattctttttcaagttaggttgttcgtgcttttaagttttttgtgtgtcttccatcacttaaatattagtaatttaatatgttatttggttcaagatttgattgtggattttctatcatacccaaattttattagtaagacctcttaacaagtctttaaaatcaactggagaagtaagagaacagttcatcgttgtgtgggtgaaacccacgttgctggtacaggtggccatcatagaaaagaacatgagggaattgtcctgatgtctgaatgtcatttattgtgtcttcagttatctgaacatcatcatcaattatagcctgtgtaccgtaacctgaggtagtgatattcctgaggagtgtgaagaattggacactgtggattactatacattgtcatgaaagccttacaaggaggcagcttttctaggcttgacttaataacttcaacctaattgcttagagatttggataaataacctaatggcctgactccttttctaatgttttactaacagctacttctaaataaatatggtcccaggattttaaaa

SEQ ID NO: 189742 - DNA, 623 bp, Homo sapiens
  Payload ID: 17469
  Gene Symbol: TBPL1
  Gene Name: TBP-like 1
  ENST ID: ENST00000367869
  CDS Start-End: 350-623
ctcgcacccggaacaacaaagcaaggaagacggagtccgagcctcgggggctcctagcaacgggccggggcgggagttccatggagactggggagcgcgcccgtctcatcctcatccttgtcctccagcttctccttcgcatccgacgcaaccggcagcagcgctgccgccgcgtcctcagccaccgctccctcttcccacggagcgaggtttcaccaggctggtctccaactcctgacctcaaatgatccacccatcttggcctcccagagtgctgagattacaggcgtgaggcaccactcctggatgtgatcttcgtggtggaaagctaaattttaaaaccaccccaatggatgcagacagtgatgttgcattggacattctaattacaaatgtagtctgtgtttttagaacaagatgtcatttaaacttaaggaagattgctttggaaggagcaaatgtaatttataaacgtgatgttggaaaagtattaatgaagcttagaaaacctagaattacagctacaatttggtcctcaggaaaaattatttgcactggagcaacaagtgaagaagaagctaaatttggtgccagacgcttagcccgtagtctgcagaaactag

SEQ ID NO: 189743 - DNA, 808 bp, Homo sapiens
  Payload ID: 17469
  Gene Symbol: TBPL1
  Gene Name: TBP-like 1
  ENST ID: ENST00000367871
  CDS Start-End: 276-767
atttattgtcgcggggaagctgcggccgcctcgcacccggaacaacaaagcaaggaagacggagtccgagcctcgggggctcctagcaacgggccggggcgggagttccatggagactggggagcgcgcccgtctcatcctcatccttgtcctccagcttctccttcgcatccgacgcaaccggcagcagcgctgccgccgcgtcctcagccaccgctccctcttcccacggatgtgatcttcgtggtggaaagctaaattttaaaaccaccccaatggatgcagacagtgatgttgcattggacattctaattacaaatgtagtctgtgtttttagaacaagatgtcatttaaacttaaggaagattgctttggaaggagcaaatgtaatttataaacgtgatgttggaaaagtattaatgaagcttagaaaacctagaattacagctacaatttggtcctcaggaaaaattatttgcactggagcaacaagtgaagaagaagctaaatttggtgccagacgcttagcccgtagtctgcagaaactaggttttcaggtaatatttacagattttaaggttgttaacgttctggcagtgtgtaacatgccatttgaaatccgtttgccagaattcacaaagaacaatagacctcatgccagttacgaacctgaacttcatcctgctgtgtgctatcggataaaatctctaagagctacattacagattttttcaacaggaagtatcacagtaacaggtattctatgatattgaaaccacacttatcaattatggattgaatgatacaa

SEQ ID NO: 189744 - DNA, 865 bp, Homo sapiens
  Payload ID: 17469
  Gene Symbol: TBPL1
  Gene Name: TBP-like 1
  ENST ID: ENST00000457715
  CDS Start-End: 731-865
gggtcccccggcccctgcagggctacttgggcgcagagccgcggagggtctccgttcctagaggtcctcctatcccgggctgcctgagtcctcgccagcatccgccctctcccactcccatccttcctggatccgcctctcggttcccgagggacagtcccgaccgcaaacccacgtagagtaaggaatgtgggacaggcgacagaagtggcatacggtcctgcgttatccctccgtctcgccacaccttgtgtctccatctctccccacttccttccctccgtctgtcatctgtcatccccggtcgctctaagaccaggattccaattcgcctagtgaggaatctcactaggggaatttatcgcgacatcataaattaacgggttcattttgactgaaaaagcgaaggacttttttcaggcagaaaacaagtctcgtctggacgcgtctagtctatttattgtcgcggggaagctgcggccgcctcgcacccggaacaacaaagcaaggaagacggagtccgagcctcgggggctcctagcaacgggccggggcgggagttccatggagactggggagcgcgcccgtctcatcctcatccttgtcctccagcttctccttcgcatccgacgcaaccggcagcagcgctgccgccgcgtcctcagccaccgctccctcttcccacggatgtgatcttcgtggtggaaagctaaattttaaaaccaccccaatggatgcagacagtgatgttgcattggacattctaattacaaatgtagtctgtgtttttagaacaagatgtcatttaaacttaaggaagattgctttggaaggagcaaatgtaatttataaacgtgatgttgga

SEQ ID NO: 189745 - DNA, 991 bp, Homo sapiens
  Payload ID: 17469
  Gene Symbol: TBPL1
  Gene Name: TBP-like 1
  ENST ID: ENST00000416965
  CDS Start-End: 606-991
ggccgttacgcgattttcgctcccgcgggcagcgcctctcaggccactcccgagggaccccgaggacgcactcgggccccagggcgacggttcaaacgggccattgtgcgcccccggggtcccccggcccctgcagggctacttgggcgcagagccgcggagggtctccgttcctagaggtcctcctatcccgggctgcctgagtcctcgccagcatccgccctctcccactcccatccttcctggatccgcctctcggttcccgagggacagtcccgaccgcaaacccacgtagagtaaggaatgtgggacaggcgacagaagtggcatacggtcctgcgttatccctccgtctcgccacaccttgtgtctccatctctccccacttccttccctccgtctgtcatctgtcatccccggtcgctctaagaccaggattccaattcgcctagtgaggaatctcactaggggaatttatcgcgacatcataaattaacgggttcattttgactgaaaaagcgaaggacttttttcaggcagaaaacaagtctcgtctggacggatgtgatcttcgtggtggaaagctaaattttaaaaccaccccaatggatgcagacagtgatgttgcattggacattctaattacaaatgtagtctgtgtttttagaacaagatgtcatttaaacttaaggaagattgctttggaaggagcaaatgtaatttataaacgtgatgttggaaaagtattaatgaagcttagaaaacctagaattacagctacaatttggtcctcaggaaaaattatttgcactggagcaacaagtgaagaagaagctaaatttggtgccagacgcttagcccgtagtctgcagaaactaggttttcaggtaatatttacagattttaaggttgttaacgttctggcagtgtgtaacatgccatttgaaatccgtttgccagaattcacaaagaacaatagacctcatgccag

SEQ ID NO: 189746 - DNA, 1625 bp, Homo sapiens
  Payload ID: 17469
  Gene Symbol: TBPL1
  Gene Name: TBP-like 1
  Uniprot ID: P62380
  ENST ID: ENST00000613034
  CDS Start-End: 606-1166
ggccgttacgcgattttcgctcccgcgggcagcgcctctcaggccactcccgagggaccccgaggacgcactcgggccccagggcgacggttcaaacgggccattgtgcgcccccggggtcccccggcccctgcagggctacttgggcgcagagccgcggagggtctccgttcctagaggtcctcctatcccgggctgcctgagtcctcgccagcatccgccctctcccactcccatccttcctggatccgcctctcggttcccgagggacagtcccgaccgcaaacccacgtagagtaaggaatgtgggacaggcgacagaagtggcatacggtcctgcgttatccctccgtctcgccacaccttgtgtctccatctctccccacttccttccctccgtctgtcatctgtcatccccggtcgctctaagaccaggattccaattcgcctagtgaggaatctcactaggggaatttatcgcgacatcataaattaacgggttcattttgactgaaaaagcgaaggacttttttcaggcagaaaacaagtctcgtctggacggatgtgatcttcgtggtggaaagctaaattttaaaaccaccccaatggatgcagacagtgatgttgcattggacattctaattacaaatgtagtctgtgtttttagaacaagatgtcatttaaacttaaggaagattgctttggaaggagcaaatgtaatttataaacgtgatgttggaaaagtattaatgaagcttagaaaacctagaattacagctacaatttggtcctcaggaaaaattatttgcactggagcaacaagtgaagaagaagctaaatttggtgccagacgcttagcccgtagtctgcagaaactaggttttcaggtaatatttacagattttaaggttgttaacgttctggcagtgtgtaacatgccatttgaaatccgtttgccagaattcacaaagaacaatagacctcatgccagttacgaacctgaacttcatcctgctgtgtgctatcggataaaatctctaagagctacattacagattttttcaacaggaagtatcacagtaacagggcccaatgtaaaggctgttgctactgctgtggaacagatttacccatttgtgtttgaaagcaggaaagaaattttataattcaccacttaattggttagaatctctaactgagcaccttttaaacctgctgcacattggactcaaaaggaaaactggaccaacaataattgaggaaatagactcttttattcattcacggctacagtgtaagctccagtccctttggattttattccaaaccttgctgtaatataaaaggaagtttacaagacatgatattgctgcttttacaaaaggacattctatttattttcgcagtaattctcatgtccccataagcagagctgtcacagtgtgcactaccttagattgttttattgtcgtcattgttatttttttccattttgagctaatgtgttttatttgtgaatagtcttttacatttttgtatgctgaatatgggcaccaaagaacctgtaaaagttatctttttcaattgaatgtgcacaaataaaagtttggaaaagatctctcttc

SEQ ID NO: 189747 - DNA, 4109 bp, Homo sapiens
  Payload ID: 17470
  Gene Symbol: TIPARP
  Gene Name: TCDD-inducible poly(ADP-ribose) polymerase
  Uniprot ID: Q7Z3E1
  ENST ID: ENST00000295924
  CDS Start-End: 497-2470
agacgcggaccctcagggacactgcggacgcgagaaaggacacgccccctcgcgggagcataagtccaccgcacagaactcgcgcgcctcccctcgaacgaacgcgcacgcgcgcgcagggggcgggtcttcttcccgacacccactgagcgcccggcctcctcaccccaccccaccgaactccggccgcccaggctccgcctccgcgacgggccgtcgggaggaggcgaccggaagccacttaaagcagagatcgaggtgacaggcgagctggctggactcggagcgcggtcgaggctttctgcgttcgcggcggcggaatggcccgtgcgcggctcgccgcgtcgcggctctgtggtccctagacgtcggctcccgccctcggcgctgatctccggcgcgggcactgctttccactcggctcctgtcgtccgttctctcaggctcccgttcaggatttttagactctgaggagcagttggagctaatccacattatggaaatggaaaccaccgaacctgagccagactgtgtagtgcagcctccctctcctcctgatgacttttcatgccaaatgagactctctgagaagatcactccattgaagacttgttttaagaaaaaggatcagaaaagattgggaactggaaccctgaggtctttgaggccaatattaaacactcttctagaatctggctcacttgatggggtttttagatctaggaaccagagtacagatgagaacagcttacatgaacctatgatgaagaaagccatggaaatcaattcatcatgcccaccagcagaaaataatatgtctgttctgattcctgataggacaaatgttggggaccagataccggaagcccatccttccactgaagctccagaacgagtggttccaatccaagatcacagctttccatcagaaaccctcagtgggacggtggcagattccacaccagctcacttccagactgatcttttgcacccagtttcaagtgatgttcctactagtcctgactgcttagacaaagtcatagattatgttccaggcattttccaagaaaacagttttacaatccaatacattctggacaccagtgataagctgagtactgagctctttcaggacaaaagtgaagaggcttcccttgacctcgtgtttgagctggtgaaccagttgcagtaccacactcaccaagagaacggaattgaaatttgcatggactttctgcaaggcacttgtatttatggcagggattgtttgaagcaccacactgtcttgccatatcattggcagatcaaaaggacaactactcaaaagtggcagagtgtattcaatgattctcaggagcacttggaaagattttactgtaacccagaaaatgatagaatgagaatgaagtatggaggacaagaattttgggcagatttgaatgccatgaacgtgtatgaaacaactgaatttgaccaactacgaaggctgtccacaccaccctctagcaatgtcaactctatttaccacacagtctggaaattcttctgtagggaccactttggatggagagagtatcccgagtctgtcattcgattgattgaagaagccaactctcggggtctgaaagaggttcgatttatgatgtggaataaccactacatcctccacaattcattcttcaggagagagataaaaaggagacccctcttccgctcctgttttatactgcttccatatttacagacacttggtggggttcccacacaagctcctccacctcttgaagcaacttcatcatcacaaattatctgcccagatggggtcacttcagcaaacttttaccctgaaacttgggtttatatgcatccatctcaggacttcatccaagtccctgtttctgcagaggataaaagttatcggatcatttacaatctttttcataagactgtgcctgagtttaaatacagaattttgcagatattgagagtccaaaaccagtttctttgggagaaatataaaaggaaaaaggaatatatgaacaggaaaatgtttggccgtgacaggataataaatgagagacatttatttcatggaacatcccaggatgtggtagatggaatctgcaaacacaactttgaccctcgagtctgtggaaagcatgctacaatgtttggacaaggcagttattttgcaaagaaggcaagctactctcataacttttctaagaagtcctccaaaggagtccacttcatgtttctggccaaagtgctgacgggcagatacacaatgggcagtcatggcatgagaaggcccccgccagtcaatcctggcagtgtcaccagtgacctttatgactcttgtgtggataatttctttgagcctcagatttttgtcatttttaatgatgaccagagttacccttattttgttatccaatatgaagaagtcagtaacactgtttccatttgaaaaatcttggtactgctaaattatttgatatgaactcaatccagcatttgtagcaggttttgaatgggtgggactgggtggggaacagcattggacattaatagggcacttttcagacccattttttaaagtgctagaaaatgctttttttaaaaaaaaaatacaagttttaaaatgaccacttactctttaattatttactaattgctagtgtactcagtgtggaaaagactacagattacacactcttttcattcacacttgtacatatagacagcaatgttattaggagcattaaattaaaaaactgaacagcctaatttaaatgtggcttgggcctggtagaagtttgaccaaatggaatggaggctgtgagcaatgtgaggattctatttatttatttacgtttgataaaacttactggaactagtactaccatgcgtattccctgtccaaagcatcactgctttggtatagtataagttcatgaaattctggtgggtagaaagaaatttttatttctatcagcagtactaaaatgtatcagccaaccagagaacatcagtgactttaacttctgcagagtttgccccagaattcagagttctatttagaggaagttaaaacaacaacaaaaaacaaccatttgaaaaatttttgtcaccagcaaaacttttcactaattagtgatatgaaatgtgatttttgtgttgttaaacttcagctttggaaaactcagtctctttcattatcatccattccaatttgaaggagttgggcagctaatttggttaaaggcagtcttgagggttagaagtattacttccttttcgggttccagacctagcttgtgactgaaagttttagaaaaaggaagtacatctatagccaaattgataaggttattactgtgttttgcacaaagtatattagcaaaagtatttgctggaattattggtagatggcagtcccactcctacacctgctttgtcagatacagctgggttccctggctgactctgtaccttacttacactacttacttaatagaaacacaaacttggaaattgtgccagtggtccagctggagcacaacgtttggtgaatatgctgtttcctcagttcagagaggtagcaactaggtaaactccttataaaaagcaaatacctggatttacaaaagtgaaagtagttgttcacaaaagaattcgccatggaattctttcagttaccaagctctcctggtaatgtttgtggttatatcatttacacaaaacttttcaggaacttctgtgttgtttaagcaagatgtatctgtactgatgtctcagtgaatcagtctgtttattaagcacttatcagggcttccacacacttatttattttgccctagttaatcctgttgtttgctgccattggcatgaaatggccaactgtggctgttacagttctttcattcaattataacttgtaaaccagtgactcctaatctttttcaagttaagacaccttaccattgcttatttggttttatgagacttgttcctttttttctccctaaggaaaaagaaagctttatgacatatttatttttttaataaaactaagcaaaaataaaacttatggtaattctttaaaa

SEQ ID NO: 189748 - DNA, 2150 bp, Homo sapiens
  Payload ID: 17470
  Gene Symbol: TIPARP
  Gene Name: TCDD-inducible poly(ADP-ribose) polymerase
  Uniprot ID: Q7Z3E1
  ENST ID: ENST00000486483
  CDS Start-End: 169-2142
aaaagcataaagaatgtataacaacctaattgttacaagggagtggaattaataatctacaagaaggcacaaaaggacagaaaagaaacagaacaaatgagaaaaatagaaagccaacagtaatatggatttttagactctgaggagcagttggagctaatccacattatggaaatggaaaccaccgaacctgagccagactgtgtagtgcagcctccctctcctcctgatgacttttcatgccaaatgagactctctgagaagatcactccattgaagacttgttttaagaaaaaggatcagaaaagattgggaactggaaccctgaggtctttgaggccaatattaaacactcttctagaatctggctcacttgatggggtttttagatctaggaaccagagtacagatgagaacagcttacatgaacctatgatgaagaaagccatggaaatcaattcatcatgcccaccagcagaaaataatatgtctgttctgattcctgataggacaaatgttggggaccagataccggaagcccatccttccactgaagctccagaacgagtggttccaatccaagatcacagctttccatcagaaaccctcagtgggacggtggcagattccacaccagctcacttccagactgatcttttgcacccagtttcaagtgatgttcctactagtcctgactgcttagacaaagtcatagattatgttccaggcattttccaagaaaacagttttacaatccaatacattctggacaccagtgataagctgagtactgagctctttcaggacaaaagtgaagaggcttcccttgacctcgtgtttgagctggtgaaccagttgcagtaccacactcaccaagagaacggaattgaaatttgcatggactttctgcaaggcacttgtatttatggcagggattgtttgaagcaccacactgtcttgccatatcattggcagatcaaaaggacaactactcaaaagtggcagagtgtattcaatgattctcaggagcacttggaaagattttactgtaacccagaaaatgatagaatgagaatgaagtatggaggacaagaattttgggcagatttgaatgccatgaacgtgtatgaaacaactgaatttgaccaactacgaaggctgtccacaccaccctctagcaatgtcaactctatttaccacacagtctggaaattcttctgtagggaccactttggatggagagagtatcccgagtctgtcattcgattgattgaagaagccaactctcggggtctgaaagaggttcgatttatgatgtggaataaccactacatcctccacaattcattcttcaggagagagataaaaaggagacccctcttccgctcctgttttatactgcttccatatttacagacacttggtggggttcccacacaagctcctccacctcttgaagcaacttcatcatcacaaattatctgcccagatggggtcacttcagcaaacttttaccctgaaacttgggtttatatgcatccatctcaggacttcatccaagtccctgtttctgcagaggataaaagttatcggatcatttacaatctttttcataagactgtgcctgagtttaaatacagaattttgcagatattgagagtccaaaaccagtttctttgggagaaatataaaaggaaaaaggaatatatgaacaggaaaatgtttggccgtgacaggataataaatgagagacatttatttcatggaacatcccaggatgtggtagatggaatctgcaaacacaactttgaccctcgagtctgtggaaagcatgctacaatgtttggacaaggcagttattttgcaaagaaggcaagctactctcataacttttctaagaagtcctccaaaggagtccacttcatgtttctggccaaagtgctgacgggcagatacacaatgggcagtcatggcatgagaaggcccccgccagtcaatcctggcagtgtcaccagtgacctttatgactcttgtgtggataatttctttgagcctcagatttttgtcatttttaatgatgaccagagttacccttattttgttatccaatatgaagaagtcagtaacactgtttccatttgaaaaatctt

SEQ ID NO: 189749 - DNA, 2035 bp, Homo sapiens
  Payload ID: 17470
  Gene Symbol: TIPARP
  Gene Name: TCDD-inducible poly(ADP-ribose) polymerase
  ENST ID: ENST00000481853
  CDS Start-End: 73-2035
caccattcctttctcacctggcacaatctcagatttttagactctgaggagcagttggagctaatccacattatggaaatggaaaccaccgaacctgagccagactgtgtagtgcagcctccctctcctcctgatgacttttcatgccaaatgagactctctgagaagatcactccattgaagacttgttttaagaaaaaggatcagaaaagattgggaactggaaccctgaggtctttgaggccaatattaaacactcttctagaatctggctcacttgatggggtttttagatctaggaaccagagtacagatgagaacagcttacatgaacctatgatgaagaaagccatggaaatcaattcatcatgcccaccagcagaaaataatatgtctgttctgattcctgataggacaaatgttggggaccagataccggaagcccatccttccactgaagctccagaacgagtggttccaatccaagatcacagctttccatcagaaaccctcagtgggacggtggcagattccacaccagctcacttccagactgatcttttgcacccagtttcaagtgatgttcctactagtcctgactgcttagacaaagtcatagattatgttccaggcattttccaagaaaacagttttacaatccaatacattctggacaccagtgataagctgagtactgagctctttcaggacaaaagtgaagaggcttcccttgacctcgtgtttgagctggtgaaccagttgcagtaccacactcaccaagagaacggaattgaaatttgcatggactttctgcaaggcacttgtatttatggcagggattgtttgaagcaccacactgtcttgccatatcattggcagatcaaaaggacaactactcaaaagtggcagagtgtattcaatgattctcaggagcacttggaaagattttactgtaacccagaaaatgatagaatgagaatgaagtatggaggacaagaattttgggcagatttgaatgccatgaacgtgtatgaaacaactgaatttgaccaactacgaaggctgtccacaccaccctctagcaatgtcaactctatttaccacacagtctggaaattcttctgtagggaccactttggatggagagagtatcccgagtctgtcattcgattgattgaagaagccaactctcggggtctgaaagaggttcgatttatgatgtggaataaccactacatcctccacaattcattcttcaggagagagataaaaaggagacccctcttccgctcctgttttatactgcttccatatttacagacacttggtggggttcccacacaagctcctccacctcttgaagcaacttcatcatcacaaattatctgcccagatggggtcacttcagcaaacttttaccctgaaacttgggtttatatgcatccatctcaggacttcatccaagtccctgtttctgcagaggataaaagttatcggatcatttacaatctttttcataagactgtgcctgagtttaaatacagaattttgcagatattgagagtccaaaaccagtttctttgggagaaatataaaaggaaaaaggaatatatgaacaggaaaatgtttggccgtgacaggataataaatgagagacatttatttcatggaacatcccaggatgtggtagatggaatctgcaaacacaactttgaccctcgagtctgtggaaagcatgctacaatgtttggacaaggcagttattttgcaaagaaggcaagctactctcataacttttctaagaagtcctccaaaggagtccacttcatgtttctggccaaagtgctgacgggcagatacacaatgggcagtcatggcatgagaaggcccccgccagtcaatcctggcagtgtcaccagtgacctttatgactcttgtgtggataatttctttgagcctcagatttttgtcatttttaatgatgaccagagttacccttattttgttatccaatatgaagaagtcagtaacactg

SEQ ID NO: 189750 - DNA, 1770 bp, Homo sapiens
  Payload ID: 17470
  Gene Symbol: TIPARP
  Gene Name: TCDD-inducible poly(ADP-ribose) polymerase
  ENST ID: ENST00000473702
  CDS Start-End: 252-1770
agagccgggcggcgcctcagctgcactgcgcggagttggcgcggcccgggaccaggagctgagcaaaccgccgcggccaacaggaggcgtcactcggacccgggctcggcgccggggtgtcgcgcggcggcgggcgggcaggctttggagcggcagttttttcggaaagtgcttttggccgggagtgccgcagaaccccagcgtcacgaggatttttagactctgaggagcagttggagctaatccacattatggaaatggaaaccaccgaacctgagccagactgtgtagtgcagcctccctctcctcctgatgacttttcatgccaaatgagactctctgagaagatcactccattgaagacttgttttaagaaaaaggatcagaaaagattgggaactggaaccctgaggtctttgaggccaatattaaacactcttctagaatctggctcacttgatggggtttttagatctaggaaccagagtacagatgagaacagcttacatgaacctatgatgaagaaagccatggaaatcaattcatcatgcccaccagcagaaaataatatgtctgttctgattcctgataggacaaatgttggggaccagataccggaagcccatccttccactgaagctccagaacgagtggttccaatccaagatcacagctttccatcagaaaccctcagtgggacggtggcagattccacaccagctcacttccagactgatcttttgcacccagtttcaagtgatgttcctactagtcctgactgcttagacaaagtcatagattatgttccaggcattttccaagaaaacagttttacaatccaatacattctggacaccagtgataagctgagtactgagctctttcaggacaaaagtgaagaggcttcccttgacctcgtgtttgagctggtgaaccagttgcagtaccacactcaccaagagaacggaattgaaatttgcatggactttctgcaaggcacttgtatttatggcagggattgtttgaagcaccacactgtcttgccatatcattggcagatcaaaaggacaactactcaaaagtggcagagtgtattcaatgattctcaggagcacttggaaagattttactgtaacccagaaaatgatagaatgagaatgaagtatggaggacaagaattttgggcagatttgaatgccatgaacgtgtatgaaacaactgaatttgaccaactacgaaggctgtccacaccaccctctagcaatgtcaactctatttaccacacagtctggaaattcttctgtagggaccactttggatggagagagtatcccgagtctgtcattcgattgattgaagaagccaactctcggggtctgaaagaggttcgatttatgatgtggaataaccactacatcctccacaattcattcttcaggagagagataaaaaggagacccctcttccgctcctgttttatactgcttccatatttacagacacttggtggggttcccacacaagctcctccacctcttgaagcaacttcatcatcacaaattatctgcccagatggggtcacttcagcaaacttttaccctgaaacttgggtttatatgcatccatctcaggacttcatccaagtccctgtttctgcagaggataaaagttatcggatcatttacaatctttttcataagactgtgcctgagtttaaatacagaattttgcagatattgagagtccaaaaccagtttctttgggagaaat

SEQ ID NO: 189751 - DNA, 2700 bp, Homo sapiens
  Payload ID: 17470
  Gene Symbol: TIPARP
  Gene Name: TCDD-inducible poly(ADP-ribose) polymerase
  ENST ID: ENST00000495891
  CDS Start-End: 1-1081
cacaaacaagctggagcagcccagaggacaagaattttgggcagatttgaatgccatgaacgtgtatgaaacaactgaatttgaccaactacgaaggctgtccacaccaccctctagcaatgtcaactctatttaccacacagtctggaaattcttctgtagggaccactttggatggagagagtatcccgagtctgtcattcgattgattgaagaagccaactctcggggtctgaaagaggttcgatttatgatgtggaataaccactacatcctccacaattcattcttcaggagagagataaaaaggagacccctcttccgctcctgttttatactgcttccatatttacagacacttggtggggttcccacacaagctcctccacctcttgaagcaacttcatcatcacaaattatctgcccagatggggtcacttcagcaaacttttaccctgaaacttgggtttatatgcatccatctcaggacttcatccaagtccctgtttctgcagaggataaaagttatcggatcatttacaatctttttcataagactgtgcctgagtttaaatacagaattttgcagatattgagagtccaaaaccagtttctttgggagaaatataaaaggaaaaaggaatatatgaacaggaaaatgtttggccgtgacaggataataaatgagagacatttatttcatggaacatcccaggatgtggtagatggaatctgcaaacacaactttgaccctcgagtctgtggaaagcatgctacaatgtttggacaaggcagttattttgcaaagaaggcaagctactctcataacttttctaagaagtcctccaaaggagtccacttcatgtttctggccaaagtgctgacgggcagatacacaatgggcagtcatggcatgagaaggcccccgccagtcaatcctggcagtgtcaccagtgacctttatgactcttgtgtggataatttctttgagcctcagatttttgtcatttttaatgatgaccagagttacccttattttgttatccaatatgaagaagtcagtaacactgtttccatttgaaaaatcttggtactgctaaattatttgatatgaactcaatccagcatttgtagcaggttttgaatgggtgggactgggtggggaacagcattggacattaatagggcacttttcagacccattttttaaagtgctagaaaatgctttttttaaaaaaaaaatacaagttttaaaatgaccacttactctttaattatttactaattgctagtgtactcagtgtggaaaagactacagattacacactcttttcattcacacttgtacatatagacagcaatgttattaggagcattaaattaaaaaactgaacagcctaatttaaatgtggcttgggcctggtagaagtttgaccaaatggaatggaggctgtgagcaatgtgaggattctatttatttatttacgtttgataaaacttactggaactagtactaccatgcgtattccctgtccaaagcatcactgctttggtatagtataagttcatgaaattctggtgggtagaaagaaatttttatttctatcagcagtactaaaatgtatcagccaaccagagaacatcagtgactttaacttctgcagagtttgccccagaattcagagttctatttagaggaagttaaaacaacaacaaaaaacaaccatttgaaaaatttttgtcaccagcaaaacttttcactaattagtgatatgaaatgtgatttttgtgttgttaaacttcagctttggaaaactcagtctctttcattatcatccattccaatttgaaggagttgggcagctaatttggttaaaggcagtcttgagggttagaagtattacttccttttcgggttccagacctagcttgtgactgaaagttttagaaaaaggaagtacatctatagccaaattgataaggttattactgtgttttgcacaaagtatattagcaaaagtatttgctggaattattggtagatggcagtcccactcctacacctgctttgtcagatacagctgggttccctggctgactctgtaccttacttacactacttacttaatagaaacacaaacttggaaattgtgccagtggtccagctggagcacaacgtttggtgaatatgctgtttcctcagttcagagaggtagcaactaggtaaactccttataaaaagcaaatacctggatttacaaaagtgaaagtagttgttcacaaaagaattcgccatggaattctttcagttaccaagctctcctggtaatgtttgtggttatatcatttacacaaaacttttcaggaacttctgtgttgtttaagcaagatgtatctgtactgatgtctcagtgaatcagtctgtttattaagcacttatcagggcttccacacacttatttattttgccctagttaatcctgttgtttgctgccattggcatgaaatggccaactgtggctgttacagttctttcattcaattataacttgtaaaccagtgactcctaatctttttcaagttaagacaccttaccattgcttatttggttttatgagacttgttcctttttttctccctaaggaaaaagaaagctttatgacatatttatttttttaataaaactaagcaaaaataaaa

SEQ ID NO: 189752 - DNA, 4181 bp, Homo sapiens
  Payload ID: 17470
  Gene Symbol: TIPARP
  Gene Name: TCDD-inducible poly(ADP-ribose) polymerase
  Uniprot ID: Q7Z3E1
  ENST ID: ENST00000461166
  CDS Start-End: 589-2562
agtgcgagcgccggcctcgcggctccggccccggccccggccccgcgccggcagtgtgcggggctctcgcggatcggggtgattgattttgagactgccctttgtaccgaattcactcgggtcccgtcagcatgaagatggaattggtttacacttcttaggcacttagagcctgtggcaggtgtatacatcagaccgaggcgccgaaggatttagttggggtcgcaggcgcctgccccttccccgttcgtcagggtgggggcgcgtctatgcggcctcccccgcgggccgaccccgggtgctctgaggcgcctaggagcccttcccagaccccgggggggagggcacggcagctacgggagccttccggctaccccgcgtttcgggctgcagcccagaagtttggaagatgttttcacattaactttgagagcgcacaagtcttcgtcttcctccccgccgccgcgggaagcgctcgccgcctttcccccgcgcttcgcggctcagttctgcgagcccccaagacccgttggacgctcctcgggaggatttttagactctgaggagcagttggagctaatccacattatggaaatggaaaccaccgaacctgagccagactgtgtagtgcagcctccctctcctcctgatgacttttcatgccaaatgagactctctgagaagatcactccattgaagacttgttttaagaaaaaggatcagaaaagattgggaactggaaccctgaggtctttgaggccaatattaaacactcttctagaatctggctcacttgatggggtttttagatctaggaaccagagtacagatgagaacagcttacatgaacctatgatgaagaaagccatggaaatcaattcatcatgcccaccagcagaaaataatatgtctgttctgattcctgataggacaaatgttggggaccagataccggaagcccatccttccactgaagctccagaacgagtggttccaatccaagatcacagctttccatcagaaaccctcagtgggacggtggcagattccacaccagctcacttccagactgatcttttgcacccagtttcaagtgatgttcctactagtcctgactgcttagacaaagtcatagattatgttccaggcattttccaagaaaacagttttacaatccaatacattctggacaccagtgataagctgagtactgagctctttcaggacaaaagtgaagaggcttcccttgacctcgtgtttgagctggtgaaccagttgcagtaccacactcaccaagagaacggaattgaaatttgcatggactttctgcaaggcacttgtatttatggcagggattgtttgaagcaccacactgtcttgccatatcattggcagatcaaaaggacaactactcaaaagtggcagagtgtattcaatgattctcaggagcacttggaaagattttactgtaacccagaaaatgatagaatgagaatgaagtatggaggacaagaattttgggcagatttgaatgccatgaacgtgtatgaaacaactgaatttgaccaactacgaaggctgtccacaccaccctctagcaatgtcaactctatttaccacacagtctggaaattcttctgtagggaccactttggatggagagagtatcccgagtctgtcattcgattgattgaagaagccaactctcggggtctgaaagaggttcgatttatgatgtggaataaccactacatcctccacaattcattcttcaggagagagataaaaaggagacccctcttccgctcctgttttatactgcttccatatttacagacacttggtggggttcccacacaagctcctccacctcttgaagcaacttcatcatcacaaattatctgcccagatggggtcacttcagcaaacttttaccctgaaacttgggtttatatgcatccatctcaggacttcatccaagtccctgtttctgcagaggataaaagttatcggatcatttacaatctttttcataagactgtgcctgagtttaaatacagaattttgcagatattgagagtccaaaaccagtttctttgggagaaatataaaaggaaaaaggaatatatgaacaggaaaatgtttggccgtgacaggataataaatgagagacatttatttcatggaacatcccaggatgtggtagatggaatctgcaaacacaactttgaccctcgagtctgtggaaagcatgctacaatgtttggacaaggcagttattttgcaaagaaggcaagctactctcataacttttctaagaagtcctccaaaggagtccacttcatgtttctggccaaagtgctgacgggcagatacacaatgggcagtcatggcatgagaaggcccccgccagtcaatcctggcagtgtcaccagtgacctttatgactcttgtgtggataatttctttgagcctcagatttttgtcatttttaatgatgaccagagttacccttattttgttatccaatatgaagaagtcagtaacactgtttccatttgaaaaatcttggtactgctaaattatttgatatgaactcaatccagcatttgtagcaggttttgaatgggtgggactgggtggggaacagcattggacattaatagggcacttttcagacccattttttaaagtgctagaaaatgctttttttaaaaaaaaaatacaagttttaaaatgaccacttactctttaattatttactaattgctagtgtactcagtgtggaaaagactacagattacacactcttttcattcacacttgtacatatagacagcaatgttattaggagcattaaattaaaaaactgaacagcctaatttaaatgtggcttgggcctggtagaagtttgaccaaatggaatggaggctgtgagcaatgtgaggattctatttatttatttacgtttgataaaacttactggaactagtactaccatgcgtattccctgtccaaagcatcactgctttggtatagtataagttcatgaaattctggtgggtagaaagaaatttttatttctatcagcagtactaaaatgtatcagccaaccagagaacatcagtgactttaacttctgcagagtttgccccagaattcagagttctatttagaggaagttaaaacaacaacaaaaaacaaccatttgaaaaatttttgtcaccagcaaaacttttcactaattagtgatatgaaatgtgatttttgtgttgttaaacttcagctttggaaaactcagtctctttcattatcatccattccaatttgaaggagttgggcagctaatttggttaaaggcagtcttgagggttagaagtattacttccttttcgggttccagacctagcttgtgactgaaagttttagaaaaaggaagtacatctatagccaaattgataaggttattactgtgttttgcacaaagtatattagcaaaagtatttgctggaattattggtagatggcagtcccactcctacacctgctttgtcagatacagctgggttccctggctgactctgtaccttacttacactacttacttaatagaaacacaaacttggaaattgtgccagtggtccagctggagcacaacgtttggtgaatatgctgtttcctcagttcagagaggtagcaactaggtaaactccttataaaaagcaaatacctggatttacaaaagtgaaagtagttgttcacaaaagaattcgccatggaattctttcagttaccaagctctcctggtaatgtttgtggttatatcatttacacaaaacttttcaggaacttctgtgttgtttaagcaagatgtatctgtactgatgtctcagtgaatcagtctgtttattaagcacttatcagggcttccacacacttatttattttgccctagttaatcctgttgtttgctgccattggcatgaaatggccaactgtggctgttacagttctttcattcaattataacttgtaaaccagtgactcctaatctttttcaagttaagacaccttaccattgcttatttggttttatgagacttgttcctttttttctccctaaggaaaaagaaagctttatgacatatttatttttttaataaaactaagcaaaaataaaa

SEQ ID NO: 189753 - DNA, 3681 bp, Homo sapiens
  Payload ID: 17470
  Gene Symbol: TIPARP
  Gene Name: TCDD-inducible poly(ADP-ribose) polymerase
  Uniprot ID: Q7Z3E1
  ENST ID: ENST00000542783
  CDS Start-End: 73-2046
caccattcctttctcacctggcacaatctcagatttttagactctgaggagcagttggagctaatccacattatggaaatggaaaccaccgaacctgagccagactgtgtagtgcagcctccctctcctcctgatgacttttcatgccaaatgagactctctgagaagatcactccattgaagacttgttttaagaaaaaggatcagaaaagattgggaactggaaccctgaggtctttgaggccaatattaaacactcttctagaatctggctcacttgatggggtttttagatctaggaaccagagtacagatgagaacagcttacatgaacctatgatgaagaaagccatggaaatcaattcatcatgcccaccagcagaaaataatatgtctgttctgattcctgataggacaaatgttggggaccagataccggaagcccatccttccactgaagctccagaacgagtggttccaatccaagatcacagctttccatcagaaaccctcagtgggacggtggcagattccacaccagctcacttccagactgatcttttgcacccagtttcaagtgatgttcctactagtcctgactgcttagacaaagtcatagattatgttccaggcattttccaagaaaacagttttacaatccaatacattctggacaccagtgataagctgagtactgagctctttcaggacaaaagtgaagaggcttcccttgacctcgtgtttgagctggtgaaccagttgcagtaccacactcaccaagagaacggaattgaaatttgcatggactttctgcaaggcacttgtatttatggcagggattgtttgaagcaccacactgtcttgccatatcattggcagatcaaaaggacaactactcaaaagtggcagagtgtattcaatgattctcaggagcacttggaaagattttactgtaacccagaaaatgatagaatgagaatgaagtatggaggacaagaattttgggcagatttgaatgccatgaacgtgtatgaaacaactgaatttgaccaactacgaaggctgtccacaccaccctctagcaatgtcaactctatttaccacacagtctggaaattcttctgtagggaccactttggatggagagagtatcccgagtctgtcattcgattgattgaagaagccaactctcggggtctgaaagaggttcgatttatgatgtggaataaccactacatcctccacaattcattcttcaggagagagataaaaaggagacccctcttccgctcctgttttatactgcttccatatttacagacacttggtggggttcccacacaagctcctccacctcttgaagcaacttcatcatcacaaattatctgcccagatggggtcacttcagcaaacttttaccctgaaacttgggtttatatgcatccatctcaggacttcatccaagtccctgtttctgcagaggataaaagttatcggatcatttacaatctttttcataagactgtgcctgagtttaaatacagaattttgcagatattgagagtccaaaaccagtttctttgggagaaatataaaaggaaaaaggaatatatgaacaggaaaatgtttggccgtgacaggataataaatgagagacatttatttcatggaacatcccaggatgtggtagatggaatctgcaaacacaactttgaccctcgagtctgtggaaagcatgctacaatgtttggacaaggcagttattttgcaaagaaggcaagctactctcataacttttctaagaagtcctccaaaggagtccacttcatgtttctggccaaagtgctgacgggcagatacacaatgggcagtcatggcatgagaaggcccccgccagtcaatcctggcagtgtcaccagtgacctttatgactcttgtgtggataatttctttgagcctcagatttttgtcatttttaatgatgaccagagttacccttattttgttatccaatatgaagaagtcagtaacactgtttccatttgaaaaatcttggtactgctaaattatttgatatgaactcaatccagcatttgtagcaggttttgaatgggtgggactgggtggggaacagcattggacattaatagggcacttttcagacccattttttaaagtgctagaaaatgctttttttaaaaaaaaaatacaagttttaaaatgaccacttactctttaattatttactaattgctagtgtactcagtgtggaaaagactacagattacacactcttttcattcacacttgtacatatagacagcaatgttattaggagcattaaattaaaaaactgaacagcctaatttaaatgtggcttgggcctggtagaagtttgaccaaatggaatggaggctgtgagcaatgtgaggattctatttatttatttacgtttgataaaacttactggaactagtactaccatgcgtattccctgtccaaagcatcactgctttggtatagtataagttcatgaaattctggtgggtagaaagaaatttttatttctatcagcagtactaaaatgtatcagccaaccagagaacatcagtgactttaacttctgcagagtttgccccagaattcagagttctatttagaggaagttaaaacaacaacaaaaaacaaccatttgaaaaatttttgtcaccagcaaaacttttcactaattagtgatatgaaatgtgatttttgtgttgttaaacttcagctttggaaaactcagtctctttcattatcatccattccaatttgaaggagttgggcagctaatttggttaaaggcagtcttgagggttagaagtattacttccttttcgggttccagacctagcttgtgactgaaagttttagaaaaaggaagtacatctatagccaaattgataaggttattactgtgttttgcacaaagtatattagcaaaagtatttgctggaattattggtagatggcagtcccactcctacacctgctttgtcagatacagctgggttccctggctgactctgtaccttacttacactacttacttaatagaaacacaaacttggaaattgtgccagtggtccagctggagcacaacgtttggtgaatatgctgtttcctcagttcagagaggtagcaactaggtaaactccttataaaaagcaaatacctggatttacaaaagtgaaagtagttgttcacaaaagaattcgccatggaattctttcagttaccaagctctcctggtaatgtttgtggttatatcatttacacaaaacttttcaggaacttctgtgttgtttaagcaagatgtatctgtactgatgtctcagtgaatcagtctgtttattaagcacttatcagggcttccacacacttatttattttgccctagttaatcctgttgtttgctgccattggcatgaaatggccaactgtggctgttacagttctttcattcaattataacttgtaaaccagtgactcctaatctttttcaagttaagacaccttaccattgcttatttggttttatgagacttgttcctttttttctccctaaggaaaaagaaagctttatgacatatttatttttttaataaaactaagcaaaaataaaacttatggtaattcttt

SEQ ID NO: 189754 - DNA, 3051 bp, Homo sapiens
  Payload ID: 17471
  Gene Symbol: TAGAP
  Gene Name: T-cell activation RhoGTPase activating protein
  Uniprot ID: Q8N103
  ENST ID: ENST00000326965
  CDS Start-End: 700-2361
gacatagctgccctaaaaggaatgaggaagcgagagctctccagtgtctggctggctccgtccgtgtgacagcccatgatgttctttccggtctctgtaatattctgaatttccacctgcccgccccttcgcttataatgcagagcatgtgaagggagaccggctcggtctctctctctcccagtggactagaaggagcagagagttatgctgtttctcccattctttacagctcaccggatgtaaaagaactctggctagagaccctccaaggacagaggcacagccacacgggagtgaaatccacccctggacagtcagccgcaatactgatgaagctgagaagcagccacaatgcttcaaaaacactaaacgccaataatatggagacactaatcgaatgtcaatcagagggtgatatcaaggaacatcccctgttggcatcatgtgagagtgaagacagtatttgccagctcattggacattctcactattctatgccttaaaggcccttcaacggaagggatattcaggagagcagccaacgagaaagcccgtaaggagctgaaggaggagctcaactctggggatgcggtggatctggagaggctccccgtgcacctcctcgctgtggtctttaaggacttcctcagaagtatcccccggaagctactttcaagcgacctctttgaggagtggatgggtgctctggagatgcaggacgaggaggacagaatcgaggccctgaaacaggttgcagataagctcccccggcccaacctcctgctactcaagcacttggtctatgtgctgcacctcatcagcaagaactctgaggtgaacaggatggactccagcaatctggccatctgcattggacccaacatgctcaccctggagaatgaccagagcctgtcatttgaagcccagaaggacctgaacaacaaggtgaagacactggtggaattcctcattgataactgctttgaaatatttggggagaacattccagtgcattccagtatcacttctgatgactccctggagcacactgacagttcagatgtgtcgaccctgcagaatgactcagcctacgacagcaacgaccctgatgtggaatccaacagcagcagtggcatcagctctcccagcaggcagccccaggtgcccatggccacagctgctggcttggatagcgcgggcccacaggatgcccgagaggtcagcccagagcccattgtgagcaccgtggccaggctgaaaagctccctcgcacagcccgataggagatactcagagcccagcatgccatcctcccaggagtgcctcgagagccgggtgacaaaccaaacactaacaaagagtgaaggggacttccccgtgccccgggtaggctctcgtttggaaagtgaggaggctgaagacccatttccagaggaggtcttccctgcagtgcaaggcaaaaccaagaggccggtggacctgaagatcaagaacttggccccgggttcggtgctcccgcgggcactggttctcaaagccttctccagcagctcgctggacgcgtcctctgacagctcgcccgtggcttctccttccagtcccaaaagaaatttcttcagcagacatcagtctttcaccacaaagacagagaaaggcaagcccagccgagaaattaaaaagcactccatgtctttcacctttgcccctcacaaaaaagtgctgaccaaaaacctcagcgcgggctctgggaaatcgcaagactttaccagggaccacgtcccgaggggtgtcagaaaggaaagccagcttgccggccgaatcgtgcaggaaaatgggtgtgaaacccacaaccaaacagcccgcggcttctgcctgagaccccacgccctctcggtggatgatgtgttccagggagctgactgggagaggcctggaagcccaccctcttatgaagaggccatgcagggcccggcagccagactagtggcctccgagagccagaccgtggggagcatgacggtggggagcatgagggcgaggatgctggaggcgcactgcctcctaccccctcttccacctgctcaccacgtagaggactcaagacacaggggcagcaaagagccactccctggccacggactctctcccctgcctgagcgatggaaacagagcagaactgtccatgcttctggggactctctggggcacgtgtctggcccagggagacctgagctcctcccgctgaggaccgtctccgagtccgtgcagaggaataagcgggactgtctcgtgcgacgatgtagccagccggtctttgaggctgaccaattccaatatgccaaagaatcgtatatttaggagggaggccatacgccatgccatagcttgtgctatctgtaaatatgagacttgtaaagaactgcctgtagattgtttttaaaaggtcttgaataagctccttgagaaagttgtggaaagccctcctcagtgaggatagctacaccatggccatggcgcatcagatagtctctgtgtacctggatttgtgcaatatgtaaaaatgtatcaaatgtattatagataaggtgttaggtgcaaaggatgtctaataatccctgcacacgttttgaacttgcagtgaagtacactgctgttccttgcttcctggggcacttttctcttggttagtgtttaaaaattatcttcgcttttttaatgtggcctcaaatgtcatgccaattttcacatcttccacaaactccatttagggagaaatgtttaaatctctggtataagtttactccataccagagtaaactatatattactctatataagcagtcttgcaataactaatcaccaccatagaagaaagaaacagactgcaaggaacagagttgagtgtctggagtcatcaaaggcattaaaaactccagtaaaagctggggccgtagcaaaaatcatgaaaaacacttcaacgtgtcctttcaatcatccaattaaatgtgggtagattaatgaaaatgtattacatcaatattaactcat

SEQ ID NO: 189755 - DNA, 1183 bp, Homo sapiens
  Payload ID: 17471
  Gene Symbol: TAGAP
  Gene Name: T-cell activation RhoGTPase activating protein
  Uniprot ID: Q8N103
  ENST ID: ENST00000338313
  CDS Start-End: 199-999
ataatgcagagcatgtgaagggagaccggctcggtctctctctctcccagtggactagaaggagcagagagttatgctgtttctcccattctttacagctcaccggatgtaaaagaactctggctagagaccctccaaggacagaggcacagccacacgggagtgaaatccacccctggacagtcagccgcaatactgatgaagctgagaagcagccacaatgcttcaaaaacactaaacgccaataatatggagacactaatcgaatgtcaatcagagggtgatatcaaggaacatcccctgttggcatcatgtgagagtgaagacagtatttgccagctcattgaagttaagaagagaaagaaggtgctgtcctggccctttctcatgagaaggctctcccctgcatcagatttttctggggctttggagacagacttgaaagcatcgctatttgatcagcccttgtcaattatctgcggtgacagtgacacactccccagacccatccaggacattctcactattctatgccttaaaggcccttcaacggaagggatattcaggagagcagccaacgagaaagcccgtaaggagctgaaggaggagctcaactctggggatgcggtggatctggagaggctccccgtgcacctcctcgctgtggtctttaaggacttcctcagaagtatcccccggaagctactttcaagcgacctctttgaggagtggatgggtgctctggagatgcaggacgaggaggacagaatcgaggccctgaaacaggttgcagataagctcccccggcccaacctcctgctactcaagcacttggtctatgtgctgcacctcatcagcaagaactctgaggtgaacaggatggactccagcaatctggccatctgcattggacccaacatgctcaccctggagaatgaccagagcctgtcatttgaagcccagaaggacctgaacaacaaggtttgttctgcttactgatgagaaatccccaacttatgatctcaccatctgtttgccaagtccaggcaataaaatgcttcagaatgtctccaactgactcagaatcacagtgaaaatataaaatgcaaaatgcttttgtcatagttccactctctcagatacatgtatctaatgaaactgaataaatccgtgtcttctgtca

SEQ ID NO: 189756 - DNA, 3887 bp, Homo sapiens
  Payload ID: 17471
  Gene Symbol: TAGAP
  Gene Name: T-cell activation RhoGTPase activating protein
  Uniprot ID: Q8N103
  ENST ID: ENST00000367066
  CDS Start-End: 333-2528
gacatagctgccctaaaaggaatgaggaagcgagagctctccagtgtctggctggctccgtccgtgtgacagcccatgatgttctttccggtctctgtaatattctgaatttccacctgcccgccccttcgcttataatgcagagcatgtgaagggagaccggctcggtctctctctctcccagtggactagaaggagcagagagttatgctgtttctcccattctttacagctcaccggatgtaaaagaactctggctagagaccctccaaggacagaggcacagccacacgggagtgaaatccacccctggacagtcagccgcaatactgatgaagctgagaagcagccacaatgcttcaaaaacactaaacgccaataatatggagacactaatcgaatgtcaatcagagggtgatatcaaggaacatcccctgttggcatcatgtgagagtgaagacagtatttgccagctcattgaagttaagaagagaaagaaggtgctgtcctggccctttctcatgagaaggctctcccctgcatcagatttttctggggctttggagacagacttgaaagcatcgctatttgatcagcccttgtcaattatctgcggtgacagtgacacactccccagacccatccaggacattctcactattctatgccttaaaggcccttcaacggaagggatattcaggagagcagccaacgagaaagcccgtaaggagctgaaggaggagctcaactctggggatgcggtggatctggagaggctccccgtgcacctcctcgctgtggtctttaaggacttcctcagaagtatcccccggaagctactttcaagcgacctctttgaggagtggatgggtgctctggagatgcaggacgaggaggacagaatcgaggccctgaaacaggttgcagataagctcccccggcccaacctcctgctactcaagcacttggtctatgtgctgcacctcatcagcaagaactctgaggtgaacaggatggactccagcaatctggccatctgcattggacccaacatgctcaccctggagaatgaccagagcctgtcatttgaagcccagaaggacctgaacaacaaggtgaagacactggtggaattcctcattgataactgctttgaaatatttggggagaacattccagtgcattccagtatcacttctgatgactccctggagcacactgacagttcagatgtgtcgaccctgcagaatgactcagcctacgacagcaacgaccctgatgtggaatccaacagcagcagtggcatcagctctcccagcaggcagccccaggtgcccatggccacagctgctggcttggatagcgcgggcccacaggatgcccgagaggtcagcccagagcccattgtgagcaccgtggccaggctgaaaagctccctcgcacagcccgataggagatactcagagcccagcatgccatcctcccaggagtgcctcgagagccgggtgacaaaccaaacactaacaaagagtgaaggggacttccccgtgccccgggtaggctctcgtttggaaagtgaggaggctgaagacccatttccagaggaggtcttccctgcagtgcaaggcaaaaccaagaggccggtggacctgaagatcaagaacttggccccgggttcggtgctcccgcgggcactggttctcaaagccttctccagcagctcgctggacgcgtcctctgacagctcgcccgtggcttctccttccagtcccaaaagaaatttcttcagcagacatcagtctttcaccacaaagacagagaaaggcaagcccagccgagaaattaaaaagcactccatgtctttcacctttgcccctcacaaaaaagtgctgaccaaaaacctcagcgcgggctctgggaaatcgcaagactttaccagggaccacgtcccgaggggtgtcagaaaggaaagccagcttgccggccgaatcgtgcaggaaaatgggtgtgaaacccacaaccaaacagcccgcggcttctgcctgagaccccacgccctctcggtggatgatgtgttccagggagctgactgggagaggcctggaagcccaccctcttatgaagaggccatgcagggcccggcagccagactagtggcctccgagagccagaccgtggggagcatgacggtggggagcatgagggcgaggatgctggaggcgcactgcctcctaccccctcttccacctgctcaccacgtagaggactcaagacacaggggcagcaaagagccactccctggccacggactctctcccctgcctgagcgatggaaacagagcagaactgtccatgcttctggggactctctggggcacgtgtctggcccagggagacctgagctcctcccgctgaggaccgtctccgagtccgtgcagaggaataagcgggactgtctcgtgcgacgatgtagccagccggtctttgaggctgaccaattccaatatgccaaagaatcgtatatttaggagggaggccatacgccatgccatagcttgtgctatctgtaaatatgagacttgtaaagaactgcctgtagattgtttttaaaaggtcttgaataagctccttgagaaagttgtggaaagccctcctcagtgaggatagctacaccatggccatggcgcatcagatagtctctgtgtacctggatttgtgcaatatgtaaaaatgtatcaaatgtattatagataaggtgttaggtgcaaaggatgtctaataatccctgcacacgttttgaacttgcagtgaagtacactgctgttccttgcttcctggggcacttttctcttggttagtgtttaaaaattatcttcgcttttttaatgtggcctcaaatgtcatgccaattttcacatcttccacaaactccatttagggagaaatgtttaaatctctggtataagtttactccataccagagtaaactatatattactctatataagcagtcttgcaataactaatcaccaccatagaagaaagaaacagactgcaaggaacagagttgagtgtctggagtcatcaaaggcattaaaaactccagtaaaagctggggccgtagcaaaaatcatgaaaaacacttcaacgtgtcctttcaatcatccaattaaatgtgggtagattaatgaaaatgtattacatcaatattaactcatctatagcactttgagtatctttgtagttcatgatatcctatcctataatgtggaggtaaatgattttatatgcattgggggtcatatataaaacttcaatgtaatttcactacaataaattgccttccttatttgaaagtaaaaatgttctttttttattgacatgttaactcctttccctcaattaatagaaatccactaagaaaatcattcacatattggttcactcaacaagcatttattaaatatatattcactattctagactaatagcaagaccggggatcttgtttaggaagaagcagtccctgttctccagaatttgcaaaaccattaaaaaagcacctactttaagccattttttttcagcaaggagtcattctgccagaaaaatgtagtacacaaatacaggataatataacaaatgtaaaatttctcatttctagtgaattaaactttccagtaattttacatctcacctcattcttatgatgctcagtttgcttaattattggcaaacataatggtaaaatgtttgtactgtattagagctttactgttcgattattaagatatttatccagtatcttagagatgctggacttcaattttccttattttatctttttaaaataaaatatcatgcatgcttctgatttgttatagaaa

SEQ ID NO: 189757 - DNA, 5001 bp, Homo sapiens
  Payload ID: 17472
  Gene Symbol: TAL1
  Gene Name: T-cell acute lymphocytic leukemia 1
  Uniprot ID: P17542
  ENST ID: ENST00000294339
  CDS Start-End: 578-1573
gcccgggactatcccttcgcggtgtagcggcagccggagacctggctgaggaggcaaccgcgtagacacctccctgcttagaaaacaaacactgaaccagaccgatcccagttggagggttcgaaaatgttccagacagcctgtcgggaggggttgttgttgctgttggactaaatagctattcctgattggtcatgtatagggttttttaaggcgggtggggggaggagggggtagaggaaaggctccaaacacctgcaggttgggggcggaaagctgtttgcgattccctggactggttggtcggggacaggaggtaattcccagccattgacccccatttctctctctccctccctcttgccctgcctctttctctccacccctatctttcctggaaactcgctttgggcgcggcagatcgcccaggaccacaccgcagcgtaactgcaggcctctcagcgaaaaagggggaaagcaaagacccgggtgtgcatcctcttcctcggcttccgcccctttccggcggagtggagatcctattcagaggggccggtctctctaaatatgccccaggatgaccgagcggccgccgagcgaggcggctcgcagtgacccccagctagagggacgggacgcggccgaggccagcatggcccccccgcacctggtcctgctgaacggcgtcgccaaggagacgagccgcgcggccgcagcggagcccccagtcatcgaactgggcgcgcgcggaggcccggggggcggccctgccggtgggggcggcgccgcgagagacttaaagggccgcgacgcggcgacggccgaagcgcgccatcgggtgcccaccaccgagctgtgcagacctcccgggcccgccccggcccccgcgcccgcctcggttacagcggagctgcccggcgacggccgcatggtgcagctgagtcctcccgcgctggctgcccccgccgcccccggccgcgcgctgctctacagcctcagccagccgctggcctctctcggcagcgggttctttggggagccggatgccttccctatgttcaccaccaacaatcgagtgaagaggagaccttccccctatgagatggagattactgatggtccccacaccaaagttgtgcggcgtatcttcaccaacagccgggagcgatggcggcagcagaatgtgaacggggcctttgccgagctccgcaagctgatccccacacatcccccggacaagaagctcagcaagaatgagatcctccgcctggccatgaagtatatcaacttcttggccaagctgctcaatgaccaggaggaggagggcacccagcgggccaagactggcaaggaccctgtggtgggggctggtgggggtggaggtgggggagggggcggcgcgcccccagatgacctcctgcaagacgtgctttcccccaactccagctgcggcagctccctggatggggcagccagcccggacagctacacggaggagcccgcgcccaagcacacggcccgcagcctccatcctgccatgctgcctgccgccgatggagccggccctcggtgatgggtctgggccaccaggatcagccaggagggcgttcttaggctgctgggatggtgggcttcagggcaggtggggtgagaattgggcggctctgaagcaaggcggtggacttgaactttcctggatgtctgaactttgggaagcctttactgaccctggggctggcttttctgtttcctgtaccagtaggagatcagaaaaatggagcaaagtggtaggtactttttgtgaagacggcacggtcttccctcttccctcagtcccaaatccttcccaagtaagaggctggagttgtcactgcttttggcctggagtttgggatccctgtctttcctaagacctggggttgtcagctctcatctgaggcatccagcagtctctgccttgcctttagcccctcccaagctggctggggtggcctgtgtggccacttctgtccatatttataggtacccaatagctgcccatttcgtgagccccatcttcacccaggcctatgttgatccatccagcttgccagatgctgcagagtcacaagcctcgaggtgccttcttcagggcctggttgaagaagatgatcagtggacagtctgctctagatgagctgggccggagggtcaggaaacccagtcgcccttacttcttgccctggggatcaaagttctgctttctccccaatgagacttgccttcctaagcctgtggctgtggagacaatgtctgcagccctgagaaagccctgtcgggctttgtgtgaaggcagagaaagggacaatgatagtagagtgatatggagcaagagatattttgggcatgtgggcttcaactcctcgacatcactgttcatgctggcgagtgaatgccagtgtgctgatgggcgtacgctggtgctgagtagatgcgcagccccatctgtgcattctcctggatgcttagagggatttctttgctgtaagatgtctgtttgctgatggtctggtctatgttccgaattgagcacaaaacctgtcctatgaatgctttgcatttggaatttttgcttgacttcagttattggtggaatctttagcgctcaataggaccaggatccagcctcacttctagggtatgggaaatccaatcagagaccaggccctggctaagacccaaacatatgcacattcacttagcagaaccttaaacacccctcagttgtgcagcttttggtcatcaagggtgcgtctgggaggttggtttaatgcaatagaagtgctcccctctgaaagttgtacatgaaatttttgtaaatcacatccttatccttcatcttttaaagaaataaccactgcaagtccttttgtaaagtgaagaatccttttgtagaatgaaccactgccccttcattgatttcctgtgtcaatccagatggtgggatgtggttttcttaaggtgaggcctgtctgtgacctgcatctaagcccatgggacaaattgcacagaagtcctgtatgtctgtcattgtacccttaagtcaccctagccctctccctctaggctctgccttcgaggtcagaggagagatagcctgtggccctgtcctgccatgcaagaactcatcactgtggctgtctggaaagcccccccttatagtttgggcttcagcctagtggcttgtcctcaccatgatggggccctaattcagccatgtacagacagagaatatgtctgctcctttccccttccttttaagtaaggtccaattctcgagcttggggcaacattgttcacctttgtagcactcaggctctccattcaatttcaggctccccagatcatgttttggtgaaaattagggttggttcctttccaacgtttggaagatcctgtgaggagccccatctgtctaaagatagagtcattgctgtaggatctaaggctgtttgcttcaccgtggattcgcttgagttaggaatgagaagtagccacagtatggatgggtggatgggttttatgagatggatcacatattttattaagaactcaaacttctggctccctcttctttcagacttgccatgtgactctggcttggcctatctcctagggctatggtgtggactgaatgggatcatgaaagtagacagttttgagaacgtaaagaactttttcttttccctcaatctcaatcctgcagtggggtttcgcagcctgagtccacgacctaggcagtaggccggtgtgcctgactgcccagcatttgggtaatttagattgtaaaccgctttggcctgagttattgagattgtcctcatttctccagattatctatttgtgtgtgtgtgtgtgtgtgtgtgagagacggtgtcttgttctgtcactcaggctggagtacagtggtgccatcattgctgtctgcagccttgaactctgggctcaagcaatcctctcacctcagcctcccgagtagggaggaccacaggtgtgagccaccacacctggctaatttttacttttttttttttttggtagagatggagtcttgctatattgcccaggctggtcttgaagtcctggcttcaggcaattctcctgcctttgcctccagaagcactgggatcacaggtgtcagccattgcacccagcccagattgtcttaatttctatcttgttccaaggccagggacagtaataagaatggaaaagagatatgggaacactggcagactgtgtaaaatgtaatgcaactacccaaaacaagcctggtaggaaagggcaagtctttaggtctttgtaagaactaaagaagatctgtaatttttattttcaccctctgtaccccatgaccttatccttcctctccttccttgttacccatgaaaaactggcaacattccaagaatagcatctgtacaaaggggaaagaacataaaggtaaaacaaaacaaaacaacattttgagaacaaagatgaccataaccactgaagggaatcacatcttttaagacaaattcatattcttttatttgttatggcagatgacaagatggtacaacctttattcttttccaaaataaaacaaagggcacagcatctgtagtcagccgacaactatttcggccttttgggggtgggtctggccgtacttgtgatttcgatggtacgtgaccctctgctgaagacttgccccctgcccgtgtacatagtgcattgtttctgtgggcgggcccagcactttccgtcaacgttgtactgtatgtgatgaattgcgttggtctctgcatttttctgcagaagaggagtaaccgctccaggtaccttgacctttgtacagcccagaggccaacactgtgggtgtgtgactctttagcaaaaaaaacccatgtggtgatgatgtgtatatatatgtgaggatgtatcgggaagatttctaaataaaagttttacaaaggg

SEQ ID NO: 189758 - DNA, 4642 bp, Homo sapiens
  Payload ID: 17472
  Gene Symbol: TAL1
  Gene Name: T-cell acute lymphocytic leukemia 1
  Uniprot ID: P17542
  ENST ID: ENST00000371884
  CDS Start-End: 217-1212
cgttttcttcgttgcgtacgattgtgctccgttggtgttctcagcagggatctgattctatcgcccaggaccacaccgcagcgtaactgcaggcctctcagcgaaaaagggggaaagcaaagacccgggtgtgcatcctcttcctcggcttccgcccctttccggcggagtggagatcctattcagaggggccggtctctctaaatatgccccaggatgaccgagcggccgccgagcgaggcggctcgcagtgacccccagctagagggacgggacgcggccgaggccagcatggcccccccgcacctggtcctgctgaacggcgtcgccaaggagacgagccgcgcggccgcagcggagcccccagtcatcgaactgggcgcgcgcggaggcccggggggcggccctgccggtgggggcggcgccgcgagagacttaaagggccgcgacgcggcgacggccgaagcgcgccatcgggtgcccaccaccgagctgtgcagacctcccgggcccgccccggcccccgcgcccgcctcggttacagcggagctgcccggcgacggccgcatggtgcagctgagtcctcccgcgctggctgcccccgccgcccccggccgcgcgctgctctacagcctcagccagccgctggcctctctcggcagcgggttctttggggagccggatgccttccctatgttcaccaccaacaatcgagtgaagaggagaccttccccctatgagatggagattactgatggtccccacaccaaagttgtgcggcgtatcttcaccaacagccgggagcgatggcggcagcagaatgtgaacggggcctttgccgagctccgcaagctgatccccacacatcccccggacaagaagctcagcaagaatgagatcctccgcctggccatgaagtatatcaacttcttggccaagctgctcaatgaccaggaggaggagggcacccagcgggccaagactggcaaggaccctgtggtgggggctggtgggggtggaggtgggggagggggcggcgcgcccccagatgacctcctgcaagacgtgctttcccccaactccagctgcggcagctccctggatggggcagccagcccggacagctacacggaggagcccgcgcccaagcacacggcccgcagcctccatcctgccatgctgcctgccgccgatggagccggccctcggtgatgggtctgggccaccaggatcagccaggagggcgttcttaggctgctgggatggtgggcttcagggcaggtggggtgagaattgggcggctctgaagcaaggcggtggacttgaactttcctggatgtctgaactttgggaagcctttactgaccctggggctggcttttctgtttcctgtaccagtaggagatcagaaaaatggagcaaagtggtaggtactttttgtgaagacggcacggtcttccctcttccctcagtcccaaatccttcccaagtaagaggctggagttgtcactgcttttggcctggagtttgggatccctgtctttcctaagacctggggttgtcagctctcatctgaggcatccagcagtctctgccttgcctttagcccctcccaagctggctggggtggcctgtgtggccacttctgtccatatttataggtacccaatagctgcccatttcgtgagccccatcttcacccaggcctatgttgatccatccagcttgccagatgctgcagagtcacaagcctcgaggtgccttcttcagggcctggttgaagaagatgatcagtggacagtctgctctagatgagctgggccggagggtcaggaaacccagtcgcccttacttcttgccctggggatcaaagttctgctttctccccaatgagacttgccttcctaagcctgtggctgtggagacaatgtctgcagccctgagaaagccctgtcgggctttgtgtgaaggcagagaaagggacaatgatagtagagtgatatggagcaagagatattttgggcatgtgggcttcaactcctcgacatcactgttcatgctggcgagtgaatgccagtgtgctgatgggcgtacgctggtgctgagtagatgcgcagccccatctgtgcattctcctggatgcttagagggatttctttgctgtaagatgtctgtttgctgatggtctggtctatgttccgaattgagcacaaaacctgtcctatgaatgctttgcatttggaatttttgcttgacttcagttattggtggaatctttagcgctcaataggaccaggatccagcctcacttctagggtatgggaaatccaatcagagaccaggccctggctaagacccaaacatatgcacattcacttagcagaaccttaaacacccctcagttgtgcagcttttggtcatcaagggtgcgtctgggaggttggtttaatgcaatagaagtgctcccctctgaaagttgtacatgaaatttttgtaaatcacatccttatccttcatcttttaaagaaataaccactgcaagtccttttgtaaagtgaagaatccttttgtagaatgaaccactgccccttcattgatttcctgtgtcaatccagatggtgggatgtggttttcttaaggtgaggcctgtctgtgacctgcatctaagcccatgggacaaattgcacagaagtcctgtatgtctgtcattgtacccttaagtcaccctagccctctccctctaggctctgccttcgaggtcagaggagagatagcctgtggccctgtcctgccatgcaagaactcatcactgtggctgtctggaaagcccccccttatagtttgggcttcagcctagtggcttgtcctcaccatgatggggccctaattcagccatgtacagacagagaatatgtctgctcctttccccttccttttaagtaaggtccaattctcgagcttggggcaacattgttcacctttgtagcactcaggctctccattcaatttcaggctccccagatcatgttttggtgaaaattagggttggttcctttccaacgtttggaagatcctgtgaggagccccatctgtctaaagatagagtcattgctgtaggatctaaggctgtttgcttcaccgtggattcgcttgagttaggaatgagaagtagccacagtatggatgggtggatgggttttatgagatggatcacatattttattaagaactcaaacttctggctccctcttctttcagacttgccatgtgactctggcttggcctatctcctagggctatggtgtggactgaatgggatcatgaaagtagacagttttgagaacgtaaagaactttttcttttccctcaatctcaatcctgcagtggggtttcgcagcctgagtccacgacctaggcagtaggccggtgtgcctgactgcccagcatttgggtaatttagattgtaaaccgctttggcctgagttattgagattgtcctcatttctccagattatctatttgtgtgtgtgtgtgtgtgtgtgtgagagacggtgtcttgttctgtcactcaggctggagtacagtggtgccatcattgctgtctgcagccttgaactctgggctcaagcaatcctctcacctcagcctcccgagtagggaggaccacaggtgtgagccaccacacctggctaatttttacttttttttttttttggtagagatggagtcttgctatattgcccaggctggtcttgaagtcctggcttcaggcaattctcctgcctttgcctccagaagcactgggatcacaggtgtcagccattgcacccagcccagattgtcttaatttctatcttgttccaaggccagggacagtaataagaatggaaaagagatatgggaacactggcagactgtgtaaaatgtaatgcaactacccaaaacaagcctggtaggaaagggcaagtctttaggtctttgtaagaactaaagaagatctgtaatttttattttcaccctctgtaccccatgaccttatccttcctctccttccttgttacccatgaaaaactggcaacattccaagaatagcatctgtacaaaggggaaagaacataaaggtaaaacaaaacaaaacaacattttgagaacaaagatgaccataaccactgaagggaatcacatcttttaagacaaattcatattcttttatttgttatggcagatgacaagatggtacaacctttattcttttccaaaataaaacaaagggcacagcatctgtagtcagccgacaactatttcggccttttgggggtgggtctggccgtacttgtgatttcgatggtacgtgaccctctgctgaagacttgccccctgcccgtgtacatagtgcattgtttctgtgggcgggcccagcactttccgtcaacgttgtactgtatgtgatgaattgcgttggtctctgcatttttctgcagaagaggagtaaccgctccaggtaccttgacctttgtacagcccagaggccaacactgtgggtgtgtgactctttagcaaaaaaaacccatgtggtgatgatgtgtatatatatgtgaggatgtatcgggaagatttctaaataaaagttttacaaaggggc

SEQ ID NO: 189759 - DNA, 656 bp, Homo sapiens
  Payload ID: 17473
  Gene Symbol: TAL2
  Gene Name: T-cell acute lymphocytic leukemia 2
  Uniprot ID: Q16559
  ENST ID: ENST00000334077
  CDS Start-End: 41-367
ccctgagggccctttctctttccatctcaggaactcaaacatgaccaggaagatcttcacaaataccagggagcggtggaggcagcagaatgtcaacagcgcctttgccaagctgaggaagctcatccccactcaccctccagacaaaaagctgagcaaaaatgaaacgcttcgcctggcaatgaggtatatcaacttcttggtcaaggtcttgggggagcaaagcctgcaacaaacgggagtggctgctcaggggaacattctggggctcttccctcaaggaccccacctgccaggcctggaggacagaactctgcttgagaactaccaggttccttcacctggtccaagccaccacattccttagtgtggctctggctgtcatctcccagggcagcacttgcccagaaatcactgcctgtggacagacttttgcatgttccagagttgacctgatgataactcgtgaagcatgaattctagcttcctgggaggtggctcagagacagctgcagggagctgaaagaagccatgaggaatgtcacttgtgggccgccaccccccagggatgtcaggtagagcggcctacctctgcctattttaaatccaggttctgcataagacttttggagaaaaaattctaaataaaaaaaaaa

SEQ ID NO: 189760 - DNA, 1369 bp, Homo sapiens
  Payload ID: 17474
  Gene Symbol: TIMD4
  Gene Name: T-cell immunoglobulin and mucin domain containing 4
  Uniprot ID: Q96H15
  ENST ID: ENST00000274532
  CDS Start-End: 58-1194
ataagaggttgggctttggatagatagacagactcctgggtccggtcaaccgtcaaaatgtccaaagaacctctcattctctggctgatgattgagttttggtggctttacctgacaccagtcacttcagagactgttgtgacggaggttttgggtcaccgggtgactttgccctgtctgtactcatcctggtctcacaacagcaacagcatgtgctgggggaaagaccagtgcccctactccggttgcaaggaggcgctcatccgcactgatggaatgagggtgacctcaagaaagtcagcaaaatatagacttcaggggactatcccgagaggtgatgtctccttgaccatcttaaaccccagtgaaagtgacagcggtgtgtactgctgccgcatagaagtgcctggctggttcaacgatgtaaagataaacgtgcgcctgaatctacagagagcctcaacaaccacgcacagaacagcaaccaccaccacacgcagaacaacaacaacaagccccaccaccacccgacaaatgacaacaaccccagctgcacttccaacaacagtcgtgaccacacccgatctcacaaccggaacaccactccagatgacaaccattgccgtcttcacaacagcaaacacgtgcctttcactaaccccaagcacccttccggaggaagccacaggtcttctgactcccgagccttctaaggaagggcccatcctcactgcagaatcagaaactgtcctccccagtgattcctggagtagtgttgagtctacttctgctgacactgtcctgctgacatccaaagagtccaaagtttgggatctcccatcaacatcccacgtgtcaatgtggaaaacgagtgattctgtgtcttctcctcagcctggagcatctgatacagcagttcctgagcagaacaaaacaacaaaaacaggacagatggatggaatacccatgtcaatgaagaatgaaatgcccatctcccaactactgatgatcatcgccccctccttgggatttgtgctcttcgcattgtttgtggcgtttctcctgagagggaaactcatggaaacctattgttcgcagaaacacacaaggctagactacattggagatagtaaaaatgtcctcaatgacgtgcagcatggaagggaagacgaagacggcctttttaccctctaacaacgcagtagcatgttagattgaggatgggggcatgacactccagtgtcaaaataagtcttagtagatttccttgtttcataaaaaagactcacttattccatggatgtcattgatccaggcttgctttagtttcatgaatgaagggtactttagagaccacaacttctctgtc

SEQ ID NO: 189761 - DNA, 581 bp, Homo sapiens
  Payload ID: 17474
  Gene Symbol: TIMD4
  Gene Name: T-cell immunoglobulin and mucin domain containing 4
  ENST ID: ENST00000406964
  CDS Start-End: 237-479
gtgttctagaatccctggtttccttctatctacctaatctgcgtgaaatgtgacagtatctcaccatttctttctctttctgaaccacattgggtgccaacagaacttgctctctgttctctttcaaaattaccaacatggaccccacccaattcttcccttggaactaaggaacgcctgactgatcatctgatacagcagttcctgagcagaacaaaacaacaaaaacaggacagatggatggaatacccatgtcaatgaagaatgaaatgcccatctcccaactactgatgatcatcgccccctccttgggatttgtgctcttcgcattgtttgtggcgtttctcctgagagggaaactcatggaaacctattgttcgcagaaacacacaaggctagactacattggagatagtaaaaatgtcctcaatgacgtgcagcatggaagggaagacgaagacggcctttttaccctctaacaacgcagtagcatgttagattgaggatgggggcatgacactccagtgtcaaaataagtcttagtagatttccttgtttcataaaaaagactcacttattcc

SEQ ID NO: 189762 - DNA, 1145 bp, Homo sapiens
  Payload ID: 17474
  Gene Symbol: TIMD4
  Gene Name: T-cell immunoglobulin and mucin domain containing 4
  Uniprot ID: Q96H15
  ENST ID: ENST00000407087
  CDS Start-End: 25-1077
tcctgggtccggtcaaccgtcaaaatgtccaaagaacctctcattctctggctgatgattgagttttggtggctttacctgacaccagtcacttcagagactgttgtgacggaggttttgggtcaccgggtgactttgccctgtctgtactcatcctggtctcacaacagcaacagcatgtgctgggggaaagaccagtgcccctactccggttgcaaggaggcgctcatccgcactgatggaatgagggtgacctcaagaaagtcagcaaaatatagacttcaggggactatcccgagaggtgatgtctccttgaccatcttaaaccccagtgaaagtgacagcggtgtgtactgctgccgcatagaagtgcctggctggttcaacgatgtaaagataaacgtgcgcctgaatctacagagagcctcaacaaccacgcacagaacagcaaccaccaccacacgcagaacaacaacaacaagccccaccaccacccgacaaatgacaacaaccccagctgcacttccaacaacagtcgtgaccacacccgatctcacaaccggaacaccactccagatgacaaccattgccgtcttcacaacagcaaacacgtgcctttcactaaccccaagcacccttccggaggaagccacaggtcttctgactcccgagccttctaaggaagggcccatcctcactgcagaatcagaaactgtcctccccagtgattcctggagtagtgttgagtctacttctgctgacactgtcctgctgacatccaaagcatctgatacagcagttcctgagcagaacaaaacaacaaaaacaggacagatggatggaatacccatgtcaatgaagaatgaaatgcccatctcccaactactgatgatcatcgccccctccttgggatttgtgctcttcgcattgtttgtggcgtttctcctgagagggaaactcatggaaacctattgttcgcagaaacacacaaggctagactacattggagatagtaaaaatgtcctcaatgacgtgcagcatggaagggaagacgaagacggcctttttaccctctaacaacgcagtagcatgttagattgaggatgggggcatgacactccagtgtcaaaataagtcttagtaga

SEQ ID NO: 189763 - DNA, 2906 bp, Homo sapiens
  Payload ID: 17475
  Gene Symbol: TLX1
  Gene Name: T-cell leukemia homeobox 1
  Uniprot ID: P31314
  ENST ID: ENST00000370196
  CDS Start-End: 1038-2030
cctctttcgaaccctgtaggattttacttcttgacgcatctgtttatttaaaaccaaaggggtatgttgaggcatgggcaccctggcagcagaccccaaaccaaccctcttgacttgtgcctgcctttcaggatatgttcccttcctgaatttgtctaagaaggctgagttggggggtggttgctgatttttataacatatagccagttgttcataggcctgtgttttaaagaagggcaagcctgaactcaccgtcctgcctcagggcctgggctccatacctggggagtagacagtcttctactttctaaaaagctggacttgaaatttggagtaaatctcctggttgagtgacaggtgtttcgcagctgagcccttgaggagattctccagttgggcagagacatcccttcctcagacgccttgtgggctggactcctttggcccagttcaaagtgaggggagggctcccaacaggccgggaagacagttgacttcaccctccttgggtttgtctgtctgtccgtctctgggaatggtcgcttcctgttttcccttttccttttaagcctcgccttgttcccctcttctctctcttcatgaactactccgagtcttggtctccgtccctctatctctggctcctgcatctgtctcggcttctggccttcctctccccctcccctcccctccctcgcgctgtcattcaccccgctcctctccgcgcacagccaatggagagacccagtcgaaaccgcgaagctctcttgcaccgggctttttcgcctggtgattgatgtcccagagtcaacagcgagcgagcagccggagcggggaagcagaagccagagaggggaagaatacggcgccccctctctccctcccctcccccttctactttagcctttctgcgcacttcgcttccaagtctccgcgcagccaggagccgctgttgcctcccagcccctgctagctgccccccgagccgagcgcagcgagcgccgccgcccgggccccccggtggggccagggccagcatggagcacctgggtccgcaccacctccacccgggtcacgcagagcccattagcttcggcatcgaccagatcctcaacagcccggaccagggtggctgcatgggacccgcctcgcgcctccaggacggagaatacggccttggctgcttggtcggaggcgcctacacttacggcggcgggggctccgcggccgcgacgggggctggaggagcgggggcctatggtactggaggtcccggcggccccggaggcccggcaggcggcggcggcgcctgcagcatgggtcctctgaccggctcctacaacgtgaacatggccttggcaggcggccccggtcctggcggcggcggcggcagcagcggcggtgccggggcactcagcgctgcgggggtaatccgggtgccggcacacaggccgctcgccggagccgtggcccacccccagcccctggccaccggcttgcccaccgtgccctctgtgcctgccatgccgggcgtcaacaacctcactggcctcaccttcccctggatggagagtaaccgcagatacacaaaggacaggttcacaggtcacccctatcagaaccggacgccccccaagaagaagaagccgcgcacgtccttcacacgcctgcagatctgcgagctggagaagcgcttccaccgccagaagtacctggcctcggccgagcgcgccgccctggccaaggcgctcaaaatgaccgatgcgcaggtcaaaacctggttccagaaccggcggacaaagtggagacggcagactgcggaggaacgggaggccgagaggcagcaagcgaaccgcatcctcctgcagttgcagcaggaggccttccagaagagcctggcacagccgctgcccgctgaccctctgtgcgtgcacaactcgtcgctcttcgccctgcagaatctgcagccgtggtctgacgactcgaccaaaatcactagcgtcacgtcggtggcgtcggcctgcgagtgagcctgcccattctgccctgtgggaccccaggcccactcaggggtcactgaggcctgagacccaggactcctccccaccctcctggcctcagactgcacccaggaggggaacactgccctcgcacggccccgaagggcccccacatttgtgccgacactgttctcccttcggtggaagagctcaagggacaaggacacgcgcccccctcccagaggcgtcccgcacctgtctgaactgttaagaaatctgtttttgtttatttcattttattttaatttttaacgtgggattcagagaaaggcaagggaggtaagggaggaggagcttctggggtccccagggctgtcatctgaatttgccctgggaaaccccttctctgtgacccacttctcatcacacacatggaaacccataggcccacacacaggtggtgtcactgtccctcctggtgtcaccccagagccacacatgggcatctatgggagagtgtcaaccagacagagggtcacagtgtttacactttggaccttacgatcaggcacaggtcaggggtgacacagactcatcctgaacagcatggcactccctccagcacaaacacaaggtcatggccacactgtgacacactacaccacacacaacagccaacagctacaacagcctcacttggtctgccaggcccccaccacacatcccagcccaatccaggtacgcacagacaggttttcacataaatgcagcccatttctccagaacccatttgaggggtgggggggtgttaatttatgcacttataaggtgttttctgtgtaaccattttataaagtgcttgtgtaatttatgtgaaaaaaataaataaaagcctccggatccgga

SEQ ID NO: 189764 - DNA, 469 bp, Homo sapiens
  Payload ID: 17475
  Gene Symbol: TLX1
  Gene Name: T-cell leukemia homeobox 1
  ENST ID: ENST00000463716
  CDS Start-End: 1-469
gcggccgcgacgggggctggaggagcgggggcctatggtactggaggtcccggcggccccggaggcccggcaggcggcggcggcgcctgcagcatgggtcctctgaccggctcctacaacgtgaacatggccttggcaggcggccccggtcctggcggcggcggcggcagcagcggcggtgccggggcactcagcgctgcgggggtaatccgggtgccggcacacaggccgctcgccggagccgtggcccacccccagcccctggccaccggcttgcccaccgtgccctctgtgcctgccatgccgggcgtcaacaacctcactggcctcaccttcccctggatggagagtaaccgcagatacacaaaggacaggttcacagtggccctctcacccttcactgtaacacgccgtataggtcacccctatcagaaccggacgccccccaagaagaagaagccgcgcacgt

SEQ ID NO: 189765 - DNA, 1838 bp, Homo sapiens
  Payload ID: 17475
  Gene Symbol: TLX1
  Gene Name: T-cell leukemia homeobox 1
  Uniprot ID: P31314
  ENST ID: ENST00000467928
  CDS Start-End: 239-1012
tcccagagtcaacagcgagcgagcagccggagcggggaagcagaagccagagaggggaagaatacggcgccccctctctccctcccctcccccttctactttagcctttctgcgcacttcgcttccaagtctccgcgcagccaggagccgctgttgcctcccagcccctgctagctgccccccgagccgagcgcagcgagcgccgccgcccgggccccccggtggggccagggccagcatggagcacctgggtccgcaccacctccacccgggtcacgcagagcccattagcttcggcatcgaccagatcctcaacagcccggaccagggtggctgcatgggacccgcctcgcgcctccaggacggagaatacggccttggctgcttggtcggaggcgcctacacttacggcggcgggggctccgcggccgcgacgggggctggaggagcgggggcctatggtactggaggtcccggcggccccggaggcccggcaggcggcggcggcgcctgcagcatgggtcctctgaccggctcctacaacgtgaacatggccttggcaggcggccccggtcctggcggcggcggcggcagcagcggcggtgccggggcactcagcgctgcgggggtaatccgggtgccggcacacaggccgctcgccggagccgtggcccacccccagcccctggccaccggcttgcccaccgtgccctctgtgcctgccatgccgggcgtcaacaacctcactggcctcaccttcccctggatggagagtaaccgcagatacacaaaggacaggttcacaggtcacccctatcagaaccggacgccccccaagaagaagaagccgcgcacgtccttcacacgcctgcagatctgcgagctggagaagcgcttccaccgccagaagtacctggcctcggccgagcgcgccgccctggccaaggcgctcaaaatgaccgatgcgcaggtcaaaacctggttccagaaccggcggacaaagtggaggtaacggcttgttcccggtgcagacggcagactgcggaggaacgggaggccgagaggcagcaagcgaaccgcatcctcctgcagttgcagcaggaggccttccagaagagcctggcacagccgctgcccgctgaccctctgtgcgtgcacaactcgtcgctcttcgccctgcagaatctgcagccgtggtctgacgactcgaccaaaatcactagcgtcacgtcggtggcgtcggcctgcgagtgagcctgcccattctgccctgtgggaccccaggcccactcaggggtcactgaggcctgagacccaggactcctccccaccctcctggcctcagactgcacccaggaggggaacactgccctcgcacggccccgaagggcccccacatttgtgccgacactgttctcccttcggtggaagagctcaagggacaaggacacgcgcccccctcccagaggcgtcccgcacctgtctgaactgttaagaaatctgtttttgtttatttcattttattttaatttttaacgtgggattcagagaaaggcaagggaggtaagggaggaggagcttctggggtccccagggctgtcatctgaatttgccctgggaaaccccttctctgtgacccacttctcatcacacacatggaaacccataggcccacacacaggtggtgtcactgtccctcctggtgtcaccccagagccacacatgggcatctatgggagagtgtcaaccagacagagggtcacagtgtttacactttggaccttacgatcaggcacaggtcaggggtgacacagactcatcctgaacagcatggcact

SEQ ID NO: 189766 - DNA, 2136 bp, Homo sapiens
  Payload ID: 17476
  Gene Symbol: TLX2
  Gene Name: T-cell leukemia homeobox 2
  Uniprot ID: O43763
  ENST ID: ENST00000233638
  CDS Start-End: 324-1178
ccacccgggacttgggcagcggcgccggcagcccagcgtctatttgcgcttaagagccagcaaggaagctccaggggccccagctggccgtgctcccccgggatgcaagtccctgcgctgacgcccggcagcggctggcacgggcgcggctgctccgggtgcacagggatgctgctgtttcggggaccccggcgccctgccttggccagccccgcgggcccctgaggccactctccggagcgcgccgccgctgggcttctggcgctgcctgaggcatcctccccaaccaccgaacctccggcggttctcctcggcccagaccgatggagccggggatgctgggtccacacaacctcccacaccacgagccaatcagcttcggcatcgatcagatcctgagcggccccgaaaccccagggggcggtctaggcctgggtcgcgggggccagggtcatggggagaatggggcgttctcgggtggataccacggagcctcgggctacggtcccgccggctcacttgccccgctgcccggcagctccggagtgggcccaggcggcgtgatccgcgtccctgcgcaccgcccgctgcctgtgccgccgcccgctgggggggcgcctgcagtgcctgggccctcgggtttgggcggcgccggaggcctagcgggactcaccttcccctggatggacagcggccgccgctttgccaaggaccggctcacggctgcgctctcgcccttctctgggacgcgccgcataggccacccctaccaaaaccggacccctccgaagcggaagaagccgcgcacgtccttctcccgctcacaggtgctggagttggagcggcgcttcctgcgccagaagtacctggcctctgcggagagggcggcgctggccaaggccttgcgcatgaccgacgcacaggtcaaaacgtggttccagaaccgacgcaccaagtggcggcgccagacggcggaggagcgcgaggccgagcggcaccgcgcgggccggctgctcctgcatctgcagcaggacgcgttgccacggccgctgcggccgccgctgcccccggaccctctctgcctgcacaactcgtcgctcttcgcgctgcagaacctgcagccctgggccgaggacaacaaagtggcttcagtgtccgggctcgcctcggtggtgtgagcgacgcccgtccgatcggcgtggagcgccgggcccggagcggtggagcgcgcggctgcctgcgtccatggtctagtggcagccgggcgcgtgaggagcggcaggccttgaggctgtcgtcgagggctcctccaccaccggccggctcccaagccagcgttgcgcagatgcacggccagctcagaggcggcctttcccgccatttttcacttcactgccgttacgccctcgctggaacctgaggcgccgagagggcgggacctgcaggacagtagccaatgaggtgcggggagggggccgggctggccaatgggagctgctttcctgagggactcgaaattctccggcgggtggtcgggagctggggctctgaggggctctagcggcgttgcgcgcggtgccggctgggtctgtaccaaaggtgtgaaggaaagaagacaccgaccacggcgaagcaatagagggggtgctggagcgcgagaggctggctgattgtgaccgaaaccagagggttgtccaccccgggcatctcatccctcaactgtaaaataatcgctaaggattccttcctgactttgagcctcacgttgtcatgtgtgttcagcctgctggccacatcctccggcaacacgcccgggcaggaggcgagtcggatacttacacacccaacgaaagagaaaatctggctccggtgtcacatagggacagagaagggagaggaggaaacagtggacaaagttaatgggcccagtggagttagggtgaagagaatttggaaaataatttggaagtgacaagcttaagaagaatcaaaggtaattccaagactggaaatgtgcagcatcaggaaatcaatggtgctgtggatgatgaaagggaaattgggaagactggagcaaaattaactgtataggcaaaactaaatgttatacctagagagaataaatcctggagaagt

SEQ ID NO: 189767 - DNA, 1452 bp, Homo sapiens
  Payload ID: 17476
  Gene Symbol: TLX2
  Gene Name: T-cell leukemia homeobox 2
  ENST ID: ENST00000621092
  CDS Start-End: 415-1122
gtaaaatgtttatgggaaacaaggcggccaggatccaaccaaggcctcagtgaggtcccacgtgtcccccgtggcgagatttcgccctcccgccgttgaggaggaagagtgtgagaacagacttcctaggcacagaatggaggggcagagtcctgcattgaggactccctgcacttggggtccggggctcaccgggcgccgttccccagccgcttcttacgcagccgggaaaccacaacgagatttggtcttcgagagcatttaggcggggaccacaacgaatccgggagttggccagaaggatccatcgagaggcgaagagtgggggctgggggaggaggcacctgcggaggaagccggtgaggcggaggcagcccaaaggcggaggccgcccaaaggcggaggccagcaaggatggaggcgcgctgcgctctcgcccttctctgggacgcgccgcataggccacccctaccaaaaccggacccctccgaagcggaagaagccgcgcacgtccttctcccgctcacaggtgctggagttggagcggcgcttcctgcgccagaagtacctggcctctgcggagagggcggcgctggccaaggccttgcgcatgaccgacgcacaggtcaaaacgtggttccagaaccgacgcaccaagtggcggcgccagacggcggaggagcgcgaggccgagcggcaccgcgcgggccggctgctcctgcatctgcagcaggacgcgttgccacggccgctgcggccgccgctgcccccggaccctctctgcctgcacaactcgtcgctcttcgcgctgcagaacctgcagccctgggccgaggacaacaaagtggcttcagtgtccgggctcgcctcggtggtgtgagcgacgcccgtccgatcggcgtggagcgccgggcccggagcggtggagcgcgcggctgcctgcgtccatggtctagtggcagccgggcgcgtgaggagcggcaggccttgaggctgtcgtcgagggctcctccaccaccggccggctcccaagccagcgttgcgcagatgcacggccagctcagaggcggcctttcccgccatttttcacttcactgccgttacgccctcgctggaacctgaggcgccgagagggcgggacctgcaggacagtagccaatgaggtgcggggagggggccgggctggccaatgggagctgctttcctgagggactcgaaattctccggcgggtggtcgggagctggggctctgaggggctctagcggcgttgcgcgcggtgccggctgggtctgtaccaaaggtgtgaaggaaagaagacaccgaccacggcgaagcaatagagggggtgctggagcgcgagaggctggctgattgtgaccgaaaccagagggttgtccaccccgggcatctcatccctcaactgtaaaataatcgctaaggattccttcctg

SEQ ID NO: 189768 - DNA, 1493 bp, Homo sapiens
  Payload ID: 17477
  Gene Symbol: TLX3
  Gene Name: T-cell leukemia homeobox 3
  Uniprot ID: O43711
  ENST ID: ENST00000296921
  CDS Start-End: 83-958
gccgggcgctccatggccgcgccgtaacggggacccagccgcctccccgcccagcccagcccagcccttccgcccgcccaggatggaggcgcccgccagcgcgcagaccccgcacccgcacgagcccatcagcttcggcatcgaccagatccttaacagcccggaccaggacagcgcacccgccccgcggggccccgacggcgccagctacctgggagggccccccgggggccgtccgggcgccacatacccgtctctgcccgcctcctttgcgggcctcggcgcgcccttcgaggacgcgggatcttacagtgtgaacctgagcctagcgcccgcaggcgtgatccgggtgccggcgcacaggccgctgcccggggccgtgccaccgcctctgccaagcgcgctacccgccatgccctccgtgcccacggtctccagccttggcggtctcaatttcccctggatggagagcagccgccgcttcgtgaaagaccgcttcacagcggcggccgcactcacgcccttcaccgtgacccggcgcatcggccacccctaccagaaccggacgccgcccaagcgtaagaagccgcgcacgtccttttcccgggtgcagatctgcgagctggaaaagcgcttccatcgccagaagtacctggcctctgccgagagggcggcgctcgccaagtccctcaaaatgacggacgcgcaggtcaagacctggttccaaaaccggaggaccaagtggcggcggcagacggcggaggagcgggaggcggagcggcagcaggcgagccggctcatgctgcagctgcaacacgacgccttccaaaagagcctcaacgactccatccagcctgacccgctctgtctgcacaactcgtcactctttgctctgcagaatctgcagccctgggaggaggatagttccaaggttcccgctgtcacctccctggtgtgagcccaccagcgcgcaccgtcgccacggatcgccgcccccacccagccgggcgccccggaccccccaggcgggctgcgggggaaccggcgccgagaggggaaggggccgcctagcccgagtaggccccagggcgcggccacagactggcgggccgcggaagggggtagggcccgagctccgcgcggccgcacaatccgagcccccgccccgcgccccgtcccgccccaggcccgggcctgacaagaaagcgccttacgtttctccgccccccgcccgcaccccccgggccgggcgcctgtattatactttgtacttttgcccaaacgtgtaaataataaaaaagttttggcttttttctttagaaaccggccacctgcttcccccgcgggggccgctggaggaagggcagccgacccggccgctgggggaagtgccaggggcccggggcaccctgcgtttaggctgggtccactcttcttcttttccgttccttttatttaagtctttttatttaataaaaaagttagctatttca

SEQ ID NO: 189769 - DNA, 2146 bp, Homo sapiens
  Payload ID: 17478
  Gene Symbol: TCTA
  Gene Name: T-cell leukemia translocation altered
  Uniprot ID: P57738
  ENST ID: ENST00000273590
  CDS Start-End: 222-533
tactcccggagtcactcatcccttaagcaagcagggtggggttaggtgcgcgtgcgcggttttaatactcctccccgaactgccaactcttcacgcacgcgaagtaggccccaccctggctgggtttacgcgtgcgcactaacgggcctggtcccggaagaccacacgcgtgcgtggtggggactacggtgacagtaccccgggtggggcgagggccagtcatggcggagtcctggtctgggcaggccttgcaggctctgccggccacggtgctgggcgcgctgggcagcgagttcttgcgggagtgggaggcgcaggacatgcgcgtgaccctcttcaagctgctgctgctgtggttggtgttaagtctcctgggcatccagctggcgtgggggttctacgggaatacagtgaccgggttgtatcaccgtccaggtctgggtggtcagaatggatccacgcctgatggctccacgcatttcccttcgtgggaaatggcagcaaacgaacctctcaaaacccacagagaataagggaaggcagcagagggtctccaagggcatcactgggtctgctggcttctacactgggttctgctactccccagacctcagggacaactgccgggggttcagggttggtagcagggagtacccagtgcctacagggctgggcctcttctgcctcttaagcctgctccctcacccaggcactgggcaagtgaagagtttgcctgtactcttatctgggtgccttaaggagagagattgtgttcttcctctctcaggggtgataactcaggaagcctctgggttgggaagaccatcagttcttttgtcttaggtttcttttcctgtccctcttccatccccaagatgtgaccccataaaaatttttcctgagttggccaggcatggtggctcacgcctgtaatcccaacactttgggaggctgaggcaggcagatcacgaggtcaggagttcgagaccagcctgaccaacatggtgaaaaccccatctctactaaaaatacaaaaattagccgggtgtggtggcacacaccagtaatcccagctactcaggaggctgaagcaggagatttgcttgaacctgggaggcagaggttgcagtgagccaagattgcgccgttgtactccagcctgggcaacagagcaagacccatctcaaaaaaaaaatttttttcctgagaggaagcctgaggttgaccagctctggggtttgtaaggcaggtctgttttctcctaggccctgagttttctgaatctctggttttgctttgttggcaaggagccagggaatcctgacctgagccagaccttaagctctatggttatttagctggccattcaggtataaggcagggtggtgtacctgctggcactatccagatggaggcaccaaacacccacatacctggcccaaccagacttctcccgtgagccaggcaaaggaaattgtcatctgccaactgtcctactcatattcctctcagtccttcttgggggtaagctgattacctgaaggacagctgaacccctggggtagcctcctatccaccactgcttaagtgcctatgggaatgtgggtctgcaccttgtcccctcataggatggtaccaagcatttagtgcacagtggccccatcatagcctgcagcctcatcatttcccatctggacctggtacaaatgcacgtcacaggctcagctcctccccactagcattttctctaccttcaagaaccaggcagccctgccatgtcacaataggccaggggagtttccaaagatgtgggtggcaaatgcccctatagaaacaccagtacctgaaagcactgtagccctggacctgcctccttccctcggggccatacttctgtttccatctgctgggccaccagccactttagtgacccctgcctacttccttcctgttggatatcatacttccatctggctgcctttgcttaagccatctttgtggtagaggggccctggaattgcagctgtactgaggatgatgttattcacagcccctggcccacccactaatactactgcacagagtcaggatctcacatttcaccccaggctcaactgaggatgtggcttattaaacacggaagtgc

SEQ ID NO: 189770 - DNA, 1395 bp, Homo sapiens
  Payload ID: 17479
  Gene Symbol: TCL1A
  Gene Name: T-cell leukemia/lymphoma 1A
  Uniprot ID: P56279
  ENST ID: ENST00000402399
  CDS Start-End: 131-475
gtcctcccgccccgccgcttggtggcggccgcatgctgcccggatataaagggtcggccccacatcccagggaccagcgagcggccttgagaggctctggctcttgcttcttaggcggcccgaggacgccatggccgagtgcccgacactcggggaggcagtcaccgaccacccggaccgcctgtgggcctgggagaagttcgtgtatttggacgagaagcagcacgcctggctgcccttaaccatcgagataaaggataggttacagttacgggtgctcttgcgtcgggaagacgtcgtcctggggaggcctatgacccccacccagataggcccaagcctgctgcctatcatgtggcagctctaccctgatggacgataccgatcctcagactccagtttctggcgcttagtgtaccacatcaagattgacggcgtggaggacatgcttctcgagctgctgccagatgactgatgtatggtcttggcagcacctgtctcctttcaccccagggcctgagcctggccagcctacaatggggatgttgtgtttctgttcaccttcgtttactatgcctgtgtcttctccaccacgctggggtctgggaggaatggacagacagaggatgagctctacccagggcctgcaggacctgcctgtagcccactctgctcgccttagcactaccactcctgccaaggaggattccatttggcagagcttcttccaggtgcccagctatacctgtgcctcggcttttctcagctggatgatggtcttcagcctctttctgtcccttctgtccctcacagcactagtatttcatgttgcacacccactcagctccgtgaacttgtgagaacacagccgattcacctgagcaggacctctgaaaccctggaccagtggtctcacatggtgctacgcctgcatgtaaacacgcctgcaaacgctgcctgccggtaaacacgcctgcaaacgctgcctgcccgtaaacacgcctgcaaacgctgcctgcccacacaggttcacgtgcagctcaaggaaaggcctgaaaggagcccttatctgtgctcaggactcagaagcctctgggtcagtggtccacatcccgggacgcagcaggaggccaggccggcgagccctgtggatgagccctcagaacccttggcttgcccacgtggaaaagggatagaggttgggtttccccccttttatagatggtcacgcacctgggtgttacaaagttgtatgtggcatgaatactttttgtaatgattgattaaatgcaagatagtttatctaacttcgtgcggaatcagcttctatccttgacttagattctggtggagagaagtgagaataggcagcccccaaataaaaaatattcatgg

SEQ ID NO: 189771 - DNA, 717 bp, Homo sapiens
  Payload ID: 17479
  Gene Symbol: TCL1A
  Gene Name: T-cell leukemia/lymphoma 1A
  Uniprot ID: P56279
  ENST ID: ENST00000555202
  CDS Start-End: 65-409
ccagggaccagcgagcggccttgagaggctctggctcttgcttcttaggcggcccgaggacgccatggccgagtgcccgacactcggggaggcagtcaccgaccacccggaccgcctgtgggcctgggagaagttcgtgtatttggacgagaagcagcacgcctggctgcccttaaccatcgagataaaggataggttacagttacgggtgctcttgcgtcgggaagacgtcgtcctggggaggcctatgacccccacccagataggcccaagcctgctgcctatcatgtggcagctctaccctgatggacgataccgatcctcagactccagtttctggcgcttagtgtaccacatcaagattgacggcgtggaggacatgcttctcgagctgctgccagatgactgatgtatggtgagctccactggagcctgacccctcttagtccacagtggctgtatcagaaagaaagaccaccccttctccatgaaggcagtgctaacccctccccgactgctgccatctgagggtccctagggatgggagaggcttcctggaggcactcatgtctcccttaccacttcgggagccaagggctttgtaggcagccccctttatcgcagctgctcatatctataaagtacttcacaagtttcagctggcactttcatttaccattgcttttttttttttttgagatgagtctggctctgtgg

SEQ ID NO: 189772 - DNA, 872 bp, Homo sapiens
  Payload ID: 17479
  Gene Symbol: TCL1A
  Gene Name: T-cell leukemia/lymphoma 1A
  Uniprot ID: P56279
  ENST ID: ENST00000556450
  CDS Start-End: 33-377
ggctcttgcttcttaggcggcccgaggacgccatggccgagtgcccgacactcggggaggcagtcaccgaccacccggaccgcctgtgggcctgggagaagttcgtgtatttggacgagaagcagcacgcctggctgcccttaaccatcgagataaaggataggttacagttacgggtgctcttgcgtcgggaagacgtcgtcctggggaggcctatgacccccacccagataggcccaagcctgctgcctatcatgtggcagctctaccctgatggacgataccgatcctcagactccagtttctggcgcttagtgtaccacatcaagattgacggcgtggaggacatgcttctcgagctgctgccagatgactgatcactagtatttcatgttgcacacccactcagctccgtgaacttgtgagaacacagccgattcacctgagcaggacctctgaaaccctggaccagtggtctcacatggtgctacgcctgcatgtaaacacgcctgcaaacgctgcctgccggtaaacacgcctgcaaacgctgcctgcccgtaaacacgcctgcaaacgctgcctgcccacacaggttcacgtgcagctcaaggaaaggcctgaaaggagcccttatctgtgctcaggactcagaagcctctgggtcagtggtccacatcccgggacgcagcaggaggccaggccggcgagccctgtggatgagccctcagaacccttggcttgcccacgtggaaaagggatagaggttgggtttccccccttttatagatggtcacgcacctgggtgttacaaagttgtatgtggcatgaatactttttgtaatgattgattaaatgcaagatagtttatctaa

SEQ ID NO: 189773 - DNA, 913 bp, Homo sapiens
  Payload ID: 17479
  Gene Symbol: TCL1A
  Gene Name: T-cell leukemia/lymphoma 1A
  ENST ID: ENST00000554119
  CDS Start-End: 24-164
ttcttaggcggcccgaggacgccatggccgagtgcccgacactcggggaggcagtcaccgaccacccggaccgcctgtgggcctgggagaagttcgtgtatttggacgagaagcagcacgcctggctgcccttaaccatcgagatacagggtctcgctctgtgacccaggctggtcttaaactcctggcctcaagcgatcctcctgcctctgccttccaaagcactggaattacaagtgtgagccgctgcaacccgccagaaaaaagtgtgcctttcatggccctgtctgggtggctagacacgtgtgtgtgctggtggtcctggcccagccagagtccctgagaggagcatgcatggcctaaggaagtgagcttcagggaacagtgatgaccatcatttcacactcggacccctgcccagatgggtggatggctggcaggagggattccggttttctgcgcctggagaagccctggcaagcggaacctgaaagtatgccctgtccttttcttctcctcagataaaggataggttacagttacgggtgctcttgcgtcgggaagacgtcgtcctggggaggcctatgacccccacccagataggcccaagcctgctgcctatcatgtggcagctctaccctgatggacgataccgatcctcagactccagtttctggcgcttagtgtaccacatcaaggtcttggcagcacctgtctcctttcaccccagggcctgagcctggccagcctacaatggggatgttgtgtttctgttcaccttcgtttactatgcctgtgtcttctccaccacgctggggtctgggaggaatggacagacagaggatgagctctacccagggcctgcaggacctgcctgtagcccactctgctcgccttagcactaccactcctg

SEQ ID NO: 189774 - DNA, 882 bp, Homo sapiens
  Payload ID: 17479
  Gene Symbol: TCL1A
  Gene Name: T-cell leukemia/lymphoma 1A
  ENST ID: ENST00000556156
  CDS Start-End: 39-179
ggctctggctcttgcttcttaggcggcccgaggacgccatggccgagtgcccgacactcggggaggcagtcaccgaccacccggaccgcctgtgggcctgggagaagttcgtgtatttggacgagaagcagcacgcctggctgcccttaaccatcgagatacagggtctcgctctgtgacccaggctggtcttaaactcctggcctcaagcgatcctcctgcctctgccttccaaagcactggaattacaagtgtgagccgctgcaacccgccagaaaaaagtgtgcctttcatggccctgtctgggtggctagacacgtgtgtgtgctggtggtcctggcccagccagagtccctgagaggagcatgcatggcctaaggaagtgagcttcagggaacagtgatgaccatcatttcacactcggacccctgcccagatgggtggatggctggcaggagggattccggttttctgcgcctggagaagccctggcaagcggaacctgaaagtatgccctgtccttttcttctcctcagataaaggataggttacagttacgggtgctcttgcgtcgggaagacgtcgtcctggggaggcctatgacccccacccagataggcccaagcctgctgcctatcatgtggcagctctaccctgatggacgataccgatcctcagactccagtttctggcgcttagtgtaccacatcaagattgacggcgtggaggacatgcttctcgagctgctgccagatgactgatgtatggtcttggcagcacctgtctcctttcaccccagggcctgagcctggccagcctacaatggggatgttgtgtttctgttcaccttcgtttactatgcctgtgtcttctccaccacgc

SEQ ID NO: 189775 - DNA, 1391 bp, Homo sapiens
  Payload ID: 17479
  Gene Symbol: TCL1A
  Gene Name: T-cell leukemia/lymphoma 1A
  Uniprot ID: P56279
  ENST ID: ENST00000554012
  CDS Start-End: 131-475
gtcctcccgccccgccgcttggtggcggccgcatgctgcccggatataaagggtcggccccacatcccagggaccagcgagcggccttgagaggctctggctcttgcttcttaggcggcccgaggacgccatggccgagtgcccgacactcggggaggcagtcaccgaccacccggaccgcctgtgggcctgggagaagttcgtgtatttggacgagaagcagcacgcctggctgcccttaaccatcgagataaaggataggttacagttacgggtgctcttgcgtcgggaagacgtcgtcctggggaggcctatgacccccacccagataggcccaagcctgctgcctatcatgtggcagctctaccctgatggacgataccgatcctcagactccagtttctggcgcttagtgtaccacatcaagattgacggcgtggaggacatgcttctcgagctgctgccagatgactgatgtcttggcagcacctgtctcctttcaccccagggcctgagcctggccagcctacaatggggatgttgtgtttctgttcaccttcgtttactatgcctgtgtcttctccaccacgctggggtctgggaggaatggacagacagaggatgagctctacccagggcctgcaggacctgcctgtagcccactctgctcgccttagcactaccactcctgccaaggaggattccatttggcagagcttcttccaggtgcccagctatacctgtgcctcggcttttctcagctggatgatggtcttcagcctctttctgtcccttctgtccctcacagcactagtatttcatgttgcacacccactcagctccgtgaacttgtgagaacacagccgattcacctgagcaggacctctgaaaccctggaccagtggtctcacatggtgctacgcctgcatgtaaacacgcctgcaaacgctgcctgccggtaaacacgcctgcaaacgctgcctgcccgtaaacacgcctgcaaacgctgcctgcccacacaggttcacgtgcagctcaaggaaaggcctgaaaggagcccttatctgtgctcaggactcagaagcctctgggtcagtggtccacatcccgggacgcagcaggaggccaggccggcgagccctgtggatgagccctcagaacccttggcttgcccacgtggaaaagggatagaggttgggtttccccccttttatagatggtcacgcacctgggtgttacaaagttgtatgtggcatgaatactttttgtaatgattgattaaatgcaagatagtttatctaacttcgtgcggaatcagcttctatccttgacttagattctggtggagagaagtgagaataggcagcccccaaataaaaaatattcatgga

SEQ ID NO: 189776 - DNA, 813 bp, Homo sapiens
  Payload ID: 17479
  Gene Symbol: TCL1A
  Gene Name: T-cell leukemia/lymphoma 1A
  ENST ID: ENST00000555886
  CDS Start-End: 62-202
gggaccagcgagcggccttgagaggctctggctcttgcttcttaggcggcccgaggacgccatggccgagtgcccgacactcggggaggcagtcaccgaccacccggaccgcctgtgggcctgggagaagttcgtgtatttggacgagaagcagcacgcctggctgcccttaaccatcgagatacagggtctcgctctgtgacccaggctggtcttaaactcctggcctcaagcgatcctcctgcctctgccttccaaagcactggaattacaagtgtgagccgctgcaacccgccagaaaaaagtgtgcctttcatggccctgtctgggtggctagacacgtgtgtgtgctggtggtcctggcccagccagagtccctgagaggagcatgcatggcctaaggaaataaaggataggttacagttacgggtgctcttgcgtcgggaagacgtcgtcctggggaggcctatgacccccacccagataggcccaagcctgctgcctatcatgtggcagctctaccctgatggacgataccgatcctcagactccagtttctggcgcttagtgtaccacatcaagattgacggcgtggaggacatgcttctcgagctgctgccagatgactgatgtatggtcttggcagcacctgtctcctttcaccccagggcctgagcctggccagcctacaatggggatgttgtgtttctgttcaccttcgtttactatgcctgtgtcttctccaccacgctggggtctgggaggaatggacagacagaggatgagctctacccagggcctgcaggacctgcc

SEQ ID NO: 189777 - DNA, 980 bp, Homo sapiens
  Payload ID: 17479
  Gene Symbol: TCL1A
  Gene Name: T-cell leukemia/lymphoma 1A
  ENST ID: ENST00000557043
  CDS Start-End: 107-268
cgatcctcctgcctctgccttccaaagcactggaattacaagtataaaggataggttacagttacgggtgctcttgcgtcgggaagacgtcgtcctggggaggcctatgacccccacccagataggcccaagcctgctgcctatcatgtggcagctctaccctgatggacgataccgatcctcagactccagtttctggcgcttagtgtaccacatcaagattgacggcgtggaggacatgcttctcgagctgctgccagatgactgatgtatggtcttggcagcacctgtctcctttcaccccagggcctgagcctggccagcctacaatggggatgttgtgtttctgttcaccttcgtttactatgcctgtgtcttctccaccacgctggggtctgggaggaatggacagacagaggatgagctctacccagggcctgcaggacctgcctgtagcccactctgctcgccttagcactaccactcctgccaaggaggattccatttggcagagcttcttccaggtgcccagctatacctgtgcctcggcttttctcagctggatgatggtcttcagcctctttctgtcccttctgtccctcacagcactagtatttcatgttgcacacccactcagctccgtgaacttgtgagaacacagccgattcacctgagcaggacctctgaaaccctggaccagtggtctcacatggtgctacgcctgcatgtaaacacgcctgcaaacgctgcctgccggtaaacacgcctgcaaacgctgcctgcccgtaaacacgcctgcaaacgctgcctgcccacacaggttcacgtgcagctcaaggaaaggcctgaaaggagcccttatctgtgctcaggactcagaagcctctgggtcagtggtccacatcccgggacgcagcaggaggccaggccggcgagccctgtggatgagccctcagaacccttggcttgcccacgtggaa

SEQ ID NO: 189778 - DNA, 1166 bp, Homo sapiens
  Payload ID: 17480
  Gene Symbol: TCL1B
  Gene Name: T-cell leukemia/lymphoma 1B
  Uniprot ID: O95988
  ENST ID: ENST00000340722
  CDS Start-End: 52-438
tggaaagctacacgtgtgagcctagaggcgggtcccggttgcagacttgccatggcctccgaagcttctgtgcgtctaggggtgccccctggccgtctgtggatccagaggcctggcatctacgaagatgaggaggggagaacctgggtgactgtggtcgtgcggttcaatccctcgcgtagggaatgggccagggcctcccagggcagcagatatgaacccagcatcacagtgcacttgtggcagatggcagtgcatacccgggagctactctcctccggccagatgcccttctcccagctgcccgccgtgtggcagctctaccccgggaggaagtaccgagcagcggattccagtttctgggaaatagcagaccatggccagattgactctatggagcagctggtcctaacatatcagccggagaggaaagactgacactgggagtggctggccctgctggccctgcctcttctggcctggtgtctcctcatgccccctcagtgaggatcttcatgtacctgctcttctgtttgcacacccagcatagcctccttgcaggcagaaggcagtagggcccctgcacactcagtttctctcgttttccttagttatcagtcctgtcctgtcccactcaggtctgtacttagggcagctggcctggatgggcttcactggggccctgtctgtgtgctgagccagtttcccctgctggctgcaagctgtgggttctttctcctctgtgcccctcatgctgatcttctagatgccactcccaaatccccttcatacccaccaggatgtgtgcccagccaggcctccagcacccccagtgcagctcgtgattggaaactcaccatcggcaggcagtggttcggtttaagagatggcattagagggagcccagtctggatgtggacttggatgccctgtgggtatcagttctgctgacactttggcccgaaatagatccagtgctgagcaagcaatgtacaccagagcctcagtgagcccatctgcacagtggggagcatggagggatgggtttggcctgtgcttctgcttattcagtccttcagctcacggaagggatgctagtccgtgaaggtgacctcacagtactggttaattaaactttattgctcactgtccacttttgtgctgaa

SEQ ID NO: 189779 - DNA, 7200 bp, Homo sapiens
  Payload ID: 17481
  Gene Symbol: TIAM1
  Gene Name: T-cell lymphoma invasion and metastasis 1
  Uniprot ID: Q13009
  ENST ID: ENST00000286827
  CDS Start-End: 473-5248
gccccgcatcgtgcccggccccgtcgcggagatcccggacgaccgtcgcgggttgatggtcgcattccagatgtaaacagcttcagaagcctgacggtcatatggtagaatcactgtggactgagacccacctttctagacctgaagcccaggaggaggaagaggaggctggttggtaccatgggcataatgctctgaatcctagtctctcacctagtatgtgagcagtccctgcagatggcccatttggagatcttgacaaagcctcttctgtttccaatggggtttttggcgcattctcacagacttagatgaaactgtgatggccaccgcagggggcaggtgctgacatcgtccccagccctgtggctgttcatccggacatcatttccaacctcaatatctaaatgccacagtgctcttggagcaagttgggctggggaccactgttgccttttaagaccataaaaccatgggaaacgcagaaagtcaacatgtagagcacgagttttatggagaaaagcatgccagcctggggcgcaagcacacttcccgctccctgcgcctctcgcacaagacgcggaggaccaggcacgcttcctcggggaaggtgatccacaggaactccgaagtgagcacccgatccagcagcacccccagcatcccccagtccctggctgaaaatggcctggagcccttctcccaagatggtaccctagaagacttcgggagccccatctgggtggaccgagtggacatgggcttgagacctgtgtcttacactgactcttctgtcactcccagcgtagacagcagcatcgtcctcacagcagcctctgtgcagagcatgccagacactgaggagagcaggctttacggggatgacgctacatatttggctgagggaggcaggaggcagcattcctatacatccaatgggcccactttcatggagacggcgagctttaagaagaaacgctccaaatctgcagacatctggcgggaggacagcctggaattctcactctctgatctgagccaagaacatttaacaagcaacgaagaaatcttgggttccgccgaagagaaggactgcgaggaggctcgggggatggaaacgcgggcgagtccgcggcagctcagcacctgtcagagagccaattccttgggtgacttgtatgctcagaaaaactctggagtgacagcaaacggggggccggggagcaaatttgcaggctactgtcggaatttggtgtctgatattcccaatcttgcaaaccataagatgccaccagctgctgctgaagagactcctccgtacagtaattataacacacttccctgtaggaaatctcactgtctctctgaaggtgccaccaacccacaaattagccatagcaacagcatgcaaggcagaagagctaaaacaactcaggatgttaatgcaggcgagggcagtgagtttgcagacagtgggattgaaggggccactaccgacacggacctcctgtccaggcgatctaatgccaccaactccagctactcacccaccacaggccgggcctttgtgggcagcgacagcggcagcagctccaccggggatgcggctcgtcagggggtgtacgagaacttccggcgggagctggagatgagcaccaccaacagcgagagcctggaggaggccggctcggcgcacagcgatgagcagagcagcggcaccctgagctctccgggccagtcggacatcctgctgaccgccgcacagggcacggtgcgcaaggccggcgccctggccgtcaagaacttcctggtgcacaagaagaacaagaaggtggagtcagccacccggaggaagtggaagcactactgggtgtccctgaaaggatgcacgctatttttctacgagagcgacggcaggtctgggatagaccacaacagcatccccaaacacgccgtctgggtggagaacagcattgtgcaggcggtgcctgagcaccccaagaaggactttgtcttctgcctcagcaattccctgggtgatgccttcctttttcagaccactagccagacggagcttgaaaactggatcaccgccatccactctgcctgcgccactgcggtcgcgaggcaccaccacaaggaagacacgctccgactcctgaaatcagagatcaaaaaactggaacagaagattgacatggatgaaaagatgaagaaaatgggtgaaatgcagctgtcttcagtcactgactcaaagaaaaagaaaacaatattagatcagatctttgtctgggagcaaaatctcgagcagttccaaatggacctgtttcgtttccgctgttatttagccagccttcagggtggggagctgccaaaccccaaaaggcttctcgcttttgcaagtcgaccaacgaaagtggccatgggccgccttggaatcttttcggtatcatcgtttcatgccctggtggcagcacgcactggtgaaactggagtgagaagacgtactcaggccatgtccagatccgcgagcaagcgaaggagcaggttttcttctctgtggggtctggatactacctccaaaaagaagcagggacggccaagcatcaatcaggtgtttggagagggaaccgaagctgtaaagaaatctttagagggaatatttgatgacattgttccagatggcaagagggagaaagaagtggtcttacctaacgttcaccagcacaaccctgactgcgacatttgggtccacgagtatttcactccatcctggttctgtctgcccaataatcagcctgccctgacggtcgtccggccaggcgacactgcacgggacaccctggagctgatttgcaagacacatcaactggatcattctgctcattacctgcgcctgaaatttctaatagaaaacaaaatgcagctctatgttccacagcccgaggaagacatctatgagctgctgtacaaagaaattgaaatctgtccaaaagtcactcagagcatccacattgagaagtcagatacagctgctgatacttacgggttttcactttcttctgtggaagaagatggtattcgaaggctgtacgtgaatagtgtgaaggaaaccggtttagcttccaagaaaggcctgaaagcaggagatgagattcttgagatcaataatcgtgctgctgacgccctgaactcttctatgctcaaagatttcctctcacagccctcgctgggcctcctggtgaggacctaccccgagctggaggaaggagtggagctgctggaaagcccgccccaccgagtggacggccctgccgaccttggcgagagccccctcgcctttctcaccagcaacccagggcacagcctttgcagcgagcagggcagcagtgctgagaccgctccagaggagaccgaggggccagacttggaatcctcagatgagactgatcacagcagcaagagtacagaacaggtggccgcattttgccgcagtttgcatgagatgaacccctctgaccagagcccatctcctcaggactccacggggcctcagctggcgaccatgagacaactctcggatgcagataagctgcgcaaggtgatctgcgagctcctggagacggagcgcacctacgtgaaggatttaaactgtcttatggagagatacctaaagcctcttcaaaaagaaacttttctcacccaggatgagcttgacgtgctttttggaaatttaacggaaatggtagagtttcaagtagaattccttaaaactctagaagatggagtgagactggtacctgatttggaaaagcttgagaaggttgatcaatttaagaaagtgctgttctctctggggggatcattcctgtattatgctgaccgcttcaagctctacagtgccttctgcgccagccacacaaaagttcccaaggtcctggtgaaagccaagacagacacggctttcaaggcattcttggatgcccagaacccgaagcagcagcactcatccacgctggagtcgtacctcatcaagcccatccagaggatcctcaagtacccacttctgctcagggagctgttcgccctgaccgatgcggagagcgaggagcactaccacctggacgtggccatcaagaccatgaacaaggttgccagtcacatcaatgagatgcagaaaatccatgaagagtttggggctgtgtttgaccagctgattgctgaacagactggtgagaaaaaagaggttgcagatctgagcatgggagacctgcttttgcacactaccgtgatctggctgaacccgccggcctcgctgggcaagtggaaaaaggaaccagagttggcagcattcgtcttcaaaactgctgtggtccttgtgtataaagatggttccaaacagaagaagaaacttgtaggatctcacaggctttccatttatgaggactgggaccccttcagatttcgacacatgatccccacggaagcgctgcaggttcgagctttggcgagtgcagatgcagaggcaaatgccgtgtgtgaaattgtccatgtaaaatccgagtctgaagggaggccggagagggtctttcacttgtgctgcagctccccagagagccgaaaggatttcctaaaggctgtgcattcaatcctgcgtgataagcacagaagacagctcctcaaaaccgagagccttccctcatcccagcaatatgtcccttttggaggcaaaagattgtgtgcactgaagggggccaggccggccatgagcagggcagtgtctgccccaagcaagtctcttgggaggaggaggcggcggctggctcgaaacaggtttaccattgattctgatgccgtctccgcaagcagcccggagaaagagtcccagcagccccccggtggtggggacactgaccgatgggtagaggagcagtttgatcttgctcagtatgaggagcaagatgacatcaaggagacagacatcctcagtgacgatgatgagttctgtgagtccgtgaagggtgcctcagtggacagagacctgcaggagcggcttcaggccacctccatcagtcagcgggaaagaggccggaaaaccctggatagtcacgcgtcccgcatggcacagctcaagaagcaagctgccctgtcggggatcaatggaggcctggagagcgcaagcgaggaagtcatttgggttaggcgtgaagactttgccccctccaggaaactgaacactgagatctgactgcgtcacctgccccgtagagaatgtgtgtagatacttcctgccctaactctgcccaccctcctgtaccgtcgacaagaatgtccccttaggtcgcgctcttgcacacacggttttggcagctgacttggttctgaagccatgtagccacccaactttgtcattttcaacaacatcagaaagaattgatcagaatcccaaataagcttgagtcctatcttctgtatattactaagggcttttatttattctcaataaatcagggcctgaacaattaaaagaaaaaagattctatagcactggaaagcaaatcaccccaggagttaacggatgtacaacagattaatttaagggatagtagcacacacacgatccttctatctgaaatcagtctcctagctggggaaacctctttcacacacaaaatgaaatgtgtacagcttgccgtgttctgactgtacccttccctcttccatgtctgagaatctccgtgtattttaagaatgtgtgaggagagggtggcgattcatgtttcaatgagcctctttttttttttccttcctgttttggtctatggctggtcttactctgtgtccatgttcggaagctctagttttgcatagaattatagagatgccaaactctttgaaaagagatccaaatttatcgcttgagagaaagaaaagaaacactattttttgtattttacctgagatacaggggcacaaatagatgagaattttacagtgttagtgtatgtatccctgagcctaaaaaatgaggatataaccttttacagagagagtgaggcgtggtggttttatatttatatatgaaaggccagcaagctcatgcgaaggatatacttttcttccaaaaagcggattttttttttttaatgtttgaatctatatttgagatgggagtttggttggattaaacatgacaccccggtgggcggtgtgtgtgtctgttgcacatggcagggaggggagcctccttctcatggggttgccatggtgatcattggtttttccatcaaaattgcatcttcatccatagattaccttccccttccctgacagtccataaccaaacctttaaacagaacaacctctttaaaaacttctcttgtgtttaacactttcttcatgccaacgaaacagggtaaacatgctcaaaacattaacagtctaaacagatatccaaatactaagaagaaaaacaagttatagcactttcaattttttttttttttttaaaaaaaggtttatagctttttcttttcccatgtcacaatgtccacttcctaagaagggtttaaaatactatgaaaactttctttttggggaaaatatctatttggtgtttgacacatcagtaggtactttaaagacctgaattttatagtagctttaggagttatattttataaaaatcagttatgactttatatttccagacaatagagagttcagtacatcatgctcttgtgcctctgcctgcttttcctgcgttcccaccctgtattccccccgcctttcgggtttccagggcttcgagcttgatcttttgaaagttttattctattaaatttttgctatatcttctggttttctgaaaaagctttagaatggtttctataccctttgtatcactgcatttttccatatcatctccggttcgatcgcgtccagatggaaaacggaagcagaggcttctaatcgtcgcatttactggctccagtgcaacacatccatctgaaaacactcggaagtctggtgcttggagagggtgccattgtctcttgtacataaggtcatgacgtgtctatgtcaaaagttcttatatatttcttttataagctgaaagaaggtctatttttatgtttttaggtctatgaatggaacgttgtaaatgcttgtcaaacaataaaaataacgaaaagtgtc

SEQ ID NO: 189780 - DNA, 1187 bp, Homo sapiens
  Payload ID: 17481
  Gene Symbol: TIAM1
  Gene Name: T-cell lymphoma invasion and metastasis 1
  ENST ID: ENST00000455508
  CDS Start-End: 511-1187
atcatagcacgaaacttcacaagttacacccactgcctccgccagcagccggggaaggctgctgcttcctcatttctgttactggaagtttgggacatgtgaagccagacggggagaaacgtgcgcgccttgttgagcagcggtagaatcactgtggactgagacccacctttctagacctgaagcccaggaggaggaagaggaggctggttggtaccatgggcataatgctctgaatcctagtctctcacctagtatgtgagcagtccctgcagatggcccatttggagatcttgacaaagcctcttctgtttccaatggggtttttggcgcattctcacagacttagatgaaactgtgatggccaccgcagggggcaggtgctgacatcgtccccagccctgtggctgttcatccggacatcatttccaacctcaatatctaaatgccacagtgctcttggagcaagttgggctggggaccactgttgccttttaagaccataaaaccatgggaaacgcagaaagtcaacatgtagagcacgagttttatggagaaaagcatgccagcctggggcgcaagcacacttcccgctccctgcgcctctcgcacaagacgcggaggaccaggcacgcttcctcggggaaggtgatccacaggaactccgaagtgagcacccgatccagcagcacccccagcatcccccagtccctggctgaaaatggcctggagcccttctcccaagatggtaccctagaagacttcgggagccccatctgggtggaccgagtggacatgggcttgagacctgtgtcttacactgactcttctgtcactcccagcgtagacagcagcatcgtcctcacagcagcctctgtgcagagcatgccagacactgaggagagcaggctttacggggatgacgctacatatttggctgagggaggcaggaggcagcattcctatacatccaatgggcccactttcatggagacggcgagctttaagaagaaacgctccaaatctgcagacatctggcgggaggacagcctggaattctcactctctgatctgagccaagaacatttaacaagcaacgaagaaatcttgggttccgccgaagagaaggactgcgaggaggctcgggggatggaaacgcgggcgagtccgcggcagctcagcacctg

SEQ ID NO: 189781 - DNA, 523 bp, Homo sapiens
  Payload ID: 17481
  Gene Symbol: TIAM1
  Gene Name: T-cell lymphoma invasion and metastasis 1
  ENST ID: ENST00000423206
  CDS Start-End: 1-398
cgagtgcagatgcagaggcaaatgccgtgtgtgaaattgtccatgtaaaatccgagtctgaagggaggccggagagggtctttcacttgtgctgcagctccccagagagccgaaaggatttcctaaaggctgtgcattcaatcctgcgtgataagcacagaagacagctcctcaaaaccgagagccttccctcatcccagcaatatgtcccttttggaggcaaaagattgtgtgcactgaagggggccaggccggccatgagcagggcagatggaaaacggaagcagaggcttctaatcgtcgcatttactggctccagtgcaacacatccatctgaaaacactcggaagtctggtgcttggagagggtgccattgtctcttgtacataaggtcatgacgtgtctatgtcaaaagttcttatatatttcttttataagctgaaagaaggtctatttttatgtttttaggtctatgaatggaacgttgtaaatgcttgtcaaacaataaaaataacgaaaagtg

SEQ ID NO: 189782 - DNA, 7018 bp, Homo sapiens
  Payload ID: 17481
  Gene Symbol: TIAM1
  Gene Name: T-cell lymphoma invasion and metastasis 1
  Uniprot ID: Q13009
  ENST ID: ENST00000541036
  CDS Start-End: 473-5068
gccccgcatcgtgcccggccccgtcgcggagatcccggacgaccgtcgcgggttgatggtcgcattccagatgtaaacagcttcagaagcctgacggtcatatggtagaatcactgtggactgagacccacctttctagacctgaagcccaggaggaggaagaggaggctggttggtaccatgggcataatgctctgaatcctagtctctcacctagtatgtgagcagtccctgcagatggcccatttggagatcttgacaaagcctcttctgtttccaatggggtttttggcgcattctcacagacttagatgaaactgtgatggccaccgcagggggcaggtgctgacatcgtccccagccctgtggctgttcatccggacatcatttccaacctcaatatctaaatgccacagtgctcttggagcaagttgggctggggaccactgttgccttttaagaccataaaaccatgggaaacgcagaaagtcaacatgtagagcacgagttttatggagaaaagcatgccagcctggggcgcaagcacacttcccgctccctgcgcctctcgcacaagacgcggaggaccaggcacgcttcctcggggaaggtgatccacaggaactccgaagtgagcacccgatccagcagcacccccagcatcccccagtccctggctgaaaatggcctggagcccttctcccaagatggtaccctagaagacttcgggagccccatctgggtggaccgagtggacatgggcttgagacctgtgtcttacactgactcttctgtcactcccagcgtagacagcagcatcgtcctcacagcagcctctgtgcagagcatgccagacactgaggagagcaggctttacggggatgacgctacatatttggctgagggaggcaggaggcagcattcctatacatccaatgggcccactttcatggagacggcgagctttaagaagaaacgctccaaatctgcagacatctggcgggaggacagcctggaattctcactctctgatctgagccaagaacatttaacaagcaacgaagaaatcttgggttccgccgaagagaaggactgcgaggaggctcgggggatggaaacgcgggcgagtccgcggcagctcagcacctgtcagagagccaattccttgggtgacttgtatgctcagaaaaactctggagtgacagcaaacggggggccggggagcaaatttgcaggctactgtcggaatttggtgtctgatattcccaatcttgcaaaccataagatgccaccagctgctgctgaagagactcctccgtacagtaattataacacacttccctgtaggaaatctcactgtctctctgaaggtgccaccaacccacaaattagccatagcaacagcatgcaaggcagaagagctaaaacaactcaggatgttaatgcaggcgagggcagtgagtttgcagacagtgggattgaaggggccactaccgacacggacctcctgtccaggcgatctaatgccaccaactccagctactcacccaccacaggccgggcctttgtgggcagcgacagcggcagcagctccaccggggatgcggctcgtcagggggtgtacgagaacttccggcgggagctggagatgagcaccaccaacagcgagagcctggaggaggccggctcggcgcacagcgatgagcagagcagcggcaccctgagctctccgggccagtcggacatcctgctgaccgccgcacagggcacggtgcgcaaggccggcgccctggccgtcaagaacttcctggtgcacaagaagaacaagaaggtggagtcagccacccggaggaagtggaagcactactgggtgtccctgaaaggatgcacgctatttttctacgagagcgacggcaggtctgggatagaccacaacagcatccccaaacacgccgtctgggtggagaacagcattgtgcaggcggtgcctgagcaccccaagaaggactttgtcttctgcctcagcaattccctgggtgatgccttcctttttcagaccactagccagacggagcttgaaaactggatcaccgccatccactctgcctgcgccactgcggtcgcgaggcaccaccacaaggaagacacgctccgactcctgaaatcagagatcaaaaaactggaacagaagattgacatggatgaaaagatgaagaaaatgggtgaaatgcagctgtcttcagtcactgactcaaagaaaaagaaaacaatattagatcagatctttgtctgggagcaaaatctcgagcagttccaaatggacctgtttcgtttccgctgttatttagccagccttcagggtggggagctgccaaaccccaaaaggcttctcgcttttgcaagtcgaccaacgaaagtggccatgggccgccttggaatcttttcggtatcatcgtttcatgccctggtggcagcacgcactggtgaaactggagtgagaagacgtactcaggccatgtccagatccgcgagcaagcgaaggagcaggttttcttctctgtggggtctggatactacctccaaaaagaagcagggacggccaagcatcaatcagagggagaaagaagtggtcttacctaacgttcaccagcacaaccctgactgcgacatttgggtccacgagtatttcactccatcctggttctgtctgcccaataatcagcctgccctgacggtcgtccggccaggcgacactgcacgggacaccctggagctgatttgcaagctgtacaaagaaattgaaatctgtccaaaagtcactcagagcatccacattgagaagtcagatacagctgctgatacttacgggttttcactttcttctgtggaagaagatggtattcgaaggctgtacgtgaatagtgtgaaggaaaccggtttagcttccaagaaaggcctgaaagcaggagatgagattcttgagatcaataatcgtgctgctgacgccctgaactcttctatgctcaaagatttcctctcacagccctcgctgggcctcctggtgaggacctaccccgagctggaggaaggagtggagctgctggaaagcccgccccaccgagtggacggccctgccgaccttggcgagagccccctcgcctttctcaccagcaacccagggcacagcctttgcagcgagcagggcagcagtgctgagaccgctccagaggagaccgaggggccagacttggaatcctcagatgagactgatcacagcagcaagagtacagaacaggtggccgcattttgccgcagtttgcatgagatgaacccctctgaccagagcccatctcctcaggactccacggggcctcagctggcgaccatgagacaactctcggatgcagataagctgcgcaaggtgatctgcgagctcctggagacggagcgcacctacgtgaaggatttaaactgtcttatggagagatacctaaagcctcttcaaaaagaaacttttctcacccaggatgagcttgacgtgctttttggaaatttaacggaaatggtagagtttcaagtagaattccttaaaactctagaagatggagtgagactggtacctgatttggaaaagcttgagaaggttgatcaatttaagaaagtgctgttctctctggggggatcattcctgtattatgctgaccgcttcaagctctacagtgccttctgcgccagccacacaaaagttcccaaggtcctggtgaaagccaagacagacacggctttcaaggcattcttggatgcccagaacccgaagcagcagcactcatccacgctggagtcgtacctcatcaagcccatccagaggatcctcaagtacccacttctgctcagggagctgttcgccctgaccgatgcggagagcgaggagcactaccacctggacgtggccatcaagaccatgaacaaggttgccagtcacatcaatgagatgcagaaaatccatgaagagtttggggctgtgtttgaccagctgattgctgaacagactggtgagaaaaaagaggttgcagatctgagcatgggagacctgcttttgcacactaccgtgatctggctgaacccgccggcctcgctgggcaagtggaaaaaggaaccagagttggcagcattcgtcttcaaaactgctgtggtccttgtgtataaagatggttccaaacagaagaagaaacttgtaggatctcacaggctttccatttatgaggactgggaccccttcagatttcgacacatgatccccacggaagcgctgcaggttcgagctttggcgagtgcagatgcagaggcaaatgccgtgtgtgaaattgtccatgtaaaatccgagtctgaagggaggccggagagggtctttcacttgtgctgcagctccccagagagccgaaaggatttcctaaaggctgtgcattcaatcctgcgtgataagcacagaagacagctcctcaaaaccgagagccttccctcatcccagcaatatgtcccttttggaggcaaaagattgtgtgcactgaagggggccaggccggccatgagcagggcagtgtctgccccaagcaagtctcttgggaggaggaggcggcggctggctcgaaacaggtttaccattgattctgatgccgtctccgcaagcagcccggagaaagagtcccagcagccccccggtggtggggacactgaccgatgggtagaggagcagtttgatcttgctcagtatgaggagcaagatgacatcaaggagacagacatcctcagtgacgatgatgagttctgtgagtccgtgaagggtgcctcagtggacagagacctgcaggagcggcttcaggccacctccatcagtcagcgggaaagaggccggaaaaccctggatagtcacgcgtcccgcatggcacagctcaagaagcaagctgccctgtcggggatcaatggaggcctggagagcgcaagcgaggaagtcatttgggttaggcgtgaagactttgccccctccaggaaactgaacactgagatctgactgcgtcacctgccccgtagagaatgtgtgtagatacttcctgccctaactctgcccaccctcctgtaccgtcgacaagaatgtccccttaggtcgcgctcttgcacacacggttttggcagctgacttggttctgaagccatgtagccacccaactttgtcattttcaacaacatcagaaagaattgatcagaatcccaaataagcttgagtcctatcttctgtatattactaagggcttttatttattctcaataaatcagggcctgaacaattaaaagaaaaaagattctatagcactggaaagcaaatcaccccaggagttaacggatgtacaacagattaatttaagggatagtagcacacacacgatccttctatctgaaatcagtctcctagctggggaaacctctttcacacacaaaatgaaatgtgtacagcttgccgtgttctgactgtacccttccctcttccatgtctgagaatctccgtgtattttaagaatgtgtgaggagagggtggcgattcatgtttcaatgagcctctttttttttttccttcctgttttggtctatggctggtcttactctgtgtccatgttcggaagctctagttttgcatagaattatagagatgccaaactctttgaaaagagatccaaatttatcgcttgagagaaagaaaagaaacactattttttgtattttacctgagatacaggggcacaaatagatgagaattttacagtgttagtgtatgtatccctgagcctaaaaaatgaggatataaccttttacagagagagtgaggcgtggtggttttatatttatatatgaaaggccagcaagctcatgcgaaggatatacttttcttccaaaaagcggattttttttttttaatgtttgaatctatatttgagatgggagtttggttggattaaacatgacaccccggtgggcggtgtgtgtgtctgttgcacatggcagggaggggagcctccttctcatggggttgccatggtgatcattggtttttccatcaaaattgcatcttcatccatagattaccttccccttccctgacagtccataaccaaacctttaaacagaacaacctctttaaaaacttctcttgtgtttaacactttcttcatgccaacgaaacagggtaaacatgctcaaaacattaacagtctaaacagatatccaaatactaagaagaaaaacaagttatagcactttcaattttttttttttttttaaaaaaaggtttatagctttttcttttcccatgtcacaatgtccacttcctaagaagggtttaaaatactatgaaaactttctttttggggaaaatatctatttggtgtttgacacatcagtaggtactttaaagacctgaattttatagtagctttaggagttatattttataaaaatcagttatgactttatatttccagacaatagagagttcagtacatcatgctcttgtgcctctgcctgcttttcctgcgttcccaccctgtattccccccgcctttcgggtttccagggcttcgagcttgatcttttgaaagttttattctattaaatttttgctatatcttctggttttctgaaaaagctttagaatggtttctataccctttgtatcactgcatttttccatatcatctccggttcgatcgcgtccagatggaaaacggaagcagaggcttctaatcgtcgcatttactggctccagtgcaacacatccatctgaaaacactcggaagtctggtgcttggagagggtgccattgtctcttgtacataaggtcatgacgtgtctatgtcaaaagttcttatatatttcttttataagctgaaagaaggtctatttttatgtttttaggtctatgaatggaacgttgtaaatgcttgtcaaacaataaaaataacgaaaagtg

SEQ ID NO: 189783 - DNA, 2491 bp, Homo sapiens
  Payload ID: 17482
  Gene Symbol: TIAM2
  Gene Name: T-cell lymphoma invasion and metastasis 2
  Uniprot ID: Q8IVF5
  ENST ID: ENST00000275246
  CDS Start-End: 512-2392
acaatgtccctttgggtgaggaggttgaaagagtttttggtttgttctgggaacttaaggtatattaagcagtccccacagacatgctgcctgcactccacctgctgagctggctctgaggctcaggagacgtggccctctgtggtcccattgtctccacgtctgtggtaacccggtgcctttctagagcaggcaggctcccggcatgggtggaaacagagcagggggccagcttcccccaatcaccggtgctgctgtggaggaagagcttggtggcgctaggacgtccttgtgaatgtgacttggaagagcagtttgggatttttttcattgcctggggatgagagggagagacaacgtgtgtcttacacatctcccaacagccgacttagatgtgatccgttctcccagagggagcaggtttctttgaacttttcctttttatgtacagcatagtgctgagcagatcactgcactgtgcaggagttttaacgacagtcaggccaacggcatggaaggaccgcgggagaatcaggatcctcctccgaggtctctggcccgccacctgtctgatgcagaccgcctccgcaaagtcatccaggagcttgtggacacagagaagtcctacgtgaaggatttgagctgcctctttgaattatacttggagccacttcagaatgagacctttcttacccaagatgagatggagtcactttttggaagtttgccagagatgcttgagtttcagaaggtgtttctggagaccctggaggatgggatttcagcatcatctgactttaacaccctagaaaccccctcacagtttagaaaattactgttttcccttggaggctctttcctttattacgcggaccactttaaactgtacagtggattctgtgctaaccatatcaaagtacagaaggttctggagcgagctaaaactgacaaagccttcaaggcttttctggacgcccggaaccccaccaagcagcattcctccacgctggagtcctacctcatcaagccggttcagagagtgctcaagtacccgctgctgctcaaggagctggtgtccctgacggaccaggagagcgaggagcactaccacctgacggaagcactaaaggcaatggagaaagtagcgagccacatcaatgagatgcagaagatctatgaggattatgggaccgtgtttgaccagctagtagctgagcagagcggaacagagaaggaggtaacagaactttcgatgggagagcttctgatgcactctacggtttcctggttgaatccatttctgtctctaggaaaagctagaaaggaccttgagctcacagtatttgtttttaagagagccgtcatactggtttataaagaaaactgcaaactgaaaaagaaattgccctcgaattcccggcctgcacacaactctactgacttggacccatttaaattccgctggttgatccccatctccgcgcttcaagtcagactggggaatccagcagggacagaaaataattccatatgggaactgatccatacgaagtcagaaatagaaggacggccagaaaccatctttcagttgtgttgcagtgacagtgaaagcaaaaccaacattgttaaggtgattcgttctattctgagggagaacttcaggcgtcacataaagtgtgaattaccactggagaaaacgtgtaaggatcgcctggtacctcttaagaaccgagttcctgtttcggccaaattagcttcatccaggtctttaaaagtcctgaagaattcctccagcaacgagtggaccggtgagactggcaagggaaccttgctggactctgacgagggcagcttgagcagcggcacccagagcagcggctgccccacggctgagggcaggcaggactccaagagcacttctcccgggaaatacccacaccccggcttggcagattttgccgacaatctcatcaaagagagtgacatcctgagcgatgaagatgatgaccaccgtcagactgtgaagcagggcagccctactaaagacatcgaaattcagttccagagactgaggatttccgaggacccagacgttcaccccgaggctgagcagcagcctggcccggagtcgggtgagggtcagaaaggaggagagcagcccaaactggtccgggggcacttctgccccattaaacgaaaagccaacagcaccaagagggacagaggaactttgctcaaggcgcagatccgtcaccagtcccttgacagtcagtctgaaaatgccaccatcgacctaaattctgttctagagcgagaattcagtgtccagagtttaacatctgttgtcagtgaggagtgtttttatgaaacagagagccacggaaaatcatagtatgattcaatccagatatgggttaaattcctcattttacttttaaactggtggtaaagtggaaattgcaaaaaaaaaaaaaaaaaaaaactgttcatt

SEQ ID NO: 189784 - DNA, 5916 bp, Homo sapiens
  Payload ID: 17482
  Gene Symbol: TIAM2
  Gene Name: T-cell lymphoma invasion and metastasis 2
  Uniprot ID: Q8IVF5
  ENST ID: ENST00000318981
  CDS Start-End: 209-5314
ggctctgtgtatgaatgacaaggataccttcagccagctcattctggatgaatgaatgattacactaagtgtcctccacattcctctgtgggctcacttcatggactcactttgcgtgcttgttaaatgtgctgtgttgctcccaagaccatgtaaagcctactgaccactaacctccctcacagcagaaactagacgtcaggttaaaatgggcaactccgacagtcagtacacccttcaaggatctaaaaatcatagcaatactattactggtgctaagcaaattccttgctccctgaaaatacgtggcattcatgcaaaagaggaaaagtcattgcatggatggggtcacggaagcaacggagcaggttacaagtccaggtccctggcccgaagctgcctttctcactttaagagtaaccagccttacgcatcgagactcggtggccccacatgcaaggtctccagaggtgttgcctactccacgcacaggacaaatgccccagggaaggatttccagggcatcagtgctgctttctcaactgagaatggcttccactctgttggccacgagctggcagataaccacatcacctccagagactgcaacggacaccttctcaactgctacgggaggaatgagagcattgcctccaccccaccgggcgaagaccgcaagagcccccgagtgctcatcaaaacgctggggaagctggatgggtgtttaagggtcgagttccacaatggtggcaaccccagcaaagtgcctgcagaggactgcagtgagccggtgcagctgctgaggtactcacctaccttagcatcggaaacctcccctgtgcctgaagccaggagggggtccagcgccgattccctgcccagccatcgcccctctcccacggactctcgcctgcggtccagcaaaggcagctccctgagttctgagtcatcctggtacgactccccttggggcaatgctggagagctgagcgaggctgagggctccttcctggcccccggcatgcctgaccccagtctccatgccagcttcccacctggcgatgccaaaaagcctttcaaccaaagctcttccctctcctccctccgggaactgtacaaagatgccaacctggggagcctctccccctcaggtatccgcctttctgatgaatacatgggcacgcatgccagcctgagcaaccgtgtctcttttgcttccgacattgatgtgccctccagagtggcacacggggaccccatccagtacagttccttcactctcccctgtcggaagcccaaagcctttgttgaggatactgcgaagaaggactccctcaaagccaggatgcgacggatcagtgactggacgggaagcctctcaaggaagaaaaggaaactccaggagccgaggtccaaggagggcagtgactactttgacagtcgctctgatggactgaatacagatgtgcagggatcctcccaggcatctgcttttctgtggtcagggggctctactcagatcctgtctcagagaagtgaatccacacatgcgattggcagcgatcccctccggcagaacatttatgagaatttcatgcgagagttggaaatgagcaggaccaacactgagaacatagaaacatctacagaaaccgccgagtccagcagcgagtcactcagctctctggaacagctggatctgctctttgagaaggaacagggggtggtccggaaggccgggtggctcttcttcaagcccctggtcactgtgcagaaggaaaggaagcttgagctggtggcacgaaggaaatggaaacagtactgggtaacgctgaaaggatgcacgctgctgttttatgagacctatgggaagaattccatggatcagagcagtgcccctcggtgtgctctgtttgcagaagacagcatagtgcagtctgttccagagcatcccaagaaagaaaatgtgttctgcctcagcaactcctttggagatgtctaccttttccaggccaccagccagacagatctagaaaactgggtcactgctgtacactctgcttgtgcatccctttttgcaaagaagcatgggaaagaggacacgctgcggctgctgaagaaccagaccaaaaacctgcttcagaagatagacatggacagcaagatgaagaagatggcagagctgcagctgtccgtggtgagcgacccaaagaacaggaaagccatagagaaccagatccagcaatgggagcagaatcttgagaaatttcacatggatctgttcaggatgcgctgctatctggccagcctacaaggtggggagttaccgaacccaaagagtctccttgcagccgccagccgcccctccaagctggccctcggcaggctgggcatcttgtctgtttcctctttccatgctctggtatgttctagagatgactctgctctccggaaaaggacactgtcactgacccagcgagggagaaacaagaagggaatattttcttcgttaaaagggctggacacactggccagaaaaggcaaggagaagagaccttctataactcaggtcgatgaacttctgcatatatatggttcaacagtagacggtgttccccgagacaatgcatgggaaatccagacttatgtccactttcaggacaatcacggagttactgtagggatcaagccagagcacagagtagaagatattttgactttggcatgcaagatgaggcagttggaacccagccattatggcctacagcttcgaaaattagtagatgacaatgttgagtattgcatccctgcaccatatgaatatatgcaacaacaggtttatgatgaaatagaagtctttccactaaatgtttatgacgtgcagctcacgaagactgggagtgtgtgtgactttgggtttgcagttacagcgcaggtggatgagcgtcagcatctcagccggatatttataagcgacgttcttcccgatggcctggcgtatggggaagggctgagaaagggcaatgagatcatgaccttaaatggggaagctgtgtctgatcttgaccttaagcagatggaggccctgttttctgagaagagcgtcggactcactctgattgcccggcctccggacacaaaagcaaccctgtgtacatcctggtcagacagtgacctgttctccagggaccagaagagtctgctgccccctcctaaccagtcccaactgctggaggaattcctggataactttaaaaagaatacagccaatgatttcagcaacgtccctgatatcacaacaggtctgaaaaggagtcagacagatggcactctggatcaggtttcccacagggagaaaatggagcagacattcaggagtgctgagcagatcactgcactgtgcaggagttttaacgacagtcaggccaacggcatggaaggaccgcgggagaatcaggatcctcctccgaggtctctggcccgccacctgtctgatgcagaccgcctccgcaaagtcatccaggagcttgtggacacagagaagtcctacgtgaaggatttgagctgcctctttgaattatacttggagccacttcagaatgagacctttcttacccaagatgagatggagtcactttttggaagtttgccagagatgcttgagtttcagaaggtgtttctggagaccctggaggatgggatttcagcatcatctgactttaacaccctagaaaccccctcacagtttagaaaattactgttttcccttggaggctctttcctttattacgcggaccactttaaactgtacagtggattctgtgctaaccatatcaaagtacagaaggttctggagcgagctaaaactgacaaagccttcaaggcttttctggacgcccggaaccccaccaagcagcattcctccacgctggagtcctacctcatcaagccggttcagagagtgctcaagtacccgctgctgctcaaggagctggtgtccctgacggaccaggagagcgaggagcactaccacctgacggaagcactaaaggcaatggagaaagtagcgagccacatcaatgagatgcagaagatctatgaggattatgggaccgtgtttgaccagctagtagctgagcagagcggaacagagaaggaggtaacagaactttcgatgggagagcttctgatgcactctacggtttcctggttgaatccatttctgtctctaggaaaagctagaaaggaccttgagctcacagtatttgtttttaagagagccgtcatactggtttataaagaaaactgcaaactgaaaaagaaattgccctcgaattcccggcctgcacacaactctactgacttggacccatttaaattccgctggttgatccccatctccgcgcttcaagtcagactggggaatccagcagggacagaaaataattccatatgggaactgatccatacgaagtcagaaatagaaggacggccagaaaccatctttcagttgtgttgcagtgacagtgaaagcaaaaccaacattgttaaggtgattcgttctattctgagggagaacttcaggcgtcacataaagtgtgaattaccactggagaaaacgtgtaaggatcgcctggtacctcttaagaaccgagttcctgtttcggccaaattagcttcatccaggtctttaaaagtcctgaagaattcctccagcaacgagtggaccggtgagactggcaagggaaccttgctggactctgacgagggcagcttgagcagcggcacccagagcagcggctgccccacggctgagggcaggcaggactccaagagcacttctcccgggaaatacccacaccccggcttggcagattttgccgacaatctcatcaaagagagtgacatcctgagcgatgaagatgatgaccaccgtcagactgtgaagcagggcagccctactaaagacatcgaaattcagttccagagactgaggatttccgaggacccagacgttcaccccgaggctgagcagcagcctggcccggagtcgggtgagggtcagaaaggaggagagcagcccaaactggtccgggggcacttctgccccattaaacgaaaagccaacagcaccaagagggacagaggaactttgctcaaggcgcagatccgtcaccagtcccttgacagtcagtctgaaaatgccaccatcgacctaaattctgttctagagcgagaattcagtgtccagagtttaacatctgttgtcagtgaggagtgtttttatgaaacagagagccacggaaaatcatagtatgattcaatccagatatgggttaaattcctcattttacttttaaactggtggtaaagtggaaattgcaaaaaaaaaaaaaaaaaaaaactgttcattcctgggttttgtgcagtatacattttcccacaaaatggttgtaaagatttaagttattttaatttattgtggatcagaaacctagatgaaactggtcagaatctgtaaattacttagtttatatccactttgagcaggtatcaaatgatttaggatccttaaaattacattctaataattaagttatgtggaaaaagtaaggctggggaagtcgtgattaatagttttcaaagggccattttttaaaatcctctgggcattttctttcagctgtttgttagtttttgctttatttaaagcatatttaagttattttaatgtggtttaggggcaaaatgtgcagatacttcatttttgtaagatagattgtaatagatgctgtttatactaaacatgtcataactatctatacagtatatattaaaagaaagcttgtactgtatcttatttgatgatatttattttctctgccaagctgtatagtaaaaggaaaataagtcaca

SEQ ID NO: 189785 - DNA, 5771 bp, Homo sapiens
  Payload ID: 17482
  Gene Symbol: TIAM2
  Gene Name: T-cell lymphoma invasion and metastasis 2
  Uniprot ID: Q8IVF5
  ENST ID: ENST00000360366
  CDS Start-End: 53-5230
tgtaatttaggccacggtcttactgatgcaactgttcttaatttaggttaaaatgggcaactccgacagtcagtacacccttcaaggatctaaaaatcatagcaatactattactggtgctaagcaaattccttgctccctgaaaatacgtggcattcatgcaaaagaggaaaagtcattgcatggatggggtcacggaagcaacggagcaggttacaagtccaggtccctggcccgaagctgcctttctcactttaagagtaaccagccttacgcatcgagactcggtggccccacatgcaaggtctccagaggtgttgcctactccacgcacaggacaaatgccccagggaaggatttccagggcatcagtgctgctttctcaactgagaatggcttccactctgttggccacgagctggcagataaccacatcacctccagagactgcaacggacaccttctcaactgctacgggaggaatgagagcattgcctccaccccaccgggcgaagaccgcaagagcccccgagtgctcatcaaaacgctggggaagctggatgggtgtttaagggtcgagttccacaatggtggcaaccccagcaaagtgcctgcagaggactgcagtgagccggtgcagctgctgaggtactcacctaccttagcatcggaaacctcccctgtgcctgaagccaggagggggtccagcgccgattccctgcccagccatcgcccctctcccacggactctcgcctgcggtccagcaaaggcagctccctgagttctgagtcatcctggtacgactccccttggggcaatgctggagagctgagcgaggctgagggctccttcctggcccccggcatgcctgaccccagtctccatgccagcttcccacctggcgatgccaaaaagcctttcaaccaaagctcttccctctcctccctccgggaactgtacaaagatgccaacctggggagcctctccccctcaggtatccgcctttctgatgaatacatgggcacgcatgccagcctgagcaaccgtgtctcttttgcttccgacattgatgtgccctccagagtggcacacggggaccccatccagtacagttccttcactctcccctgtcggaagcccaaagcctttgttgaggatactgcgaagaaggactccctcaaagccaggatgcgacggatcagtgactggacgggaagcctctcaaggaagaaaaggaaactccaggagccgaggtccaaggagggcagtgactactttgacagtcgctctgatggactgaatacagatgtgcagggatcctcccaggcatctgcttttctgtggtcagggggctctactcagatcctgtctcagagaagtgaatccacacatgcgattggcagcgatcccctccggcagaacatttatgagaatttcatgcgagagttggaaatgagcaggaccaacactgagaacatagaaacatctacagaaaccgccgagtccagcagcgagtcactcagctctctggaacagctggatctgctctttgagaaggaacagggggtggtccggaaggccgggtggctcttcttcaagcccctggtcactgtgcagaaggaaaggaagcttgagctggtggcacgaaggaaatggaaacagtactgggtaacgctgaaaggatgcacgctgctgttttatgagacctatgggaagaattccatggatcagagcagtgcccctcggtgtgctctgtttgcagaagacagcatagtgcagtctgttccagagcatcccaagaaagaaaatgtgttctgcctcagcaactcctttggagatgtctaccttttccaggccaccagccagacagatctagaaaactgggtcactgctgtacactctgcttgtgcatccctttttgcaaagaagcatgggaaagaggacacgctgcggctgctgaagaaccagaccaaaaacctgcttcagaagatagacatggacagcaagatgaagaagatggcagagctgcagctgtccgtggtgagcgacccaaagaacaggaaagccatagagaaccagatccagcaatgggagcagaatcttgagaaatttcacatggatctgttcaggatgcgctgctatctggccagcctacaaggtggggagttaccgaacccaaagagtctccttgcagccgccagccgcccctccaagctggccctcggcaggctgggcatcttgtctgtttcctctttccatgctctggtatgttctagagatgactctgctctccggaaaaggacactgtcactgacccagcgagggagaaacaagaagggaatattttcttcgttaaaagggctggacacactggccagaaaaggcaaggagaagagaccttctataactcagatatttgattcaagtggcagccatggattttctggaactcagctacctcaaaactccagtaactccagtgaggtcgatgaacttctgcatatatatggttcaacagtagacggtgttccccgagacaatgcatgggaaatccagacttatgtccactttcaggacaatcacggagttactgtagggatcaagccagagcacagagtagaagatattttgactttggcatgcaagatgaggcagttggaacccagccattatggcctacagcttcgaaaattagtagatgacaatgttgagtattgcatccctgcaccatatgaatatatgcaacaacaggtttatgatgaaatagaagtctttccactaaatgtttatgacgtgcagctcacgaagactgggagtgtgtgtgactttgggtttgcagttacagcgcaggtggatgagcgtcagcatctcagccggatatttataagcgacgttcttcccgatggcctggcgtatggggaagggctgagaaagggcaatgagatcatgaccttaaatggggaagctgtgtctgatcttgaccttaagcagatggaggccctgttttctgagaagagcgtcggactcactctgattgcccggcctccggacacaaaagcaaccctgtgtacatcctggtcagacagtgacctgttctccagggaccagaagagtctgctgccccctcctaaccagtcccaactgctggaggaattcctggataactttaaaaagaatacagccaatgatttcagcaacgtccctgatatcacaacaggtctgaaaaggagtcagacagatggcactctggatcaggtttcccacagggagaaaatggagcagacattcaggagtgctgagcagatcactgcactgtgcaggagttttaacgacagtcaggccaacggcatggaaggaccgcgggagaatcaggatcctcctccgaggtctctggcccgccacctgtctgatgcagaccgcctccgcaaagtcatccaggagcttgtggacacagagaagtcctacgtgaaggatttgagctgcctctttgaattatacttggagccacttcagaatgagacctttcttacccaagatgagatggagtcactttttggaagtttgccagagatgcttgagtttcagaaggtgtttctggagaccctggaggatgggatttcagcatcatctgactttaacaccctagaaaccccctcacagtttagaaaattactgttttcccttggaggctctttcctttattacgcggaccactttaaactgtacagtggattctgtgctaaccatatcaaagtacagaaggttctggagcgagctaaaactgacaaagccttcaaggcttttctggacgcccggaaccccaccaagcagcattcctccacgctggagtcctacctcatcaagccggttcagagagtgctcaagtacccgctgctgctcaaggagctggtgtccctgacggaccaggagagcgaggagcactaccacctgacggaagcactaaaggcaatggagaaagtagcgagccacatcaatgagatgcagaagatctatgaggattatgggaccgtgtttgaccagctagtagctgagcagagcggaacagagaaggaggtaacagaactttcgatgggagagcttctgatgcactctacggtttcctggttgaatccatttctgtctctaggaaaagctagaaaggaccttgagctcacagtatttgtttttaagagagccgtcatactggtttataaagaaaactgcaaactgaaaaagaaattgccctcgaattcccggcctgcacacaactctactgacttggacccatttaaattccgctggttgatccccatctccgcgcttcaagtcagactggggaatccagcagggacagaaaataattccatatgggaactgatccatacgaagtcagaaatagaaggacggccagaaaccatctttcagttgtgttgcagtgacagtgaaagcaaaaccaacattgttaaggtgattcgttctattctgagggagaacttcaggcgtcacataaagtgtgaattaccactggagaaaacgtgtaaggatcgcctggtacctcttaagaaccgagttcctgtttcggccaaattagcttcatccaggtctttaaaagtcctgaagaattcctccagcaacgagtggaccggtgagactggcaagggaaccttgctggactctgacgagggcagcttgagcagcggcacccagagcagcggctgccccacggctgagggcaggcaggactccaagagcacttctcccgggaaatacccacaccccggcttggcagattttgccgacaatctcatcaaagagagtgacatcctgagcgatgaagatgatgaccaccgtcagactgtgaagcagggcagccctactaaagacatcgaaattcagttccagagactgaggatttccgaggacccagacgttcaccccgaggctgagcagcagcctggcccggagtcgggtgagggtcagaaaggaggagagcagcccaaactggtccgggggcacttctgccccattaaacgaaaagccaacagcaccaagagggacagaggaactttgctcaaggcgcagatccgtcaccagtcccttgacagtcagtctgaaaatgccaccatcgacctaaattctgttctagagcgagaattcagtgtccagagtttaacatctgttgtcagtgaggagtgtttttatgaaacagagagccacggaaaatcatagtatgattcaatccagatatgggttaaattcctcattttacttttaaactggtggtaaagtggaaattgcaaaaaaaaaaaaaaaaaaaaactgttcattcctgggttttgtgcagtatacattttcccacaaaatggttgtaaagatttaagttattttaatttattgtggatcagaaacctagatgaaactggtcagaatctgtaaattacttagtttatatccactttgagcaggtatcaaatgatttaggatccttaaaattacattctaataattaagttatgtggaaaaagtaaggctggggaagtcgtgattaatagttttcaaagggccattttttaaaatcctctgggcattttctttcagctgtttgttagtttttgctttatttaaagcatatttaagttattttaatgtggtttaggggcaaaatgtgcagatacttcatttttgtaagatagattgtaatagatgctgtttatactaaacatgtcataactatctatacagtatatattaaaagaaagcttgtactgta

SEQ ID NO: 189786 - DNA, 3275 bp, Homo sapiens
  Payload ID: 17482
  Gene Symbol: TIAM2
  Gene Name: T-cell lymphoma invasion and metastasis 2
  Uniprot ID: Q8IVF5
  ENST ID: ENST00000456877
  CDS Start-End: 155-3196
agcttgtcccacagcgagctgtggagctgggagggccattcagagctctgcatggaggcagggtggccggccttcgtcccctcaggccagcagggcaaggcagctcccctcaatagagatccagcaatgggagcagaatcttgagaaatttcacatggatctgttcaggatgcgctgctatctggccagcctacaaggtggggagttaccgaacccaaagagtctccttgcagccgccagccgcccctccaagctggccctcggcaggctgggcatcttgtctgtttcctctttccatgctctggtatgttctagagatgactctgctctccggaaaaggacactgtcactgacccagcgagggagaaacaagaagggaatattttcttcgttaaaagggctggacacactggccagaaaaggcaaggagaagagaccttctataactcaggtcgatgaacttctgcatatatatggttcaacagtagacggtgttccccgagacaatgcatgggaaatccagacttatgtccactttcaggacaatcacggagttactgtagggatcaagccagagcacagagtagaagatattttgactttggcatgcaagatgaggcagttggaacccagccattatggcctacagcttcgaaaattagtagatgacaatgttgagtattgcatccctgcaccatatgaatatatgcaacaacaggtttatgatgaaatagaagtctttccactaaatgtttatgacgtgcagctcacgaagactgggagtgtgtgtgactttgggtttgcagttacagcgcaggtggatgagcgtcagcatctcagccggatatttataagcgacgttcttcccgatggcctggcgtatggggaagggctgagaaagggcaatgagatcatgaccttaaatggggaagctgtgtctgatcttgaccttaagcagatggaggccctgttttctgagaagagcgtcggactcactctgattgcccggcctccggacacaaaagcaaccctgtgtacatcctggtcagacagtgacctgttctccagggaccagaagagtctgctgccccctcctaaccagtcccaactgctggaggaattcctggataactttaaaaagaatacagccaatgatttcagcaacgtccctgatatcacaacaggtctgaaaaggagtcagacagatggcactctggatcaggtttcccacagggagaaaatggagcagacattcaggagtgctgagcagatcactgcactgtgcaggagttttaacgacagtcaggccaacggcatggaaggaccgcgggagaatcaggatcctcctccgaggtctctggcccgccacctgtctgatgcagaccgcctccgcaaagtcatccaggagcttgtggacacagagaagtcctacgtgaaggatttgagctgcctctttgaattatacttggagccacttcagaatgagacctttcttacccaagatgagatggagtcactttttggaagtttgccagagatgcttgagtttcagaaggtgtttctggagaccctggaggatgggatttcagcatcatctgactttaacaccctagaaaccccctcacagtttagaaaattactgttttcccttggaggctctttcctttattacgcggaccactttaaactgtacagtggattctgtgctaaccatatcaaagtacagaaggttctggagcgagctaaaactgacaaagccttcaaggcttttctggacgcccggaaccccaccaagcagcattcctccacgctggagtcctacctcatcaagccggttcagagagtgctcaagtacccgctgctgctcaaggagctggtgtccctgacggaccaggagagcgaggagcactaccacctgacggaagcactaaaggcaatggagaaagtagcgagccacatcaatgagatgcagaagatctatgaggattatgggaccgtgtttgaccagctagtagctgagcagagcggaacagagaaggaggtaacagaactttcgatgggagagcttctgatgcactctacggtttcctggttgaatccatttctgtctctaggaaaagctagaaaggaccttgagctcacagtatttgtttttaagagagccgtcatactggtttataaagaaaactgcaaactgaaaaagaaattgccctcgaattcccggcctgcacacaactctactgacttggacccatttaaattccgctggttgatccccatctccgcgcttcaagtcagactggggaatccagcagggacagaaaataattccatatgggaactgatccatacgaagtcagaaatagaaggacggccagaaaccatctttcagttgtgttgcagtgacagtgaaagcaaaaccaacattgttaaggtgattcgttctattctgagggagaacttcaggcgtcacataaagtgtgaattaccactggagaaaacgtgtaaggatcgcctggtacctcttaagaaccgagttcctgtttcggccaaattagcttcatccaggtctttaaaagtcctgaagaattcctccagcaacgagtggaccggtgagactggcaagggaaccttgctggactctgacgagggcagcttgagcagcggcacccagagcagcggctgccccacggctgagggcaggcaggactccaagagcacttctcccgggaaatacccacaccccggcttggcagattttgccgacaatctcatcaaagagagtgacatcctgagcgatgaagatgatgaccaccgtcagactgtgaagcagggcagccctactaaagacatcgaaattcagttccagagactgaggatttccgaggacccagacgttcaccccgaggctgagcagcagcctggcccggagtcgggtgagggtcagaaaggaggagagcagcccaaactggtccgggggcacttctgccccattaaacgaaaagccaacagcaccaagagggacagaggaactttgctcaaggcgcagatccgtcaccagtcccttgacagtcagtctgaaaatgccaccatcgacctaaattctgttctagagcgagaattcagtgtccagagtttaacatctgttgtcagtgaggagtgtttttatgaaacagagagccacggaaaatcatagtatgattcaatccagatatgggttaaattcctcattttacttttaaactggtggtaaagtggaaattgcaaaaaaaaaa

SEQ ID NO: 189787 - DNA, 583 bp, Homo sapiens
  Payload ID: 17482
  Gene Symbol: TIAM2
  Gene Name: T-cell lymphoma invasion and metastasis 2
  ENST ID: ENST00000462408
  CDS Start-End: 115-583
attgcctggggatgagagggagagacaacgtgtgtcttacacatctcccaacagccgacttagatgtgatccgttctcccagagggagcaggtttctttgaacttttcctttttatgtacagcatgagttttaacgacagtcaggccaacggcatggaaggaccgcgggagaatcaggatcctcctccgaggtctctggcccgccacctgtctgatgcagaccgcctccgcaaagtcatccaggagcttgtggacacagagaagtcctacgtgaaggatttgagctgcctctttgaattatacttggagccacttcagaatgagacctttcttacccaagatgagatggagtcactttttggaagtttgccagagatgcttgagtttcagaaggtgtttctggagaccctggaggatgggatttcagcatcatctgactttaacaccctagaaaccccctcacagtttagaaaattactgttttcccttggaggctctttcctttattacgcggaccactttaaactgtacagtggattctgtgctaaccatatcaaagtacagaaggttctggagcgagcta

SEQ ID NO: 189788 - DNA, 5262 bp, Homo sapiens
  Payload ID: 17482
  Gene Symbol: TIAM2
  Gene Name: T-cell lymphoma invasion and metastasis 2
  Uniprot ID: Q8IVF5
  ENST ID: ENST00000529824
  CDS Start-End: 1-5193
atgggcaactccgacagtcagtacacccttcaaggatctaaaaatcatagcaatactattactggtgctaagcaaattccttgctccctgaaaatacgtggcattcatgcaaaagaggaaaagtcattgcatggatggggtcacggaagcaacggagcaggttacaagtccaggtccctggcccgaagctgcctttctcactttaagagtaaccagccttacgcatcgagactcggtggccccacatgcaaggtctccagaggtgttgcctactccacgcacaggacaaatgccccagggaaggatttccagggcatcagtgctgctttctcaactgagaatggcttccactctgttggccacgagctggcagataaccacatcacctccagagactgcaacggacaccttctcaactgctacgggaggaatgagagcattgcctccaccccaccgggcgaagaccgcaagagcccccgagtgctcatcaaaacgctggggaagctggatgggtgtttaagggtcgagttccacaatggtggcaaccccagcaaagtgcctgcagaggactgcagtgagccggtgcagctgctgaggtactcacctaccttagcatcggaaacctcccctgtgcctgaagccaggagggggtccagcgccgattccctgcccagccatcgcccctctcccacggactctcgcctgcggtccagcaaaggcagctccctgagttctgagtcatcctggtacgactccccttggggcaatgctggagagctgagcgaggctgagggctccttcctggcccccggcatgcctgaccccagtctccatgccagcttcccacctggcgatgccaaaaagcctttcaaccaaagctcttccctctcctccctccgggaactgtacaaagatgccaacctggggagcctctccccctcaggtatccgcctttctgatgaatacatgggcacgcatgccagcctgagcaaccgtgtctcttttgcttccgacattgatgtgccctccagagtggcacacggggaccccatccagtacagttccttcactctcccctgtcggaagcccaaagcctttgttgaggatactgcgaagaaggactccctcaaagccaggatgcgacggatcagtgactggacgggaagcctctcaaggaagaaaaggaaactccaggagccgaggtccaaggagggcagtgactactttgacagtcgctctgatggactgaatacagatgtgcagggatcctcccaggcatctgcttttctgtggtcagggggctctactcagatcctgtctcagagaagtgaatccacacatgcgattggcagcgatcccctccggcagaacatttatgagaatttcatgcgagagttggaaatgagcaggaccaacactgagaacatagaaacatctacagaaaccgccgagtccagcagcgagtcactcagctctctggaacagctggatctgctctttgagaaggaacagggggtggtccggaaggccgggtggctcttcttcaagcccctggtcactgtgcagaaggaaaggaagcttgagctggtggcacgaaggaaatggaaacagtactgggtaacgctgaaaggatgcacgctgctgttttatgagacctatgggaagaattccatggatcagagcagtgcccctcggtgtgctctgtttgcagaagacagcatagtgcagtctgttccagagcatcccaagaaagaaaatgtgttctgcctcagcaactcctttggagatgtctaccttttccaggccaccagccagacagatctagaaaactgggtcactgctgtacactctgcttgtgcatccctttttgcaaagaagcatgggaaagaggacacgctgcggctgctgaagaaccagaccaaaaacctgcttcagaagatagacatggacagcaagatgaagaagatggcagagctgcagctgtccgtggtgagcgacccaaagaacaggaaagccatagagaaccagatccagcaatgggagcagaatcttgagaaatttcacatggatctgttcaggatgcgctgctatctggccagcctacaaggtggggagttaccgaacccaaagagtctccttgcagccgccagccgcccctccaagctggccctcggcaggctgggcatcttgtctgtttcctctttccatgctctggtatgttctagagatgactctgctctccggaaaaggacactgtcactgacccagcgagggagaaacaagaagggaatattttcttcgttaaaagggctggacacactggccagaaaaggcaaggagaagagaccttctataactcaggtcgatgaacttctgcatatatatggttcaacagtagacggtgttccccgagacaatgcatgggaaatccagacttatgtccactttcaggacaatcacggagttactgtagggatcaagccagagcacagagtagaagatattttgactttggcatgcaagatgaggcagttggaacccagccattatggcctacagcttcgaaaattagtagatgacaatgttgagtattgcatccctgcaccatatgaatatatgcaacaacaggtttatgatgaaatagaagtctttccactaaatgtttatgacgtgcagctcacgaagactgggagtgtgtgtgactttgggtttgcagttacagcgcaggtggatgagcgtcagcatctcagccggatatttataagcgacgttcttcccgatggcctggcgtatggggaagggctgagaaagggcaatgagatcatgaccttaaatggggaagctgtgtctgatcttgaccttaagcagatggaggccctgttttctgagaagagcgtcggactcactctgattgcccggcctccggacacaaaagcaaccctgtgtacatcctggtcagacagtgacctgttctccagggaccagaagagtctgctgccccctcctaaccagtcccaactgctggaggaattcctggataactttaaaaagaatacagccaatgatttcagcaacgtccctgatatcacaacaggtctgaaaaggagtcagacagatggcactctggatcaggtttcccacagggagaaaatggagcagacattcaggagtgctgagcagatcactgcactgtgcaggagttttaacgacagtcaggccaacggcatggaaggaccgcgggagaatcaggatcctcctccgaggtctctggcccgccacctgtctgatgcagaccgcctccgcaaagtcatccaggagcttgtggacacagagaagtcctacgtgaaggatttgagctgcctctttgaattatacttggagccacttcagaatgagacctttcttacccaagatgagatggagtcactttttggaagtttgccagagatgcttgagtttcagaaggtgtttctggagaccctggaggatgggatttcagcatcatctgactttaacaccctagaaaccccctcacagtttagaaaattactgttttcccttggaggctctttcctttattacgcggaccactttaaactgtacagtggattctgtgctaaccatatcaaagtacagaaggttctggagcgagctaaaactgacaaagccttcaaggcttttctggacgcccggaaccccaccaagcagcattcctccacgctggagtcctacctcatcaagccggttcagagagtgctcaagtacccgctgctgctcaaggagctggtgtccctgacggaccaggagagcgaggagcactaccacctgacggaagcactaaaggcaatggagaaagtagcgagccacatcaatgagatgcagaagatctatgaggattatgggaccgtgtttgaccagctagtagctgagcagagcggaacagagaaggagcagcccgaatggagctcagaggtgatggatgtactagatcccaggggaaagcttacaaaaggcactctggaagaaccacggacactggtaacagaactttcgatgggagagcttctgatgcactctacggtttcctggttgaatccatttctgtctctaggaaaagctagaaaggaccttgagctcacagtatttgtttttaagagagccgtcatactggtttataaagaaaactgcaaactgaaaaagaaattgccctcgaattcccggcctgcacacaactctactgacttggacccatttaaattccgctggttgatccccatctccgcgcttcaagtcagactggggaatccagcagggacagaaaataattccatatgggaactgatccatacgaagtcagaaatagaaggacggccagaaaccatctttcagttgtgttgcagtgacagtgaaagcaaaaccaacattgttaaggtgattcgttctattctgagggagaacttcaggcgtcacataaagtgtgaattaccactggagaaaacgtgtaaggatcgcctggtacctcttaagaaccgagttcctgtttcggccaaattagcttcatccaggtctttaaaagtcctgaagaattcctccagcaacgagtggaccggtgagactggcaagggaaccttgctggactctgacgagggcagcttgagcagcggcacccagagcagcggctgccccacggctgagggcaggcaggactccaagagcacttctcccgggaaatacccacaccccggcttggcagattttgccgacaatctcatcaaagagagtgacatcctgagcgatgaagatgatgaccaccgtcagactgtgaagcagggcagccctactaaagacatcgaaattcagttccagagactgaggatttccgaggacccagacgttcaccccgaggctgagcagcagcctggcccggagtcgggtgagggtcagaaaggaggagagcagcccaaactggtccgggggcacttctgccccattaaacgaaaagccaacagcaccaagagggacagaggaactttgctcaaggcgcagatccgtcaccagtcccttgacagtcagtctgaaaatgccaccatcgacctaaattctgttctagagcgagaattcagtgtccagagtttaacatctgttgtcagtgaggagtgtttttatgaaacagagagccacggaaaatcatagtatgattcaatccagatatgggttaaattcctcattttacttttaaactggtggtaaagtggaaattgc

SEQ ID NO: 189789 - DNA, 4404 bp, Homo sapiens
  Payload ID: 17482
  Gene Symbol: TIAM2
  Gene Name: T-cell lymphoma invasion and metastasis 2
  ENST ID: ENST00000528535
  CDS Start-End: 304-4404
acacacacacacacacacacacacacacacacctgagatggggtagatcattgtatttttgtgtctaccagcaagaaaaggaaggaaaaactaagggctctgtgtatgaatgacaaggataccttcagccagctcattctggatgaatgaatgattacactaagtgtcctccacattcctctgtgggctcacttcatggactcactttgcgtgcttgttaaatgtgctgtgttgctcccaagaccatgtaaagcctactgaccactaacctccctcacagcagaaactagacgtcaggttaaaatgggcaactccgacagtcagtacacccttcaaggatctaaaaatcatagcaatactattactggtgctaagcaaattccttgctccctgaaaatacgtggcattcatgcaaaagaggaaaagtcattgcatggatggggtcacggaagcaacggagcaggttacaagtccaggtccctggcccgaagctgcctttctcactttaagagtaaccagccttacgcatcgagactcggtggccccacatgcaaggtctccagaggtgttgcctactccacgcacaggacaaatgccccagggaaggatttccagggcatcagtgctgctttctcaactgagaatggcttccactctgttggccacgagctggcagataaccacatcacctccagagactgcaacggacaccttctcaactgctacgggaggaatgagagcattgcctccaccccaccgggcgaagaccgcaagagcccccgagtgctcatcaaaacgctggggaagctggatgggtgtttaagggtcgagttccacaatggtggcaaccccagcaaagtgcctgcagaggactgcagtgagccggtgcagctgctgaggtactcacctaccttagcatcggaaacctcccctgtgcctgaagccaggagggggtccagcgccgattccctgcccagccatcgcccctctcccacggactctcgcctgcggtccagcaaaggcagctccctgagttctgagtcatcctggtacgactccccttggggcaatgctggagagctgagcgaggctgagggctccttcctggcccccggcatgcctgaccccagtctccatgccagcttcccacctggcgatgccaaaaagcctttcaaccaaagctcttccctctcctccctccgggaactgtacaaagatgccaacctggggagcctctccccctcaggtatccgcctttctgatgaatacatgggcacgcatgccagcctgagcaaccgtgtctcttttgcttccgacattgatgtgccctccagagtggcacacggggaccccatccagtacagttccttcactctcccctgtcggaagcccaaagcctttgttgaggatactgcgaagaaggactccctcaaagccaggatgcgacggatcagtgactggacgggaagcctctcaaggaagaaaaggaaactccaggagccgaggtccaaggagggcagtgactactttgacagtcgctctgatggactgaatacagatgtgcagggatcctcccaggcatctgcttttctgtggtcagggggctctactcagatcctgtctcagagaagtgaatccacacatgcgattggcagcgatcccctccggcagaacatttatgagaatttcatgcgagagttggaaatgagcaggaccaacactgagaacatagaaacatctacagaaaccgccgagtccagcagcgagtcactcagctctctggaacagctggatctgctctttgagaaggaacagggggtggtccggaaggccgggtggctcttcttcaagcccctggtcactgtgcagaaggaaaggaagcttgagctggtggcacgaaggaaatggaaacagtactgggtaacgctgaaaggatgcacgctgctgttttatgagacctatgggaagaattccatggatcagagcagtgcccctcggtgtgctctgtttgcagaagacagcatagtgcagtctgttccagagcatcccaagaaagaaaatgtgttctgcctcagcaactcctttggagatgtctaccttttccaggccaccagccagacagatctagaaaactgggtcactgctgtacactctgcttgtgcatccctttttgcaaagaagcatgggaaagaggacacgctgcggctgctgaagaaccagaccaaaaacctgcttcagaagatagacatggacagcaagatgaagaagatggcagagctgcagctgtccgtggtgagcgacccaaagaacaggaaagccatagagaaccagatccagcaatgggagcagaatcttgagaaatttcacatggatctgttcaggatgcgctgctatctggccagcctacaaggtggggagttaccgaacccaaagagtctccttgcagccgccagccgcccctccaagctggccctcggcaggctgggcatcttgtctgtttcctctttccatgctctggtatgttctagagatgactctgctctccggaaaaggacactgtcactgacccagcgagggagaaacaagaagggaatattttcttcgttaaaagggctggacacactggccagaaaaggcaaggagaagagaccttctataactcaggtcgatgaacttctgcatatatatggttcaacagtagacggtgttccccgagacaatgcatgggaaatccagacttatgtccactttcaggacaatcacggagttactgtagggatcaagccagagcacagagtagaagatattttgactttggcatgcaagatgaggcagttggaacccagccattatggcctacagcttcgaaaattagtagatgacaatgttgagtattgcatccctgcaccatatgaatatatgcaacaacaggtttatgatgaaatagaagtctttccactaaatgtttatgacgtgcagctcacgaagactgggagtgtgtgtgactttgggtttgcagttacagcgcaggtggatgagcgtcagcatctcagccggatatttataagcgacgttcttcccgatggcctggcgtatggggaagggctgagaaagggcaatgagatcatgaccttaaatggggaagctgtgtctgatcttgaccttaagcagatggaggccctgttttctgagaagagcgtcggactcactctgattgcccggcctccggacacaaaagcaaccctgtgtacatcctggtcagacagtgacctgttctccagggaccagaagagtctgctgccccctcctaaccagtcccaactgctggaggaattcctggataactttaaaaagaatacagccaatgatttcagcaacgtccctgatatcacaacaggtctgaaaaggagtcagacagatggcactctggatcaggtttcccacagggagaaaatggagcagacattcaggagtgctgagcagatcactgcactgtgcaggagttttaacgacagtcaggccaacggcatggaaggaccgcgggagaatcaggatcctcctccgaggtctctggcccgccacctgtctgatgcagaccgcctccgcaaagtcatccaggagcttgtggacacagagaagtcctacgtgaaggatttgagctgcctctttgaattatacttggagccacttcagaatgagacctttcttacccaagatgagatggagtcactttttggaagtttgccagagatgcttgagtttcagaaggtgtttctggagaccctggaggatgggatttcagcatcatctgactttaacaccctagaaaccccctcacagtttagaaaattactgttttcccttggaggctctttcctttattacgcggaccactttaaactgtacagtggattctgtgctaaccatatcaaagtacagaaggttctggagcgagctaaaactgacaaagccttcaaggcttttctggacgcccggaaccccaccaagcagcattcctccacgctggagtcctacctcatcaagccggttcagagagtgctcaagtacccgctgctgctcaaggagctggtgtccctgacggaccaggagagcgaggagcactaccacctgacggaagcactaaaggcaatggagaaagtagcgagccacatcaatgagatgcagaagatctatgaggattatgggaccgtgtttgaccagctagtagctgagcagagcggaacagagaaggaggtaacagaactttcgatgggagagcttctgatgcactctacggtttcctggttgaatccatttctgtctctaggaaaagctagaaaggaccttgagctcacagtatttgtttttaagagagccgtcatactggtttataaagaaaactgc

SEQ ID NO: 189790 - DNA, 3349 bp, Homo sapiens
  Payload ID: 17482
  Gene Symbol: TIAM2
  Gene Name: T-cell lymphoma invasion and metastasis 2
  ENST ID: ENST00000528391
  CDS Start-End: 143-3280
agcgagctgtggagctgggagggccattcagagctctgcatggaggcagggtggccggccttcgtcccctcaggccagcagggcaaggcagctcccctcaatagagatccagcaatgggagcagaatcttgagaaatttcacatggatctgttcaggatgcgctgctatctggccagcctacaaggtggggagttaccgaacccaaagagtctccttgcagccgccagccgcccctccaagctggccctcggcaggctgggcatcttgtctgtttcctctttccatgctctggtatgttctagagatgactctgctctccggaaaaggacactgtcactgacccagcgagggagaaacaagaagggaatattttcttcgttaaaagggctggacacactggccagaaaaggcaaggagaagagaccttctataactcagatatttgattcaagtggcagccatggattttctggaactcagctacctcaaaactccagtaactccagtgaggtcgatgaacttctgcatatatatggttcaacagtagacggtgttccccgagacaatgcatgggaaatccagacttatgtccactttcaggacaatcacggagttactgtagggatcaagccagagcacagagtagaagatattttgactttggcatgcaagatgaggcagttggaacccagccattatggcctacagcttcgaaaattagtagatgacaatgttgagtattgcatccctgcaccatatgaatatatgcaacaacaggtttatgatgaaatagaagtctttccactaaatgtttatgacgtgcagctcacgaagactgggagtgtgtgtgactttgggtttgcagttacagcgcaggtggatgagcgtcagcatctcagccggatatttataagcgacgttcttcccgatggcctggcgtatggggaagggctgagaaagggcaatgagatcatgaccttaaatggggaagctgtgtctgatcttgaccttaagcagatggaggccctgttttctgagaagagcgtcggactcactctgattgcccggcctccggacacaaaagcaaccctgtgtacatcctggtcagacagtgacctgttctccagggaccagaagagtctgctgccccctcctaaccagtcccaactgctggaggaattcctggataactttaaaaagaatacagccaatgatttcagcaacgtccctgatatcacaacaggtctgaaaaggagtcagacagatggcactctggatcaggtttcccacagggagaaaatggagcagacattcaggagtgctgagcagatcactgcactgtgcaggagttttaacgacagtcaggccaacggcatggaaggaccgcgggagaatcaggatcctcctccgaggtctctggcccgccacctgtctgatgcagaccgcctccgcaaagtcatccaggagcttgtggacacagagaagtcctacgtgaaggatttgagctgcctctttgaattatacttggagccacttcagaatgagacctttcttacccaagatgagatggagtcactttttggaagtttgccagagatgcttgagtttcagaaggtgtttctggagaccctggaggatgggatttcagcatcatctgactttaacaccctagaaaccccctcacagtttagaaaattactgttttcccttggaggctctttcctttattacgcggaccactttaaactgtacagtggattctgtgctaaccatatcaaagtacagaaggttctggagcgagctaaaactgacaaagccttcaaggcttttctggacgcccggaaccccaccaagcagcattcctccacgctggagtcctacctcatcaagccggttcagagagtgctcaagtacccgctgctgctcaaggagctggtgtccctgacggaccaggagagcgaggagcactaccacctgacggaagcactaaaggcaatggagaaagtagcgagccacatcaatgagatgcagaagatctatgaggattatgggaccgtgtttgaccagctagtagctgagcagagcggaacagagaaggaggtaacagaactttcgatgggagagcttctgatgcactctacggtttcctggttgaatccatttctgtctctaggaaaagctagaaaggaccttgagctcacagtatttgtttttaagagagccgtcatactggtttataaagaaaactgcaaactgaaaaagaaattgccctcgaattcccggcctgcacacaactctactgacttggacccatttaaattccgctggttgatccccatctccgcgcttcaagtcagactggggaatccagcagggacagaaaataattccatatgggaactgatccatacgaagtcagaaatagaaggacggccagaaaccatctttcagttgtgttgcagtgacagtgaaagcaaaaccaacattgttaaggtgattcgttctattctgagggagaacttcaggcgtcacataaagtgtgaattaccactggagaaaacgtgtaaggatcgcctggtacctcttaagaaccgagttcctgtttcggccaaattagcgaaatgtgtttttctcactgtagcttcatccaggtctttaaaagtcctgaagaattcctccagcaacgagtggaccggtgagactggcaagggaaccttgctggactctgacgagggcagcttgagcagcggcacccagagcagcggctgccccacggctgagggcaggcaggactccaagagcacttctcccgggaaatacccacaccccggcttggcagattttgccgacaatctcatcaaagagagtgacatcctgagcgatgaagatgatgaccaccgtcagactgtgaagcagggcagccctactaaagacatcgaaattcagttccagagactgaggatttccgaggacccagacgttcaccccgaggctgagcagcagcctggcccggagtcgggtgagggtcagaaaggaggagagcagcccaaactggtccgggggcacttctgccccattaaacgaaaagccaacagcaccaagagggacagaggaactttgctcaaggcgcagatccgtcaccagtcccttgacagtcagtctgaaaatgccaccatcgacctaaattctgttctagagcgagaattcagtgtccagagtttaacatctgttgtcagtgaggagtgtttttatgaaacagagagccacggaaaatcatagtatgattcaatccagatatgggttaaattcctcattttacttttaaactggtggtaaagtggaaattgc

SEQ ID NO: 189791 - DNA, 6981 bp, Homo sapiens
  Payload ID: 17482
  Gene Symbol: TIAM2
  Gene Name: T-cell lymphoma invasion and metastasis 2
  Uniprot ID: Q8IVF5
  ENST ID: ENST00000461783
  CDS Start-End: 1274-6379
gggcggcctatagatccaagagaaggtcctggacggcctccactagatggtagggatcattttggaagacctcctgtagatataagagagaatcttgtgaggccaggtatagatcatcttggtcgaagagaccactttggctttaatccagagaagccctgggggcatagaggagattttgatgagagagagcatcgggttctaccggtctatggtggtccaaaaggcttacatgaagaaagaggtagatttcggtctggaaactatcgatttgatcctagaagtggtccttggaaccgaggatttggacaagaagttcacagagattttgatgaccgcagaagaccctgggagaggcaaagggatagggatgacagagattttgatttctgcagagaaatgaatggaaatcgtcttggacgagacagaattcaaaacacttgggttccccctcctcatgctcgggtttttgattattttgaaggggccacttctcaacgaaaaggtgataatgtgcctcaggttaatggtgaaaatacagagagacatgctcagccaccacctataccagtacagaatgatcctgaactttatgaaaaactgacatcttcaaatgaaataaacaaggagaagagtgacacagttgctgatatagaaagtgaaccagtggtagaaagcacagaaactgaggggacataatcatcactcagtaggttaatgatgaaatggcaggtaattcacacttttggacagagcgcaccgcccccgtggaatcaccctacagaagaggccagctataaaggatgtctcacacctttaagatcagtgtttctcaatgtgtggaccatggatacctgtattagaatacccaaaggatttgtttaaaattcaggctgagcccttcccaagacctaatagagctaaaagctttgggagtaggtggaggaaacctgcatctttacccagcaatccaggacagaatgacttggaagataacggagcttcgaagcttctagcagaatatgaagtctttcgtcttcagctacctgggttaagtttaagcagggctctgtgtatgaatgacaaggataccttcagccagctcattctggatgaatgaatgattacactaagtgtcctccacattcctctgtgggctcacttcatggactcactttgcgtgcttgttaaatgtgctgtgttgctcccaagaccatgtaaagcctactgaccactaacctccctcacagcagaaactagacgtcaggttaaaatgggcaactccgacagtcagtacacccttcaaggatctaaaaatcatagcaatactattactggtgctaagcaaattccttgctccctgaaaatacgtggcattcatgcaaaagaggaaaagtcattgcatggatggggtcacggaagcaacggagcaggttacaagtccaggtccctggcccgaagctgcctttctcactttaagagtaaccagccttacgcatcgagactcggtggccccacatgcaaggtctccagaggtgttgcctactccacgcacaggacaaatgccccagggaaggatttccagggcatcagtgctgctttctcaactgagaatggcttccactctgttggccacgagctggcagataaccacatcacctccagagactgcaacggacaccttctcaactgctacgggaggaatgagagcattgcctccaccccaccgggcgaagaccgcaagagcccccgagtgctcatcaaaacgctggggaagctggatgggtgtttaagggtcgagttccacaatggtggcaaccccagcaaagtgcctgcagaggactgcagtgagccggtgcagctgctgaggtactcacctaccttagcatcggaaacctcccctgtgcctgaagccaggagggggtccagcgccgattccctgcccagccatcgcccctctcccacggactctcgcctgcggtccagcaaaggcagctccctgagttctgagtcatcctggtacgactccccttggggcaatgctggagagctgagcgaggctgagggctccttcctggcccccggcatgcctgaccccagtctccatgccagcttcccacctggcgatgccaaaaagcctttcaaccaaagctcttccctctcctccctccgggaactgtacaaagatgccaacctggggagcctctccccctcaggtatccgcctttctgatgaatacatgggcacgcatgccagcctgagcaaccgtgtctcttttgcttccgacattgatgtgccctccagagtggcacacggggaccccatccagtacagttccttcactctcccctgtcggaagcccaaagcctttgttgaggatactgcgaagaaggactccctcaaagccaggatgcgacggatcagtgactggacgggaagcctctcaaggaagaaaaggaaactccaggagccgaggtccaaggagggcagtgactactttgacagtcgctctgatggactgaatacagatgtgcagggatcctcccaggcatctgcttttctgtggtcagggggctctactcagatcctgtctcagagaagtgaatccacacatgcgattggcagcgatcccctccggcagaacatttatgagaatttcatgcgagagttggaaatgagcaggaccaacactgagaacatagaaacatctacagaaaccgccgagtccagcagcgagtcactcagctctctggaacagctggatctgctctttgagaaggaacagggggtggtccggaaggccgggtggctcttcttcaagcccctggtcactgtgcagaaggaaaggaagcttgagctggtggcacgaaggaaatggaaacagtactgggtaacgctgaaaggatgcacgctgctgttttatgagacctatgggaagaattccatggatcagagcagtgcccctcggtgtgctctgtttgcagaagacagcatagtgcagtctgttccagagcatcccaagaaagaaaatgtgttctgcctcagcaactcctttggagatgtctaccttttccaggccaccagccagacagatctagaaaactgggtcactgctgtacactctgcttgtgcatccctttttgcaaagaagcatgggaaagaggacacgctgcggctgctgaagaaccagaccaaaaacctgcttcagaagatagacatggacagcaagatgaagaagatggcagagctgcagctgtccgtggtgagcgacccaaagaacaggaaagccatagagaaccagatccagcaatgggagcagaatcttgagaaatttcacatggatctgttcaggatgcgctgctatctggccagcctacaaggtggggagttaccgaacccaaagagtctccttgcagccgccagccgcccctccaagctggccctcggcaggctgggcatcttgtctgtttcctctttccatgctctggtatgttctagagatgactctgctctccggaaaaggacactgtcactgacccagcgagggagaaacaagaagggaatattttcttcgttaaaagggctggacacactggccagaaaaggcaaggagaagagaccttctataactcaggtcgatgaacttctgcatatatatggttcaacagtagacggtgttccccgagacaatgcatgggaaatccagacttatgtccactttcaggacaatcacggagttactgtagggatcaagccagagcacagagtagaagatattttgactttggcatgcaagatgaggcagttggaacccagccattatggcctacagcttcgaaaattagtagatgacaatgttgagtattgcatccctgcaccatatgaatatatgcaacaacaggtttatgatgaaatagaagtctttccactaaatgtttatgacgtgcagctcacgaagactgggagtgtgtgtgactttgggtttgcagttacagcgcaggtggatgagcgtcagcatctcagccggatatttataagcgacgttcttcccgatggcctggcgtatggggaagggctgagaaagggcaatgagatcatgaccttaaatggggaagctgtgtctgatcttgaccttaagcagatggaggccctgttttctgagaagagcgtcggactcactctgattgcccggcctccggacacaaaagcaaccctgtgtacatcctggtcagacagtgacctgttctccagggaccagaagagtctgctgccccctcctaaccagtcccaactgctggaggaattcctggataactttaaaaagaatacagccaatgatttcagcaacgtccctgatatcacaacaggtctgaaaaggagtcagacagatggcactctggatcaggtttcccacagggagaaaatggagcagacattcaggagtgctgagcagatcactgcactgtgcaggagttttaacgacagtcaggccaacggcatggaaggaccgcgggagaatcaggatcctcctccgaggtctctggcccgccacctgtctgatgcagaccgcctccgcaaagtcatccaggagcttgtggacacagagaagtcctacgtgaaggatttgagctgcctctttgaattatacttggagccacttcagaatgagacctttcttacccaagatgagatggagtcactttttggaagtttgccagagatgcttgagtttcagaaggtgtttctggagaccctggaggatgggatttcagcatcatctgactttaacaccctagaaaccccctcacagtttagaaaattactgttttcccttggaggctctttcctttattacgcggaccactttaaactgtacagtggattctgtgctaaccatatcaaagtacagaaggttctggagcgagctaaaactgacaaagccttcaaggcttttctggacgcccggaaccccaccaagcagcattcctccacgctggagtcctacctcatcaagccggttcagagagtgctcaagtacccgctgctgctcaaggagctggtgtccctgacggaccaggagagcgaggagcactaccacctgacggaagcactaaaggcaatggagaaagtagcgagccacatcaatgagatgcagaagatctatgaggattatgggaccgtgtttgaccagctagtagctgagcagagcggaacagagaaggaggtaacagaactttcgatgggagagcttctgatgcactctacggtttcctggttgaatccatttctgtctctaggaaaagctagaaaggaccttgagctcacagtatttgtttttaagagagccgtcatactggtttataaagaaaactgcaaactgaaaaagaaattgccctcgaattcccggcctgcacacaactctactgacttggacccatttaaattccgctggttgatccccatctccgcgcttcaagtcagactggggaatccagcagggacagaaaataattccatatgggaactgatccatacgaagtcagaaatagaaggacggccagaaaccatctttcagttgtgttgcagtgacagtgaaagcaaaaccaacattgttaaggtgattcgttctattctgagggagaacttcaggcgtcacataaagtgtgaattaccactggagaaaacgtgtaaggatcgcctggtacctcttaagaaccgagttcctgtttcggccaaattagcttcatccaggtctttaaaagtcctgaagaattcctccagcaacgagtggaccggtgagactggcaagggaaccttgctggactctgacgagggcagcttgagcagcggcacccagagcagcggctgccccacggctgagggcaggcaggactccaagagcacttctcccgggaaatacccacaccccggcttggcagattttgccgacaatctcatcaaagagagtgacatcctgagcgatgaagatgatgaccaccgtcagactgtgaagcagggcagccctactaaagacatcgaaattcagttccagagactgaggatttccgaggacccagacgttcaccccgaggctgagcagcagcctggcccggagtcgggtgagggtcagaaaggaggagagcagcccaaactggtccgggggcacttctgccccattaaacgaaaagccaacagcaccaagagggacagaggaactttgctcaaggcgcagatccgtcaccagtcccttgacagtcagtctgaaaatgccaccatcgacctaaattctgttctagagcgagaattcagtgtccagagtttaacatctgttgtcagtgaggagtgtttttatgaaacagagagccacggaaaatcatagtatgattcaatccagatatgggttaaattcctcattttacttttaaactggtggtaaagtggaaattgcaaaaaaaaaaaaaaaaaaaaactgttcattcctgggttttgtgcagtatacattttcccacaaaatggttgtaaagatttaagttattttaatttattgtggatcagaaacctagatgaaactggtcagaatctgtaaattacttagtttatatccactttgagcaggtatcaaatgatttaggatccttaaaattacattctaataattaagttatgtggaaaaagtaaggctggggaagtcgtgattaatagttttcaaagggccattttttaaaatcctctgggcattttctttcagctgtttgttagtttttgctttatttaaagcatatttaagttattttaatgtggtttaggggcaaaatgtgcagatacttcatttttgtaagatagattgtaatagatgctgtttatactaaacatgtcataactatctatacagtatatattaaaagaaagcttgtactgtatcttatttgatgatatttattttctctgccaagctgtatagtaaaaggaaaataagtcaca

SEQ ID NO: 189792 - DNA, 642 bp, Homo sapiens
  Payload ID: 17482
  Gene Symbol: TIAM2
  Gene Name: T-cell lymphoma invasion and metastasis 2
  ENST ID: ENST00000538270
  CDS Start-End: 387-642
gcgttttatgagccatatggaagtctgaagagctgctcagctctgacagctgtttaaattatctgtgacactgcatcccaccattagcagggatgatggattgttgacagtctccatcagaaaaggctggagtcccagtccgtggaggagcacttacagggtctttcctaagtgctgaggctctgtgtatgaatgacaaggataccttcagccagctcattctggatgaatgaatgattacactaagtgtcctccacattcctctgtgggctcacttcatggactcactttgcgtgcttgttaaatgtgctgtgttgctcccaagaccatgtaaagcctactgaccactaacctccctcacagcagaaactagacgtcaggttaaaatgggcaactccgacagtcagtacacccttcaaggatctaaaaatcatagcaatactattactggtgctaagcaaattccttgctccctgaaaatacgtggcattcatgcaaaagaggaaaagtcattgcatggatggggtcacggaagcaacggagcaggttacaagtccaggtccctggcccgaagctgcctttctcactttaagagtaaccagccttacgcatcgagactcggtggccccacatgcaaggtct

SEQ ID NO: 189793 - DNA, 877 bp, Homo sapiens
  Payload ID: 17482
  Gene Symbol: TIAM2
  Gene Name: T-cell lymphoma invasion and metastasis 2
  ENST ID: ENST00000535583
  CDS Start-End: 291-877
attccccttcagttgctccatctgggcagccagctcagggcctcagtccagagacaaagcagaggcagacgattctagttttctttgctgtaaatgccacactacatggaactagagaatttgggaatctgactcatccaatcaagcccaggctaaaggcaaatgaagaaaaggctcacttcatggactcactttgcgtgcttgttaaatgtgctgtgttgctcccaagaccatgtaaagcctactgaccactaacctccctcacagcagaaactagacgtcaggttaaaatgggcaactccgacagtcagtacacccttcaaggatctaaaaatcatagcaatactattactggtgctaagcaaattccttgctccctgaaaatacgtggcattcatgcaaaagaggaaaagtcattgcatggatggggtcacggaagcaacggagcaggttacaagtccaggtccctggcccgaagctgcctttctcactttaagagtaaccagccttacgcatcgagactcggtggccccacatgcaaggtctccagaggtgttgcctactccacgcacaggacaaatgccccagggaaggatttccagggcatcagtgctgctttctcaactgagaatggcttccactctgttggccacgagctggcagataaccacatcacctccagagactgcaacggacaccttctcaactgctacgggaggaatgagagcattgcctccaccccaccgggcgaagaccgcaagagcccccgagtgctcatcaaaacgctggggaagctggatgggtgtttaagggtcgagttccacaatggtggcaaccccagcaaagtgcctgcagaggactgcagtgagccggtgca

SEQ ID NO: 189794 - DNA, 550 bp, Homo sapiens
  Payload ID: 17482
  Gene Symbol: TIAM2
  Gene Name: T-cell lymphoma invasion and metastasis 2
  ENST ID: ENST00000535231
  CDS Start-End: 390-550
agaaaaggctggagtcccagtccgtggaggagcacttacagggtctttcctaagtgctgatggcaaagaattagaaactaagtggatgctttcgacagaggaacagttggataagatgtcacacgtccatgccttggatttctgcacttgacctggaaggattcccatgagaaaagaaaagggctctgtgtatgaatgacaaggataccttcagccagctcattctggatgaatgaatgattacactaagtgtcctccacattcctctgtgggctcacttcatggactcactttgcgtgcttgttaaatgtgctgtgttgctcccaagaccatgtaaagcctactgaccactaacctccctcacagcagaaactagacgtcaggttaaaatgggcaactccgacagtcagtacacccttcaaggatctaaaaatcatagcaatactattactggtgctaagcaaattccttgctccctgaaaatacgtggcattcatgcaaaagaggaaaagtcattgcatggatggggtcacggaagcaacggagcagg

SEQ ID NO: 189795 - DNA, 506 bp, Homo sapiens
  Payload ID: 17482
  Gene Symbol: TIAM2
  Gene Name: T-cell lymphoma invasion and metastasis 2
  ENST ID: ENST00000545347
  CDS Start-End: 348-506
acagcgcgcgtccaagtggagaacaaagtgacccccagaacttctccaactcctcccggcgttcccgcgagggccacgcgccgagggtagcggagggcggcgcgcgaccggccccaccgagcccggcgcgcgacccgagggctctgtgtatgaatgacaaggataccttcagccagctcattctggatgaatgaatgattacactaagtgtcctccacattcctctgtgggctcacttcatggactcactttgcgtgcttgttaaatgtgctgtgttgctcccaagaccatgtaaagcctactgaccactaacctccctcacagcagaaactagacgtcaggttaaaatgggcaactccgacagtcagtacacccttcaaggatctaaaaatcatagcaatactattactggtgctaagcaaattccttgctccctgaaaatacgtggcattcatgcaaaagaggaaaagtcattgcatggatggggtcacggaagcaacggagca

SEQ ID NO: 189796 - DNA, 575 bp, Homo sapiens
  Payload ID: 17482
  Gene Symbol: TIAM2
  Gene Name: T-cell lymphoma invasion and metastasis 2
  ENST ID: ENST00000543712
  CDS Start-End: 1-194
tgttttctgagaagagcgtcggactcactctgattgcccggcctccggacacaaaagcaaccctgtgtacatcctggtcagacagtgacctgttctccagggaccagaagagtctgctgccccctcctaaccagtcccaactgctggaggaattcctggataactttaaaaagaatacagccaatgagtgctgagcagatcactgcactgtgcaggagttttaacgacagtcaggccaacggcatggaaggaccgcgggagaatcaggatcctcctccgaggtctctggcccgccacctgtctgatgcagaccgcctccgcaaagtcatccaggagcttgtggacacagagaagtcctacgtgaaggatttgagctgcctctttgaattatacttggagccacttcagaatgagacctttcttacccaagatgagatggagtcactttttggaagtttgccagagatgcttgagtttcagaaggtgtttctggagaccctggaggatgggatttcagcatcatctgactttaacaccctagaaaccccctcacagtttagaaaattactgttttc

SEQ ID NO: 189797 - DNA, 2677 bp, Homo sapiens
  Payload ID: 17483
  Gene Symbol: TCIRG1
  Gene Name: T-cell, immune regulator 1, ATPase, H+ transporting, lysosomal V0 subunit A3
  Uniprot ID: Q13488
  ENST ID: ENST00000265686
  CDS Start-End: 109-2601
gcggcgcctagtcccgggctggcgggagtgcagttctgagtcccgcccggcgtgcgcggagcggggcagccagcagcggaggcgcggcgcgcagcacacccggggaccatgggctccatgttccggagcgaggaggtggccctggtccagctctttctgcccacagcggctgcctacacctgcgtgagtcggctgggcgagctgggcctcgtggagttcagagacctcaacgcctcggtgagcgccttccagagacgctttgtggttgatgttcggcgctgtgaggagctggagaagaccttcaccttcctgcaggaggaggtgcggcgggctgggctggtcctgcccccgccaaaggggaggctgccggcacccccaccccgggacctgctgcgcatccaggaggagacggagcgcctggcccaggagctgcgggatgtgcggggcaaccagcaggccctgcgggcccagctgcaccagctgcagctccacgccgccgtgctacgccagggccatgaacctcagctggcagccgcccacacagatggggcctcagagaggacgcccctgctccaggcccccggggggccgcaccaggacctgagggtcaactttgtggcaggtgccgtggagccccacaaggcccctgccctagagcgcctgctctggagggcctgccgcggcttcctcattgccagcttcagggagctggagcagccgctggagcaccccgtgacgggcgagccagccacgtggatgaccttcctcatctcctactggggtgagcagatcggacagaagatccgcaagatcacggactgcttccactgccacgtcttcccgtttctgcagcaggaggaggcccgcctcggggccctgcagcagctgcaacagcagagccaggagctgcaggaggtcctcggggagacagagcggttcctgagccaggtgctaggccgggtgctgcagctgctgccgccagggcaggtgcaggtccacaagatgaaggccgtgtacctggccctgaaccagtgcagcgtgagcaccacgcacaagtgcctcattgccgaggcctggtgctctgtgcgagacctgcccgccctgcaggaggccctgcgggacagctcgatggaggagggagtgagtgccgtggctcaccgcatcccctgccgggacatgccccccacactcatccgcaccaaccgcttcacggccagcttccagggcatcgtggatgcctacggcgtgggccgctaccaggaggtcaaccccgctccctacaccatcatcaccttccccttcctgtttgctgtgatgttcggggatgtgggccacgggctgctcatgttcctgttcgccctggccatggtccttgcggagaaccgaccggctgtgaaggccgcgcagaacgagatctggcagactttcttcaggggccgctacctgctcctgcttatgggcctgttctccatctacaccggcttcatctacaacgagtgcttcagtcgcgccaccagcatcttcccctcgggctggagtgtggccgccatggccaaccagtctggctggagtgatgcattcctggcccagcacacgatgcttaccctggatcccaacgtcaccggtgtcttcctgggaccctacccctttggcatcgatcctatttggagcctggctgccaaccacttgagcttcctcaactccttcaagatgaagatgtccgtcatcctgggcgtcgtgcacatggcctttggggtggtcctcggagtcttcaaccacgtgcactttggccagaggcaccggctgctgctggagacgctgccggagctcaccttcctgctgggactcttcggttacctcgtgttcctagtcatctacaagtggctgtgtgtctgggctgccagggccgcctcggcccccagcatcctcatccacttcatcaacatgttcctcttctcccacagccccagcaacaggctgctctacccccggcaggaggtggtccaggccacgctggtggtcctggccttggccatggtgcccatcctgctgcttggcacacccctgcacctgctgcaccgccaccgccgccgcctgcggaggaggcccgctgaccgacaggaggaaaacaaggccgggttgctggacctgcctgacgcatctgtgaatggctggagctccgatgaggaaaaggcagggggcctggatgatgaagaggaggccgagctcgtcccctccgaggtgctcatgcaccaggccatccacaccatcgagttctgcctgggctgcgtctccaacaccgcctcctacctgcgcctgtgggccctgagcctggcccacgcccagctgtccgaggttctgtgggccatggtgatgcgcataggcctgggcctgggccgggaggtgggcgtggcggctgtggtgctggtccccatctttgccgcctttgccgtgatgaccgtggctatcctgctggtgatggagggactctcagccttcctgcacgccctgcggctgcactgggtggaattccagaacaagttctactcaggcacgggctacaagctgagtcccttcaccttcgctgccacagatgactagggcccactgcaggtcctgccagacctccttcctgacctctgaggcaggagaggaataaagacggtccgccctggca

SEQ ID NO: 189798 - DNA, 848 bp, Homo sapiens
  Payload ID: 17483
  Gene Symbol: TCIRG1
  Gene Name: T-cell, immune regulator 1, ATPase, H+ transporting, lysosomal V0 subunit A3
  ENST ID: ENST00000534673
  CDS Start-End: 96-620
ccgggctggcgggagtgcagttctgagtcccgcccggcgtgcgcggagcggggcagccagcagcggaggcgcggcgcgcagcacacccggggaccatgggctccatgttccggagcgaggaggtggccctggtccagctctttctgcccacagcggctgcctacacctgcgtgagtcggctgggcgagctgggcctcgtggagttcagagacctcaacgcctcggtgagcgccttccagagacgctttgtggttgatgttcggcgctgtgaggagctggagaagaccttcaccttcctgcaggaggaggtgcggcgggctgggctggtcctgcccccgccaaaggggaggctgccggcacccccaccccgggacctgctgcgcatccaggaggagacggagcgcctggcccaggagctgcgggatgtgcggggcaaccagcaggccctgcgggcccagctgcaccagctgcagctccacgccgccgtgctacgccagggccatgaacctcagctggcagccgcccacacagatggggcctcagagaggacgcccctgctccaggcccccggggggccgcaccaggacctgagggtcaaggcgagccagccacgtggatgaccttcctcatctcctactggggtgagcagatcggacagaagatccgcaagatcacggactgcttccactgccacgtcttcccgtttctgcagcaggaggaggcccgcctcggggccctgcagcagctgcaacagcagagccaggagctgcaggaggtcctcggggagacagagcggttcctgagccaggtgctaggccgggtgctgcagctgctgccgccagggcagg

SEQ ID NO: 189799 - DNA, 868 bp, Homo sapiens
  Payload ID: 17483
  Gene Symbol: TCIRG1
  Gene Name: T-cell, immune regulator 1, ATPase, H+ transporting, lysosomal V0 subunit A3
  ENST ID: ENST00000529364
  CDS Start-End: 1-868
cagctttgtggcaggtgccgtggagccccacaaggcccctgccctagagcgcctgctctggagggcctgccgcggcttcctcattgccagcttcagggagctggagcagccgctggagcaccccgtgacgggcgagccagccacgtggatgaccttcctcatctcctactggggtgagcagatcggacagaagatccgcaagatcacggactgcttccactgccacgtcttcccgtttctgcagcaggaggaggcccgcctcggggccctgcagcagctgcaacagcagagccaggagctgcaggaggtcctcggggagacagagcggttcctgagccaggtgctaggccgggtgctgcagctgctgccgccagggcaggtgcaggtccacaagatgaaggccgtgtacctggccctgaaccagtgcagcgtgagcaccacgcacaagtgcctcattgccgaggcctggtgctctgtgcgagacctgcccgccctgcaggaggccctgcgggacagctcgcttccagggcatcgtggatgcctacggcgtgggccgctaccaggaggtcaaccccgctccctacaccatcatcaccttccccttcctgtttgctgtgatgttcggggatgtgggccacgggctgctcatgttcctgttcgccctggccatggtccttgcggagaaccgaccggctgtgaaggccgcgcagaacgagatctggcagactttcttcaggggccgctacctgctcctgcttatgggcctgttctccatctacaccggcttcatctacaacgagtgcttcagtcgcgccaccagcatcttcccctcgggctggagtgtggccgccatggccaaccagtctgg

SEQ ID NO: 189800 - DNA, 940 bp, Homo sapiens
  Payload ID: 17483
  Gene Symbol: TCIRG1
  Gene Name: T-cell, immune regulator 1, ATPase, H+ transporting, lysosomal V0 subunit A3
  ENST ID: ENST00000524598
  CDS Start-End: 43-940
cagccagcagcggaggcgcggcgcgcagcacacccggggaccatgggctccatgttccggagcgaggaggtggccctggtccagctctttctgcccacagcggctgcctacacctgcctcaacgcctcggtgagcgccttccagagacgctttgtggttgatgttcggcgctgtgaggagctggagaagaccttcaccttcctgcaggaggaggtgcggcgggctgggctggtcctgcccccgccaaaggggaggctgccggcacccccaccccgggacctgctgcgcatccaggaggagacggagcgcctggcccaggagctgcgggatgtgcggggcaaccagcaggccctgcgggcccagctgcaccagctgcagctccacgccgccgtgctacgccagggccatgaacctcagctggcagccgcccacacagatggggcctcagagaggacgcccctgctccaggcccccggggggccgcaccaggacctgagggtcaactttgtggcaggtgccgtggagccccacaaggcccctgccctagagcgcctgctctggagggcctgccgcggcttcctcattgccagcttcagggagctggagcagccgctggagcaccccgtgacgggcgagccagccacgtggatgaccttcctcatctcctactggggtgagcagatcggacagaagatccgcaagatcacggactgcttccactgccacgtcttcccgtttctgcagcaggaggaggcccgcctcggggccctgcagcagctgcaacagcagagccaggagctgcaggaggtcctcggggagacagagcggttcctgagccaggtgctaggccgggtgctgcagctgctgccgccagggcaggtgcaggtccacaagatgaaggccgtgtacctggccctgaaccagtgcagcgtgagcacca

SEQ ID NO: 189801 - DNA, 220 bp, Homo sapiens
  Payload ID: 17483
  Gene Symbol: TCIRG1
  Gene Name: T-cell, immune regulator 1, ATPase, H+ transporting, lysosomal V0 subunit A3
  ENST ID: ENST00000530063
  CDS Start-End: 1-186
gatgatgaagaggaggccgagctcgtcccctccgaggtgctcatgcaccaggccatccacaccatcgagttctgcctgggctgcgtctccaacaccgcctcctacctgcgcctgtgggccctgagcctggcccacgcccggtggaattccagaacaagttctactcaggcacgggctacaagctgagtcccttcaccttcgctgccacagatgactaggg

SEQ ID NO: 189802 - DNA, 2457 bp, Homo sapiens
  Payload ID: 17483
  Gene Symbol: TCIRG1
  Gene Name: T-cell, immune regulator 1, ATPase, H+ transporting, lysosomal V0 subunit A3
  Uniprot ID: Q13488
  ENST ID: ENST00000532635
  CDS Start-End: 537-2381
ggacgcccctgctccaggcccccggggggccgcaccaggacctgagggtcaagtgagtgagggatgacctcatgccctttctggccagcccagaacccctggccagtcgctgggctgggccaggctgagctccgactccttgtccagtgctctccccaggctggccccgcctcctccttcaggcccggaacttcccacagtcccaagccctagccctagggggttctcctcttctggtcctgcccgggaggcctcctgccttcccctgtgggcagggccagtgtgcccaattgcccgattgcccgtgctgggcagggtcctgcccggggggcctggtgggggaggcagggcaggaggttggagcagccctgcccagccccgtggccgccagctttgtggcaggtgccgtggagccccacaaggcccctgccctagagcgcctgctctggagggcctgccgcggcttcctcattgccagcttcagggagctggagcagccgctggagcaccccgtgacgggcgagccagccacgtggatgaccttcctcatctcctactggggtgagcagatcggacagaagatccgcaagatcacggactgcttccactgccacgtcttcccgtttctgcagcaggaggaggcccgcctcggggccctgcagcagctgcaacagcagagccaggagctgcaggaggtcctcggggagacagagcggttcctgagccaggtgctaggccgggtgctgcagctgctgccgccagggcaggtgcaggtccacaagatgaaggccgtgtacctggccctgaaccagtgcagcgtgagcaccacgcacaagtgcctcattgccgaggcctggtgctctgtgcgagacctgcccgccctgcaggaggccctgcgggacagctcgatggaggagggagtgagtgccgtggctcaccgcatcccctgccgggacatgccccccacactcatccgcaccaaccgcttcacggccagcttccagggcatcgtggatgcctacggcgtgggccgctaccaggaggtcaaccccgctccctacaccatcatcaccttccccttcctgtttgctgtgatgttcggggatgtgggccacgggctgctcatgttcctgttcgccctggccatggtccttgcggagaaccgaccggctgtgaaggccgcgcagaacgagatctggcagactttcttcaggggccgctacctgctcctgcttatgggcctgttctccatctacaccggcttcatctacaacgagtgcttcagtcgcgccaccagcatcttcccctcgggctggagtgtggccgccatggccaaccagtctggctggagtgatgcattcctggcccagcacacgatgcttaccctggatcccaacgtcaccggtgtcttcctgggaccctacccctttggcatcgatcctatttggagcctggctgccaaccacttgagcttcctcaactccttcaagatgaagatgtccgtcatcctgggcgtcgtgcacatggcctttggggtggtcctcggagtcttcaaccacgtgcactttggccagaggcaccggctgctgctggagacgctgccggagctcaccttcctgctgggactcttcggttacctcgtgttcctagtcatctacaagtggctgtgtgtctgggctgccagggccgcctcggcccccagcatcctcatccacttcatcaacatgttcctcttctcccacagccccagcaacaggctgctctacccccggcaggaggtggtccaggccacgctggtggtcctggccttggccatggtgcccatcctgctgcttggcacacccctgcacctgctgcaccgccaccgccgccgcctgcggaggaggcccgctgaccgacaggaggaaaacaaggccgggttgctggacctgcctgacgcatctgtgaatggctggagctccgatgaggaaaaggcagggggcctggatgatgaagaggaggccgagctcgtcccctccgaggtgctcatgcaccaggccatccacaccatcgagttctgcctgggctgcgtctccaacaccgcctcctacctgcgcctgtgggccctgagcctggcccacgcccagctgtccgaggttctgtgggccatggtgatgcgcataggcctgggcctgggccgggaggtgggcgtggcggctgtggtgctggtccccatctttgccgcctttgccgtgatgaccgtggctatcctgctggtgatggagggactctcagccttcctgcacgccctgcggctgcactgggtggaattccagaacaagttctactcaggcacgggctacaagctgagtcccttcaccttcgctgccacagatgactagggcccactgcaggtcctgccagacctccttcctgacctctgaggcaggagaggaataaagacggtccgccctggca

SEQ ID NO: 189803 - DNA, 842 bp, Homo sapiens
  Payload ID: 17483
  Gene Symbol: TCIRG1
  Gene Name: T-cell, immune regulator 1, ATPase, H+ transporting, lysosomal V0 subunit A3
  ENST ID: ENST00000529657
  CDS Start-End: 190-842
gcagcacacccggggttgttcccccaccccctgggaagtgctggaaggagcccggccctcgagccctcggcatagtggctgtgggagccctgatggccctgagccaggggtgacccctccccagatccccagagctgattccccacacctccttatttggccagcacagccccaaagggagccaggaccatgggctccatgttccggagcgaggaggtggccctggtccagctctttctgcccacagcggctgcctacacctgcgtgagtcggctgggcgagctgggcctcgtggagttcagagacctcaacgcctcggtgagcgccttccagagacgctttgtggttgatgttcggcgctgtgaggagctggagaagaccttcaccttcctgcaggaggaggtgcggcgggctgggctggtcctgcccccgccaaaggggaggctgccggcacccccaccccgggacctgctgcgcatccaggaggagacggagcgcctggcccaggagctgcgggatgtgcggggcaaccagcaggccctgcgggcccagctgcaccagctgcagctccacgccgccgtgctacgccagggccatgaacctcagctggcagccgcccacacagatggggcctcagagaggacgcccctgctccaggcccccggggggccgcaccaggacctgagggtcaactttgtggcaggtgccgtggagccccacaaggcccctgccctagagcgcctgctctggagggcctgccgcggcttcctcattgccagcttcagggagctggagcagccgctggagcaccccgtgacgggcgagccagccacgtggatgac

SEQ ID NO: 189804 - DNA, 755 bp, Homo sapiens
  Payload ID: 17483
  Gene Symbol: TCIRG1
  Gene Name: T-cell, immune regulator 1, ATPase, H+ transporting, lysosomal V0 subunit A3
  ENST ID: ENST00000528981
  CDS Start-End: 1-314
tggccctgaaccagtgcagcgtgagcaccacgcacaagtgcctcattgccgaggcctggtgctctgtgcgagacctgcccgccctgcaggaggccctgcgggacagctcgatggaggagggagtgagtgccgtggctcaccgcatcccctgccgggacatgccccccacactcatccgcaccaaccgcttcacggccagcttccagggcatcgtggatgcctacggcgtgggccgctaccaggaggtcaaccccgatggggaaatggaggctcagagaggtgaagtggctgggccaaggtcacacagctcctaagtgctccctacaccatcatcaccttccccttcctgtttgctgtgatgttcggggatgtgggccacgggctgctcatgttcctgttcgccctggccatggtccttgcggagaaccgaccggctgtgaaggccgcgcagaacgagatctggcagactttcttcaggggccgctacctgctcctgcttatgggcctgttctccatctacaccggcttcatctacaacgagtgcttcagtcgcgccaccagcatcttcccctcgggctggagtgtggccgccatggccaaccagtctggctggagtgatgcattcctggcccagcacacgatgcttaccctggatcccaacgtcaccggtgtcttcctgggaccctacccctttggcatcgatcctatttggagcctggctgccaaccacttgagcttcctcaactccttcaaga

SEQ ID NO: 189805 - DNA, 774 bp, Homo sapiens
  Payload ID: 17484
  Gene Symbol: TFPT
  Gene Name: TCF3 (E2A) fusion partner (in childhood Leukemia)
  ENST ID: ENST00000391757
  CDS Start-End: 20-601
gcttccggaggtcgcggagatggaattggagcagagagaagggaccatggcagccgtgggctttgaggagttctcagcgccgccaggctcagagttggcgttgcctcccctatttggtggccacatcctggagagcgagctggagacggaagtggagtttgtgtcaggtggtctgggcggctcagggctccgggagcgagatgaagaggaagaggcagcccggggtcggcggcggcgccagcgggaattaaatcgcagaaagtaccaggcactaggtcggcgctgccgggagatcgagcaggtgaacgagcgggtcctgaacaggctccatcaggtgcagaggataactcggaggctgcagcaggaacggaggttcctcatgagagtgctggactcctacggggatgactaccgggccagccagttcaccattgtgctggaggcaatgcggagaatgagcctccagagaaagagacactgtccccgcccagaaggactcctgcacccccagaacccggcagcccagcccccggtgaggggcccagtgggcggaagaggcggcgagtgccacgggatggacgccgagcaggaaatgcgctgactccagagctggccccggtgcagattaaggttgaggaagactttggctttgaagcagatgaggccctggattccagttgggtttctcggggtccagacaaactgctgccctacccgaccctggccagcccagcctctgactgacgcatgcccaataaactgaccccacactca

SEQ ID NO: 189806 - DNA, 804 bp, Homo sapiens
  Payload ID: 17484
  Gene Symbol: TFPT
  Gene Name: TCF3 (E2A) fusion partner (in childhood Leukemia)
  ENST ID: ENST00000391758
  CDS Start-End: 40-774
aggggtttggactgctggatctgacagactaggaggaccatggcagccgtgggctttgaggagttctcagcgccgccaggctcagagttggcgttgcctcccctatttggtggccacatcctggagagcgagctggagacggaagtggagtttgtgtcaggtggtctgggcggctcagggctccgggagcgagatgaagaggaagaggcagcccggggtcggcggcggcgccagcgggaattaaatcgcagaaagtaccaggcactaggtcggcgctgccgggagatcgagcaggtgaacgagcgggtcctgaacaggctccatcaggtgcagaggataactcggaggctgcagcaggaacggaggttcctcatgagagtgctggactcctacggggatgactaccgggccagccagttcaccattgtgctggaggatgagggcagccagggcacggatgcccccaccccaggcaatgcggagaatgagcctccagagaaagagacactgtccccgcccagaaggactcctgcacccccagaacccggcagcccagcccccggtgaggggcccagtgggcggaagaggcggcgagtgccacgggatggacgccgagcaggaaatgcgctgactccagagctggccccggtgcagattaaggttgaggaagactttggctttgaagcagatgaggccctggattccagttgggtttctcggggtccagacaaactgctgccctacccgaccctggccagcccagcctctgactgacgcatgcccaataaactgaccccacactca

SEQ ID NO: 189807 - DNA, 1205 bp, Homo sapiens
  Payload ID: 17484
  Gene Symbol: TFPT
  Gene Name: TCF3 (E2A) fusion partner (in childhood Leukemia)
  Uniprot ID: P0C1Z6
  ENST ID: ENST00000391759
  CDS Start-End: 407-1168
atttgaaacaacaactttattagcacctggcactaggcggagagaggcggtaagccgcgaggaggaaagggactcacgtcccgctgtggaccgatcctgctaagcagagaatcgctgtggccggacgacggggcgtcgagacaagaagaaagacgttggcaactcagaggactggttgcggcgttagacaagaaagcaaggcctttaagcagggattcggggtggacgtgggggtgggccgaagcgaagccggaaacaggaaactacaactcccacaaggcctagggccacgtcccgccgtcctcggctgctgagcctgatgggacaagtagttttgcgaacggcttaacctacagattgaagaggtcggaagctctgaggcccggggcttccggaggtcgcggagatggaattggagcagagagaagggaccatggcagccgtgggctttgaggagttctcagcgccgccaggctcagagttggcgttgcctcccctatttggtggccacatcctggagagcgagctggagacggaagtggagtttgtgtcaggtggtctgggcggctcagggctccgggagcgagatgaagaggaagaggcagcccggggtcggcggcggcgccagcgggaattaaatcgcagaaagtaccaggcactaggtcggcgctgccgggagatcgagcaggtgaacgagcgggtcctgaacaggctccatcaggtgcagaggataactcggaggctgcagcaggaacggaggttcctcatgagagtgctggactcctacggggatgactaccgggccagccagttcaccattgtgctggaggatgagggcagccagggcacggatgcccccaccccaggcaatgcggagaatgagcctccagagaaagagacactgtccccgcccagaaggactcctgcacccccagaacccggcagcccagcccccggtgaggggcccagtgggcggaagaggcggcgagtgccacgggatggacgccgagcaggaaatgcgctgactccagagctggccccggtgcagattaaggttgaggaagactttggctttgaagcagatgaggccctggattccagttgggtttctcggggtccagacaaactgctgccctacccgaccctggccagcccagcctctgactgacgcatgcccaataaactgaccccacactcaccccggc

SEQ ID NO: 189808 - DNA, 737 bp, Homo sapiens
  Payload ID: 17484
  Gene Symbol: TFPT
  Gene Name: TCF3 (E2A) fusion partner (in childhood Leukemia)
  ENST ID: ENST00000420715
  CDS Start-End: 17-334
tccggaggtcgcggagatggaattggagcagagagaagggaccatggcagccgtgggctttgaggagttctcagcgccgccaggctcagagttggcgttgcctcccctatttggtggccacatcctggagagcgagctggagacggaagtggagtttgtgtcaggtggtctgggcggctcagggctccgggagcgagatgaagaggaagaggcagcccggggtcggcggcggcgccagcgggaattaaatcgcagaaagtaccaggcactaggtcggcgctgccgggagatcgagcaggttcctcatgagagtgctggactcctacggggatgactaccgggccagccagttcaccattgtgctggaggatgagggcagccagggcacggatgcccccaccccaggcaatgcggagaatgagcctccagagaaagagacactgtccccgcccagaaggactcctgcacccccagaacccggcagcccagcccccggtgaggggcccagtgggcggaagaggcggcgagtgccacgggatggacgccgagcaggaaatgcgctgactccagagctggccccggtgcagattaaggttgaggaagactttggctttgaagcagatgaggccctggattccagttgggtttctcggggtccagacaaactgctgccctacccgaccctggccagcccagcctctgactgacgcatgcccaataaactgaccccacactca

SEQ ID NO: 189809 - DNA, 1205 bp, Homo sapiens; identical to SEQ ID NO: 189807
  Payload ID: 17484
  Gene Symbol: TFPT
  Gene Name: TCF3 (E2A) fusion partner (in childhood Leukemia)
  ENST ID: ENST00000617348
  CDS Start-End: 407-1168

SEQ ID NO: 189810 - DNA, 1205 bp, Homo sapiens; identical to SEQ ID NO: 189807
  Payload ID: 17484
  Gene Symbol: TFPT
  Gene Name: TCF3 (E2A) fusion partner (in childhood Leukemia)
  Uniprot ID: P0C1Z6
  ENST ID: ENST00000616798
  CDS Start-End: 407-1168

SEQ ID NO: 189811 - DNA, 1205 bp, Homo sapiens; identical to SEQ ID NO: 189807
  Payload ID: 17484
  Gene Symbol: TFPT
  Gene Name: TCF3 (E2A) fusion partner (in childhood Leukemia)
  ENST ID: ENST00000615534
  CDS Start-End: 407-1168

SEQ ID NO: 189812 - DNA, 1205 bp, Homo sapiens; identical to SEQ ID NO: 189807
  Payload ID: 17484
  Gene Symbol: TFPT
  Gene Name: TCF3 (E2A) fusion partner (in childhood Leukemia)
  ENST ID: ENST00000611514
  CDS Start-End: 407-1168

SEQ ID NO: 189813 - DNA, 1205 bp, Homo sapiens; identical to SEQ ID NO: 189807
  Payload ID: 17484
  Gene Symbol: TFPT
  Gene Name: TCF3 (E2A) fusion partner (in childhood Leukemia)
  ENST ID: ENST00000611935
  CDS Start-End: 407-1168

SEQ ID NO: 189814 - DNA, 737 bp, Homo sapiens; identical to SEQ ID NO: 189808
  Payload ID: 17484
  Gene Symbol: TFPT
  Gene Name: TCF3 (E2A) fusion partner (in childhood Leukemia)
  ENST ID: ENST00000610802
  CDS Start-End: 17-334

SEQ ID NO: 189815 - DNA, 1205 bp, Homo sapiens; identical to SEQ ID NO: 189807
  Payload ID: 17484
  Gene Symbol: TFPT
  Gene Name: TCF3 (E2A) fusion partner (in childhood Leukemia)
  ENST ID: ENST00000614788
  CDS Start-End: 407-1168

SEQ ID NO: 189816 - DNA, 775 bp, Homo sapiens
  Payload ID: 17484
  Gene Symbol: TFPT
  Gene Name: TCF3 (E2A) fusion partner (in childhood Leukemia)
  ENST ID: ENST00000615094
  CDS Start-End: 165-602
agcgaagccggaaacaggaaactacaactcccacaaggcctagggccacgtcccgccgtcctcggctgctgagcctgatgggacaagtagttttgcgaacggcttaacctacagattgaagaggtcggaagctctgaggcccggggcttccggaggtcgcggagatggaattggagcagagagaagggaccatggcagccgtgggctttgaggagttctcagcgccgccaggctcagagttggcgttgcctcccctatttggtggccacatcctggagagcgagctggagacggaagtggagtttgtgtcaggtggtctgggcggctcagggctccgggagcgagatgaagaggaagaggcagcccggggtcggcggcggcgccagcgggaattaaatcgcagaaagtaccaggcactaggtcggcgctgccgggagatcgagcaggtgaacgagcgggtcctgaacaggctccatcaggtgcagaggataactcggaggctgcagcaggaacggaggttcctcatgagagtgctggactcctacggggatgactaccgggccagccagttcaccattgtgctggagcaggaaatgcgctgactccagagctggccccggtgcagattaaggttgaggaagactttggctttgaagcagatgaggccctggattccagttgggtttctcggggtccagacaaactgctgccctacccgaccctggccagcccagcctctgactgacgcatgcccaataaactgaccccacactca

SEQ ID NO: 189817 - DNA, 1205 bp, Homo sapiens; identical to SEQ ID NO: 189807
  Payload ID: 17484
  Gene Symbol: TFPT
  Gene Name: TCF3 (E2A) fusion partner (in childhood Leukemia)
  ENST ID: ENST00000616277
  CDS Start-End: 407-1168

SEQ ID NO: 189818 - DNA, 774 bp, Homo sapiens; identical to SEQ ID NO: 189805
  Payload ID: 17484
  Gene Symbol: TFPT
  Gene Name: TCF3 (E2A) fusion partner (in childhood Leukemia)
  ENST ID: ENST00000621091
  CDS Start-End: 20-601

SEQ ID NO: 189819 - DNA, 1205 bp, Homo sapiens; identical to SEQ ID NO: 189807
  Payload ID: 17484
  Gene Symbol: TFPT
  Gene Name: TCF3 (E2A) fusion partner (in childhood Leukemia)
  ENST ID: ENST00000615620
  CDS Start-End: 407-1168

SEQ ID NO: 189820 - DNA, 804 bp, Homo sapiens; identical to SEQ ID NO: 189806
  Payload ID: 17484
  Gene Symbol: TFPT
  Gene Name: TCF3 (E2A) fusion partner (in childhood Leukemia)
  ENST ID: ENST00000611344
  CDS Start-End: 40-774

SEQ ID NO: 189821 - DNA, 1205 bp, Homo sapiens; identical to SEQ ID NO: 189807
  Payload ID: 17484
  Gene Symbol: TFPT
  Gene Name: TCF3 (E2A) fusion partner (in childhood Leukemia)
  ENST ID: ENST00000619581
  CDS Start-End: 407-1168

SEQ ID NO: 189822 - DNA, 2499 bp, Homo sapiens
  Payload ID: 17485
  Gene Symbol: TCP1
  Gene Name: t-complex 1
  Uniprot ID: P17987
  ENST ID: ENST00000321394
  CDS Start-End: 282-1952
aaaaatgccgaccccgccccttccccggagcctcacttccgtcacagtcctgtttctctccctgttgtccctgcctctttttccttcccgccgtgccccgcggccgggccggggcagccgggaagcgggtggggtggtgtgttacccagtagctcctgggacatcgctcgggtacgctccacgccgtcgcagccactgctgtggtcgccggtcggccgaggggccgcgatactggttgcccgcggtgtaagcagaattcgacgtgtatcgctgccgtcaagatggaggggcctttgtccgtgttcggtgaccgcagcactggggaaacgatccgctcccaaaacgttatggctgcagcttcgattgccaatattgtaaaaagttctcttggtccagttggcttggataaaatgttggtggatgatattggtgatgtaaccattactaacgatggtgcaaccatcctgaagttactggaggtagaacatcctgcagctaaagttctttgtgagctggctgatctgcaagacaaagaagttggagatggaactacttcagtggttattattgcagcagaactcctaaaaaatgcagatgaattagtcaaacagaaaattcatcccacatcagttattagtggctatcgacttgcttgcaaggaagcagtgcgttatatcaatgaaaacctaattgttaacacagatgaactgggaagagattgcctgattaatgctgctaagacatccatgtcttccaaaatcattggaataaatggtgatttctttgctaacatggtagtagatgctgtacttgctattaaatacacagacataagaggccagccacgctatccagtcaactctgttaatattttgaaagcccatgggagaagtcaaatggagagtatgctcatcagtggctatgcactcaactgtgtggtgggatcccagggcatgcccaagagaatcgtaaatgcaaaaattgcttgccttgacttcagcctgcaaaaaacaaaaatgaagcttggtgtacaggtggtcattacagaccctgaaaaactggaccaaattagacagagagaatcagatatcaccaaggagagaattcagaagatcctggcaactggtgccaatgttattctaaccactggtggaattgatgatatgtgtctgaagtattttgtggaggctggtgctatggcagttagaagagttttaaaaagggaccttaaacgcattgccaaagcttctggagcaactattctgtcaaccctggccaatttggaaggtgaagaaacttttgaagctgcaatgttgggacaggcagaagaagtggtacaggagagaatttgtgatgatgagctgatcttaatcaaaaatactaaggctcgtacgtctgcatcgattatcttacgtggggcaaatgatttcatgtgtgatgagatggagcgctctttacatgatgcactttgtgtagtgaagagagttttggagtcaaaatctgtggttcccggtgggggtgctgtagaagcagccctttccatataccttgaaaactatgcaaccagcatggggtctcgggaacagcttgcgattgcagagtttgcaagatcacttcttgttattcccaatacactagcagttaatgctgcccaggactccacagatctggttgcaaaattaagagcttttcataatgaggcccaggttaacccagaacgtaaaaatctaaaatggattggtcttgatttgagcaatggtaaacctcgagacaacaaacaagcaggggtgtttgaaccaaccatagttaaagttaagagtttgaaatttgcaacagaagctgcaatcaccattcttcgaattgatgatcttattaaattacatccagaaagtaaagatgataaacatggaagttatgaagatgctgttcactctggagcccttaatgattgatctgatgttccttttatttataacaatgttaaatgcaattgtcttgtaccttgagttgagtattacacattaaagtaaagtacaagctgtaaacttgggtttttgtgatgtaggaaatggtttccatctgtactttggtcctctgatttcacatattgcaacctagtactttattagtttaaaaagaaattgaggttgttcaaagtttaagcaattcattctctctgaacacacattgctattcccatcccacccccaatgcacagggctgcaacaccacgacttctgcccattctctccagtgtgtgtaacagggtcacaagaattcgacagccagatgctccaagagggtggcccaaggctatagcccctccttcaatattgacctaacgggggagaaaagatttagattgtttattcttctgtggacacagtttaaaatcttaaacttgtctttttcctcttaatgtatcagcatgctaccctttcaaactcaaattttcattttaactgcttaggaataaatttacacctttgtgaaaattca

SEQ ID NO: 189823 - DNA, 1878 bp, Homo sapiens
  Payload ID: 17485
  Gene Symbol: TCP1
  Gene Name: t-complex 1
  ENST ID: ENST00000392168
  CDS Start-End: 615-1820
gtcctgtttctctccctgttgtccctgcctctttttccttcccgccgtgccccgcggccgggccggggcagccgggaagcgggtggggtggtgtgttacccagtagctcctgggacatcgctcgggtacgctccacgccgtcgcagccactgctgtggtcgccggtcggccgaggggccgcgatactggttgcccgcggtgtaagcagaattcgacgtgtatcgctgccgtcaagatggaggggcctttgtccgtgttcggtgaccgcagcactggggaaacgatccgctcccaaaacggatgtaaccattactaacgatggtgcaaccatcctgaagttactggaggtagaacatcctgcagctaaagttctttgtgagctggctgatctgcaagacaaagaagttggagatggaactacttcagtggttattattgcagcagaactcctaaaaaatgcagatgaattagtcaaacagaaaattcatcccacatcagttattagtggctatcgacttgcttgcaaggaagcagtgcgttatatcaatgaaaacctaattgttaacacagatgaactgggaagagattgcctgattaatgctgctaagacatccatgtcttccaaaatcattggaataaatggtgatttctttgctaacatggtagtagatgctgtacttgctattaaatacacagacataagaggccagccacgctatccagtcaactctgttaatattttgaaagcccatgggagaagtcaaatggagagtatgctcatcagtggctatgcactcaactgtgtggtgggatcccagggcatgcccaagagaatcgtaaatgcaaaaattgcttgccttgacttcagcctgcaaaaaacaaaaatgaagcttggtgtacaggtggtcattacagaccctgaaaaactggaccaaattagacagagagaatcagatatcaccaaggagagaattcagaagatcctggcaactggtgccaatgttattctaaccactggtggaattgatgatatgtgtctgaagtattttgtggaggctggtgctatggcagttagaagagttttaaaaagggaccttaaacgcattgccaaagcttctggagcaactattctgtcaaccctggccaatttggaaggtgaagaaacttttgaagctgcaatgttgggacaggcagaagaagtggtacaggagagaatttgtgatgatgagctgatcttaatcaaaaatactaaggctcgtacgtctgcatcgattatcttacgtggggcaaatgatttcatgtgtgatgagatggagcgctctttacatgatgcactttgtgtagtgaagagagttttggagtcaaaatctgtggttcccggtgggggtgctgtagaagcagccctttccatataccttgaaaactatgcaaccagcatggggtctcgggaacagcttgcgattgcagagtttgcaagatcacttcttgttattcccaatacactagcagttaatgctgcccaggactccacagatctggttgcaaaattaagagcttttcataatgaggcccaggttaacccagaacgtaaaaatctaaaatggattggtcttgatttgagcaatggtaaacctcgagacaacaaacaagcaggggtgtttgaaccaaccatagttaaagttaagagtttgaaatttgcaacagaagctgcaatcaccattcttcgaattgatgatcttattaaattacatccagaaagtaaagatgataaacatggaagttatgaagatgctgttcactctggagcccttaatgattgatctgatgttccttttatttataacaatgttaaatgcaattgtcttgtaccttgagttg

SEQ ID NO: 189824 - DNA, 1671 bp, Homo sapiens
  Payload ID: 17485
  Gene Symbol: TCP1
  Gene Name: t-complex 1
  ENST ID: ENST00000420894
  CDS Start-End: 105-1406
tccacgccgtcgcagccactgctgtggtcgccggtcggccgaggggccgcgatactggttgcccgcggtgtaagcagaattcgacgtgtatcgctgccgtcaagatggaggggcctttgtccgtgttcggtgaccgcagcactggggaaacgatccgctcccaaaacgttatggctgcagcttcgattgccaatattgtaaaaagttctcttggtccagttggcttggataaaatgttggtggatgatattggtgatgtaaccattactaacgatggtgcaaccatcctgaagttactggaggtagaacatcctgcagctaaagttctttgtgagctggctgatctgcaagacaaagaagttggagatggaactacttcagtggttattattgcagcagaactcctaaaaaatgcagatgaattagtcaaacagaaaattcatcccacatcagttattagtggctatcgacttgcttgcaaggaagcagtgcgttatatcaatgaaaacctaattgttaacacagatgaactgggaagagattgcctgattaatgctgctaagacatccatgtcttccaaaatcattggaataaatggtgatttctttgctaacatggtagtagatgctgtacttgctattaaatacacagacataagaggccagccacgctatccagtcaactctgttaatattttgaaagcccatgggagaagtcaaatggagagtatgctcatcagtggctatgcactcaactgtgtggtgggatcccagggcatgcccaagagaatcgtaaatgcaaaaattgcttgccttgacttcagcctgcaaaaaacaaaaatgaagcttggtgtacaggtggtcattacagaccctgaaaaactggaccaaattagacagagagaatcagatatcaccaaggagagaattcagaagatcctggcaactggtgccaatgttattctaaccactggtggaattgatgatatgtgtctgaagtattttgtggaggctggtgctatggcagttagaagagttttaaaaagggaccttaaacgcattgccaaagcttctggagcaactattctgtcaaccctggccaatttggaaggtgaagaaacttttgaagctgcaatgttgggacaggcagaagaagtggtacaggagagaatttgtgatgatgagctgatcttaatcaaaaatactaaggctcgtacgtctgcatcgattatcttacgtggggcaaatgatttcatgtgtgatgagatggagcgctctttacatgatgcactttgtgtagtgaagagagttttggagtcaaaatctgtggttcccggtgggggtgctgtagaagcagccctttccatataccttgaaaactatgcaaccagcatggattggtcttgatttgagcaatggtaaacctcgagacaacaaacaagcaggggtgtttgaaccaaccatagttaaagttaagagtttgaaatttgcaacagaagctgcaatcaccattcttcgaattgatgatcttattaaattacatccagaaagtaaagatgataaacatggaagttatgaagatgctgttcactctggagcccttaatgattgatctgatgttccttttatttataacaatgttaaatgcaattgtcttgtaccttgagttgag

SEQ ID NO: 189825 - DNA, 691 bp, Homo sapiens
  Payload ID: 17485
  Gene Symbol: TCP1
  Gene Name: t-complex 1
  ENST ID: ENST00000537390
  CDS Start-End: 358-691
tttttccttcccgccgtgccccgcggccgggccggggcagccgggaagcgggtggggtggtgtgttacccagtagctcctgggacatcgctcgggtacgctccacgccgtcgcagccactgctgtggtcgccggtcggccgaggggccgcgatactggttgcccgcggtgtaagcagaattcgacgtgtatcgctgccgtcaagatggaggggcctttgtccgtgttcggtgaccgcagcactggggaaacgatccgctcccaaaacgataaagagagttttaatgagcaaaaaacttgcagaatctgaaggaaaaggctggtatagctgtacgaagtggcagagcatgaaattgttatggctgcagcttcgattgccaatattgtaaaaagttctcttggtccagttggcttggataaaatgttggtggatgatattggtgatgtaaccattactaacgatggtgcaaccatcctgaagttactggaggtagaacatcctgcagctaaagttctttgtgagctggctgatctgcaagacaaagaagttggagatggaactacttcagtggttattattgcagcagaactcctaaaaaatgcagatgaattagtcaaacagaaaattcatcccacatcagttattagtggctatcgacttgcttgcaaggaagcagtgcgttatatcaatg

SEQ ID NO: 189826 - DNA, 1403 bp, Homo sapiens
  Payload ID: 17485
  Gene Symbol: TCP1
  Gene Name: t-complex 1
  ENST ID: ENST00000544255
  CDS Start-End: 324-1322
tcctgggacatcgctcgggtacgctccacgccgtcgcagccactgctgtggtcgccggtcggccgaggggccgcgatactggttgcccgcggtgtaagcagaattcgacgtgtatcgctgccgtcaagatggaggggcctttgtccgtgttcggtgaccgcagcactggggaaacgatccgctcccaaaacggatgtaaccattactaacgatggtgcaaccatcctgaagttactggaggtagaacatcctgcagctaaagttctttgtgagctggctgatctgcaagacaaagaagttggagatggaactacttcagtggcatgcccaagagaatcgtaaatgcaaaaattgcttgccttgacttcagcctgcaaaaaacaaaaatgaagcttggtgtacaggtggtcattacagaccctgaaaaactggaccaaattagacagagagaatcagatatcaccaaggagagaattcagaagatcctggcaactggtgccaatgttattctaaccactggtggaattgatgatatgtgtctgaagtattttgtggaggctggtgctatggcagttagaagagttttaaaaagggaccttaaacgcattgccaaagcttctggagcaactattctgtcaaccctggccaatttggaaggtgaagaaacttttgaagctgcaatgttgggacaggcagaagaagtggtacaggagagaatttgtgatgatgagctgatcttaatcaaaaatactaaggctcgtacgtctgcatcgattatcttacgtggggcaaatgatttcatgtgtgatgagatggagcgctctttacatgatgcactttgtgtagtgaagagagttttggagtcaaaatctgtggttcccggtgggggtgctgtagaagcagccctttccatataccttgaaaactatgcaaccagcatggggtctcgggaacagcttgcgattgcagagtttgcaagatcacttcttgttattcccaatacactagcagttaatgctgcccaggactccacagatctggttgcaaaattaagagcttttcataatgaggcccaggttaacccagaacgtaaaaatctaaaatggattggtcttgatttgagcaatggtaaacctcgagacaacaaacaagcaggggtgtttgaaccaaccatagttaaagttaagagtttgaaatttgcaacagaagctgcaatcaccattcttcgaattgatgatcttattaaattacatccagaaagtaaagatgataaacatggaagttatgaagatgctgttcactctggagcccttaatgattgatctgatgttccttttatttataacaatgttaaatgcaattgtcttgtaccttgagttgagtattacacattaaagtaaagt

SEQ ID NO: 189827 - DNA, 706 bp, Homo sapiens
  Payload ID: 17485
  Gene Symbol: TCP1
  Gene Name: t-complex 1
  ENST ID: ENST00000539948
  CDS Start-End: 299-706
tttgtttttattttttgtagaaatgggtttcgctatgttgcccaaaggggtctcaaactcctggcatcaagcgatcctcctgcctcggcctcgcagtgttgggattacacctgtgagccacagtgtctggccccatttacactcttagtaggtggtttttaaataattaacacagatttgtagatttgggaaatacgggggctgttggatgtcatttacctttaggctgaaattactgtctttcagagttgtggcttatcctcatttcttttttatttttaattgattgtctacagttatggctgcagcttcgattgccaatattgtaaaaagttctcttggtccagttggcttggataaaatgttggtggatgatattggtgatgtaaccattactaacgatggtgcaaccatcctgaagttactggaggtagaacatcctgcagctaaagttctttgtgagctggctgatctgcaagacaaagaagttggagatggaactacttcagtggttattattgcagcagaactcctaaaaaatgcagatgaattagtcaaacagaaaattcatcccacatcagttattagtggctatcgacttgcttgcaaggaagcagtgcgttatatcaatgaaaacctaattgttaacacagatgaactgggaagagattgcctgattaatgctgctaagacatccatgtcttcc

SEQ ID NO: 189828 - DNA, 918 bp, Homo sapiens
  Payload ID: 17485
  Gene Symbol: TCP1
  Gene Name: t-complex 1
  ENST ID: ENST00000538530
  CDS Start-End: 117-314
gctcgggtacgctccacgccgtcgcagccactgctgtggtcgccggtcggccgaggggccgcgatactggttgcccgcggtgtaagcagaattcgacgtgtatcgctgccgtcaagatggaggggcctttgtccgtgttcggtgaccgcagcactggggaaacgatccgctcccaaaacgttatggctgcagcttcgattgccaatattgtaaaaagttctcttggtccagttggcttggataaaatgttggtggatgatattggttggttcatattttttcctgcgaatttcttaggatgtaaccattactaacgatggtgcaaccatcctgaagttactggaggtagaacatcctgcagctaaagttctttgtgagctggctgatctgcaagacaaagaagttggagatggaactacttcagtgaccagtgaatgttttctcaacaggttattattgcagcagaactcctaaaaaatgcagatgaattagtcaaacagaaaattcatcccacatcagttattagtggctatcgacttgcttgcaaggaagcagtgcgttatatcaatgaaaacctaattgttaacacagatgaactgggaagagattgcctgattaatgctgctaagacatccatgtcttccaaaatcattggaataaatggtgatttctttgctaacatggtagtagatgctgtacttgctattaaatacacagacataagaggccagccacgctatccagtcaactctgttaatattttgaaagcccatgggagaagtcaaatggagagtatgctcatcagtggctatgcactcaactgtgtggtgggatcccagggcatgcccaagagaatcgtaaatgcaaaaattgcttgccttgacttcagcctgcaaaaaacaaaaatgaagcttggtg

SEQ ID NO: 189829 - DNA, 780 bp, Homo sapiens
  Payload ID: 17485
  Gene Symbol: TCP1
  Gene Name: t-complex 1
  ENST ID: ENST00000539756
  CDS Start-End: 118-780
cgctcgggtacgctccacgccgtcgcagccactgctgtggtcgccggtcggccgaggggccgcgatactggttgcccgcggtgtaagcagaattcgacgtgtatcgctgccgtcaagatggaggggcctttgtccgtgttcggtgaccgcagcactggggaaacgatccgctcccaaaacggcatgcccaagagaatcgtaaatgcaaaaattgcttgccttgacttcagcctgcaaaaaacaaaaatgaagcttggtgtacaggtggtcattacagaccctgaaaaactggaccaaattagacagagagaatcagatatcaccaaggagagaattcagaagatcctggcaactggtgccaatgttattctaaccactggtggaattgatgatatgtgtctgaagtattttgtggaggctggtgctatggcagttagaagagttttaaaaagggaccttaaacgcattgccaaagcttctggagcaactattctgtcaaccctggccaatttggaaggtgaagaaacttttgaagctgcaatgttgggacaggcagaagaagtggtacaggagagaatttgtgatgatgagctgatcttaatcaaaaatactaaggctcgtacgtctgcatcgattatcttacgtggggcaaatgatttcatgtgtgatgagatggagcgctctttacatgatgcactttgtgtagtgaagagagttttggagtcaaaatctgtggttcccggtgggggtgctgtagaagcagccctttccatatacctt

SEQ ID NO: 189830 - DNA, 557 bp, Homo sapiens
  Payload ID: 17485
  Gene Symbol: TCP1
  Gene Name: t-complex 1
  ENST ID: ENST00000538128
  CDS Start-End: 381-557
tttttccttcccgccgtgccccgcggccgggccggggcagccgggaagcgggtggggtggtgtgttacccagtagctcctgggacatcgctcgggtacgctccacgccgtcgcagccactgctgtggtcgccggtcggccgaggggccgcgatactggttgcccgcggtgtaagcagaattcgacgtgtatcgctgccgtcaagatggaggggcctttgtccgtgttcggtgaccgcagcactggggaaacgatccgctcccaaaacggatgtaaccattactaacgatggtgcaaccatcctgaagttactggaggtagaacatcctgcagctaaagttctttgtgagctggctgatctgcaagacaaagaagttggagatggaactacttcagtgggaagcagtgcgttatatcaatgaaaacctaattgttaacacagatgaactgggaagagattgcctgattaatgctgctaagacatccatgtcttccaaaatcattggaataaatggtgatttctttgctaacatggtagtagatgctgtacttgctatt

SEQ ID NO: 189831 - DNA, 535 bp, Homo sapiens
  Payload ID: 17485
  Gene Symbol: TCP1
  Gene Name: t-complex 1
  ENST ID: ENST00000536394
  CDS Start-End: 262-535
actcgagtgcattgaccccaggagacggcagcgctaacttagcagagcgtttgctgtcaggcctttggatacctacagagcttactgtttcttgatagattcctaatttttttcgtaaacaaatctgaaagtcaccaccttccccgttgactaccgatttctctcctcacagataaagagagttttaatgagcaaaaaacttgcagaatctgaaggaaaaggctggtatagctgtacgaagtggcagagcatgaaattgttatggctgcagcttcgattgccaatattgtaaaaagttctcttggtccagttggcttggataaaatgttggtggatgatattggtgatgtaaccattactaacgatggtgcaaccatcctgaagttactggaggtagaacatcctgcagctaaagttctttgtgagctggctgatctgcaagacaaagaagttggagatggaactacttcagtggttattattgcagcagaactcctaaaaaatgcagatgaattagtcaaacagaaaattcatc

SEQ ID NO: 189832 - DNA, 561 bp, Homo sapiens
  Payload ID: 17485
  Gene Symbol: TCP1
  Gene Name: t-complex 1
  ENST ID: ENST00000543517
  CDS Start-End: 135-437
agtagctcctgggacatcgctcgggtacgctccacgccgtcgcagccactgctgtggtcgccggtcggccgaggggccgcgatactggttgcccgcggtgtaagcagaattcgacgtgtatcgctgccgtcaagatggaggggcctttgtccgtgttcggtgaccgcagcactggggaaacgatccgctcccaaaacgttatggctgcagcttcgattgccaatattgtaaaaagttctcttggtccagttggcttggataaaatgttggtggatgatattggtgatgtaaccattactaacgatggtgcaaccatcctgaagttactggaggtagaacatcctgcagctaaagttctttgtgagctggctgatctgcaagacaaagaagttggagatggaactacttcagtgggaagcagtgcgttatatcaatgaaaacctaattgttaacacagatgaactgggaagagattgcctgattaatgctgctaagacatccatgtcttccaaaatcattggaataaatggtgatttctttgctaacatggtagtagatgct

SEQ ID NO: 189833 - DNA, 2250 bp, Homo sapiens
  Payload ID: 17486
  Gene Symbol: TCP10
  Gene Name: t-complex 10
  Uniprot ID: Q12799
  ENST ID: ENST00000366827
  CDS Start-End: 213-1109
aagacagaaagtccgttggaaccgtcggctgctctctggtctctggagatgaggcgggaggacttggggacagctgtggggacacggcccagatgctctggtcccagcagaagtgactggcggggaccaggatgctggagggtcagctcgaggccgggtagcccaaggagggcacccacccagaagacccgtgcccgggagctggggctgccatggagaagacacctgcagcagccgaggtccccagggaggacagcaatgccggggagatgccgtcattacagcagcagatcaccagcctccaccaagagctcgggagacagcagtcgctgtgggctgatattcacagaaaactccagagtcatatggatgccttgaggaagcagaaccgggagctccgagaagagctgagaggcctgcagcggcagcagtgggaagccgggaagaaacccgcagcgtccccacacgcggggcgagaatcacacactctggcattggaacctgcttttggaaaaatttcacatctgtcagctgatgaagacacaacgcccaaatacgctggccgcaagagtcagagtgccactctcctgggacaaagatggtcatctaaccacttagctcctccaaagccaatgagtttaaagacagaaagaattaactcggggaaaacaccaccacaggaagatagagagaaaagtcctcccgggagacgtcaagacagaagtccagcacccactggaaggccgactcccggtgcagaaagacggggggtgtctgaagacggaaagattatgcatccatcttcccgaagtccgcaaaactccggtggcagaaaatcaccagtgcaggcttcccaggccaccacgctgcaggagcagacggcagcagccagaggagctgacagaagctcatcagtcttagggagttctgaaggcggatttctcagccgcgttcaagctgacgagttcgccagttctgccccagacagtgcagagcggcagaaaaattctaccccaatggctccaaagaaatcgtgtttcccgacgggacggtggaacatctcaaggatggacaggaagagaccttatttcctgatgggacaatcgtaagggtggaaaggaacggcgacaaaaccattgtgctcagcaacgggcagaaagaaatccacacagcccggttcaagaggagggagtacccggatggcaccgtcaagactgtgtattgcagcggctgtcaggaaaccaagtatgcctccgggagggttaagatcaaagatgaagctggaaatgtcgtcctggacgagaagcagatgagccctcaacacgcagcatcacatgggaaatgccaattgcagatttttgctaaaacagacaaaaactaataacatattagctgccctaaatgatcttggagagccaccaaaactttaggactacccaagtcatctagaaattgcaaaggaaaagacattctctcccctatttaggaaacttggttagagcagcacacgtcggagaacaggaggctcacaaaagaacgattttcagtgcccccagcaaggctgcaccctccttgatcatcacaggggccatttctgccttgtgatggacccaggaggtctctgcagagcaagtgccgttggaccagctgattcacaaagtgctgagcccctcttccccgtgtggcccaccccaggcacggctcattcctccagaattatagaagctcagcctggcctgctcccctctggtcaccgacacccctgtcctcgctgggacaagagggagacaattctagtcactacaaggacacccaaggggtgtctgagtcagggctccaatagtgcagttatcgtggcctctcgcagcccggggagcacgtcgcctcttgaaactcgagatttcttaaatcccaatataaaaatgataaccagttacttacttcttttgttgttttgcaggccacctagaaatacaaaatgccaattcacctaatttttatactgaaatgtagatgcccccaacatgattttggaaagatataatttcttgaaaatcttatcagaagatgcatagttaatttttttccattatgtactcatgtttttatgaaatacaataccatattttagggccagggattattttaaccttaaaattgtgcatgcatcattgtagccctcaatatttggtaatgctatttaaagtgactcaagaagcatgtgctatctggctttgaaggaaaaaaaaa

SEQ ID NO: 189834 - DNA, 2141 bp, Homo sapiens
  Payload ID: 17486
  Gene Symbol: TCP10
  Gene Name: t-complex 10
  ENST ID: ENST00000397829
  CDS Start-End: 169-1149
ggagatgaggcgggaggacttggggacagctgtggggacacggcccagatgctctggtcccagcagaagtgactggcggggaccaggatgctggagggtcagctcgaggccgggtagcccaaggagggcacccacccagaagacccgtgcccgggagctggggctgccatggagaagacacctgcagcagccgaggtccccagggaggacagcaatgccggggagatgccgtcattacagcagcagatcaccagcctccaccaagagctcgggagacagcagtcgctgtgggctgatattcacagaaaactccagagtcatatggatgccttgaggaagcagaaccgggagctccgagaagagctgagaggcctgcagcggcagcagtgggaagccgggaagaaacccgcagcgtccccacacgcggggcgagaatcacacactctggcattggaacctgcttttggaaaaatttcacatctgtcagctgatgaagacacaacgcccaaatacgctggccgcaagagtcagagtgccactctcctgggacaaagatggtcatctaaccacttagctcctccaaagccaatgagtttaaagacagaaagaattaactcggggaaaacaccaccacaggaagatagagagaaaagtcctcccgggagacgtcaagacagaagtccagcacccactggaaggccgactcccggtgcagaaagacggggggtgtctgaagacggaaagattatgcatccatcttcccgaagtccgcaaaactccggtggcagaaaatcaccagtgcaggcttcccaggccaccacgctgcaggagcagacggcagcagccagaggagctgacagaagctcatcagtcttagggagttctgaaggcggatttctcagccgcgttcaagctgacgagttcgccagttctgccccagacagtgcagagcggcagaatcttcctgtaaacccaccatcttccctggaaatagcacaggccatggacactaagatgaaaaaggaggaagtacaggaagaaaaacgacatccaaagggcaaggcagatgactgccggcggtccggtttcccgagtgaatttccaggagctctgcacgccgctccctccagacaggacatggggccctgacctggaggccaggcgtttctagcattgttgactgccagtttattcccagtaaataaagcaatacgcttttcaggaggaagatttgttttaaatacttaaaaaaaaacccaaaactatagcctcaaatatcttccagccaccacattttagcccttgaggagagctcagttccggaaggacgcgtcaaggtggcggtggtcggcattgactcaggaaggggtgggaagaggcacctgctgcggctgcggctgcggctacagtgttttgtgagctccgaggagacccagtcctgcctggggcagcacatcatcgctgcttcttcagctcaacagttcgttcatctcacgcctcttgctggcctgttagaaactgggagtcggcctcaggctagctttgctgagggaactctgcctcagtaaaagcgaattcatgtcttgcaagcgggtaaagcatttggataaatgaacaacagggaatgctacttgcagtaacagtttgaattcactgaaatgcttttgtctttagcgcagtggttgtagtggtttgtcaggggagaaggaaacccacatcatttgagcacctgaccttgccatccccgtaggcaggtccatgagacataagtgatgctcctccttggctaagtgcatggaggaaccaatcgctgaagctcatgaaaccacgaagatgaggacacaagaactaggtaacgcgctgtgccctctgctagcgcgatccttcctttctccccacaaccagcggtcacccacctctgcctgcccctatgtctctggctcccccaccctccctcccaggtcttcagcactttcctcttctcgtgactcatcttgcatctacttcttgtgtatcttgcattggatatgccaaagttctttccttttttgtgttttctttcttttaataatataaactccaaaatagattgtttgattcttttcatgtggaacatttaaaatattatttgtgctttatta

SEQ ID NO: 189835 - DNA, 374 bp, Homo sapiens
  Payload ID: 17486
  Gene Symbol: TCP10
  Gene Name: t-complex 10
  ENST ID: ENST00000485157
  CDS Start-End: 88-374
accaggatgctggagggtcagctcgaggccgggtagcccaaggagggcacccacccagaagacccgtgcccgggagctggggctgccatggagaagacacctgcagcagccgaggtccccagggaggacagcaatgccggggagatgccgtcattacagcagcagatcaccagcctccaccaagagctcgggagacagcagtcgctgtgggctgatattcacagaaaactccagagtcatatggatgccttgaggaagcagaaccgggagctccgagaagagctgagaggcctgcagcggcagcagtgggaagccgggaagaaacccgcagcgtccccacacgcggggcgagaatcacacactctggtaccaaa

SEQ ID NO: 189836 - DNA, 3219 bp, Homo sapiens
  Payload ID: 17486
  Gene Symbol: TCP10
  Gene Name: t-complex 10
  ENST ID: ENST00000460930
  CDS Start-End: 1-624
gggacacggcccagatgctctggtcccagcagaagtgactggcggggaccaggtgaggtgatgaggtctgttagtggggctgagggaaggggtcttccccagactgagggggtcacaagtttggggccgaggacactggggtatcccctcggaggagcgggaaagaagaagctttctcagggctgtgaggaccgcggacccttgcccacttccacagaaactgtcccaatccccgcggggaaggaacagccagggatccggttactggcattggaacctgcttttggaaaaatttcacatctgtcagctgatgaagacacaacgcccaaatacgctggccgcaagagtcagagtgccactctcctgggacaaagatggtcatctaaccacttagctcctccaaagccaatgagtttaaagacagaaagaattaactcggggaaaacaccaccacaggaagatagagagaaaagtcctcccgggagacgtcaagacagaagtccagcacccactggaaggccgactcccggtgcagaaagacggggggtgtctgaagacggaaaggtgacctcggaaacctgggtcactctacactggcagcatggaaaattcagattcagatgaagttccacttaggtctcataagagtactcaatttgttattcgaaatagacctagtaatttattaacctaattatgtttctatagataaaactttgaatttctgcagacatgtctttaatgctataaaagcaaataaattgaattgggttttaaaaagcaaacaacttgaattgggttttaaaaatcaattactttcccgagctccgtaattggtatatttctgcagagtctttaaaagaattgatctaccttgtagtgctgagctcagggctgttgggtgagccctggggtcttgctggaaattgtggatggctgaagatggcttcgtgctcccagcctttgggctcgaggcattgccggctgcagggaccttgtgacaaggggggcctctgactgtctttgccccagattatgcatccatcttcccgaagtccgcaaaactccggtggcagaaaatcaccagtgcaggcttcccaggccaccacgctgcaggagcagacggcagcagccagaggagctggtgagcagggtcgagggctcctaactgtttccatgcttcctgtaaagtggggggctttcttgtggatacgcgtgagcagaacatcttactacggcaaggacatgtccttcatggagctgcctaatttctgaccacttttgtccgattccctggttgggtcctcacctgggagtcttgccgacacccctagccctccaccccacacacagcccacatgccggtctccaggggccgtggctggagattccgaatcctaccggccacttcccctgagtacactcccagctgaaggcgtctggctgggcctgggcggactcgggggctttgttcccttttctccgtttgcccgcccatggcgttgctgccacgctgatggagcgccctctcatccggcacctgcccggcctctttcctgagcccagctctgtccatgcagatgtgggtgctttctgcattgggggtcccaccgggaggagccaacagtacccctggtagagttgggaaagaactccttcctcacgttactgccagaaaatgaccatagcagcttcacaaaccccgcaggaacctgtcttcctaaagaaatggagcccatgaggtggccgagcctcaggtgtggtccttatgcacagcacagcccaagcctgtgggcacaactcgccctgggctgcctggcacctggactctttcctatcctcggcccaggcctgtgtggccctgtagggccaaacccgacactgtcttcctcctgggtccgctccctgggcctcctgcaccccagactgcttcatggcctctgcagggagcttcacagaggtgagactggtgccatctgtctgcttcagaccaccccaggctctgcgtaccctcacagtcccctctgcgctcctctacggggtggggaagcccttcccatcaggtcagcaccagcctggccaccttgtttctgctgccccctcctcttcaggcccccagaccagactttagttacttgctgctgccgggcagaactggaggccttgtcttgcacaacctccacaacctccaggcatcatctcagctgacagtgacgccatcctggggaagaccccccggatcccgggctctcctggaagcctgtgatgctccttcaccacagcccctgtcccttcataggtcccataagccagtggtgcagggatctggcctttctctcctgtgtctgcctcctgcagaaccatgagcagcttcagggccgaggcagtgcctttccatccgtgaatctcctgagccatcagaatactcgagagagagtgatgcccaagaaatactgactgagtgtattcatgaaagaattaatgttcttacaggatcacttgttgttgaactgacctgacatgtgtatagtgatctcatgaacaagagggaagctgtgcatccattcacttcaattggatttagcaatcgcagtaggataatgatatttccacaatgtatatgctctgtccctttaaatttaactttttgctttttagacagaagctcatcagtcttagggagttctgaaggcggatttctcagccgcgttcaagctgacgagttcgccagttctgccccagacagtgcagagcggcaggtaggtggctgagtggcttctgtgagggcggcccacccggttcccctcagggagacctgagaaggtgaccttttcgtcctggggaagtgagattcggagccggtgtcatgagatggttgcatcttcccatcttctcaacaagaacagaaaattaagatgattccaaatgtctctttatttcctgaagttcagcctttcaaacagagacttttttttatagatttaagttggttgcatttagcacaaacaagattaatgttttttatgacttaagagttcccctagtcagagtttcattttttatcattttgatttacagttctcagttgacattaatagactcgaaggcaagaatagcaaacatacttctaagccctagctaggggccgacttgtaacatgctatattttacaaaaaaaaaaagtcaataaaataaaattattttctctacgccaggaaa

SEQ ID NO: 189837 - DNA, 646 bp, Homo sapiens
  Payload ID: 17486
  Gene Symbol: TCP10
  Gene Name: t-complex 10
  ENST ID: ENST00000476779
  CDS Start-End: 152-475
agtgactggcggggaccagaaactgtcccaatccccgcggggaaggaacagccagggatccggttactggatgctggagggtcagctcgaggccgggtagcccaaggagggcacccacccagaagacccgtgcccgggagctggggctgccatggagaagacacctgcagcagccgaggtccccagggaggacagcaatgccggggagatgccgtcattacagcagcagatcaccagcctccaccaagagctcgggagacagcagtcgctgtgggctgatattcacagaaaactccagagtcatatggatgccttgaggaagcagaaccgggagctccgagaagagctgagaggcctgcagcggcagcagtgggaagccgggaagaaacccgcagcgtccccacacgcggggcgagaatcacacactctggtaccaaaggcgcatttgtgtttttgtatcatttgcgtcgtgtaaatatagcgtccccgtaaagatgtgggctttgttgctgggtgacgtggtatctctcacgttccaggtggtgggagggcttgctatctttccatcagctccatttcccacaagtaaagattaaagaactggatacatcaggcatctcacctgacactccagcagacagaagca

SEQ ID NO: 189838 - DNA, 2182 bp, Homo sapiens
  Payload ID: 17486
  Gene Symbol: TCP10
  Gene Name: t-complex 10
  ENST ID: ENST00000617120
  CDS Start-End: 132-1190
aagacagaaagtccgttggaaccgtcggctgctctctggtctctggagatgaggcgggaggacttggggacagctgtggggacacggcccagatgctctggtcccagcagaagtgactggcggggaccaggatgctggagggtcagctcgaggccgggcccaaggagggcacccacccagaagacccgtgcccgggagctggggctgccatggagaagacacctgcagcagccgaggtccccagggaggacagcaatgccggggagatgccgtcattacagcagcagatcaccagcctccaccaagagctcgggagacagcagtcgctgtgggctgatattcacagaaaactccagagtcatatggatgccttgaggaagcagaaccgggagctccgagaagagctgagaggcctgcagcggcagcagtgggaagccgggaagaaacccgcagcgtccccacacgcggggcgagaatcacacactctggcattggaacctgcttttggaaaaatttcacatctgtcagctgatgaagacacaacgcccaaatacgctggccgcaagagtcagagtgccactctcctgggacaaagatggtcatctaaccacttagctcctccaaagccaatgagtttaaagacagaaagaattaactcggggaaaacaccaccacaggaagatagagagaaaagtcctcccgggagacgtcaagacagaagtccagcacccactggaaggccgactcccggtgcagaaagacggggggtgtctgaagacggaaagattatgcatccatcttcccgaagtccgcaaaactccggtggcagaaaatcaccagtgcaggcttcccaggccaccacgctgcaggagcagacggcagcagccagaggagctgacagaagctcatcagtcttagggagttctgaaggcggatttctcagccgcgttcaagctgacgagttcgccagttctgccccagacagtgcagagcggcagaatcttcctgtaaacccaccatcttccctggaaatagcacaggccatggacactaagatgaaaaaggaggaagtacaggaagaaaaacgacatccaaagggcaaggcagatgactgccggcggtccggtttcccgagtgaatttccaggagctctgcacgccgctccctccagacaggacatggggccctgacctggaggccaggcgtttctagcattgttgactgccagtttattcccagtaaataaagcaatacgcttttcaggaggaagatttgttttaaatacttaaaaaaaaacccaaaactatagcctcaaatatcttccagccaccacattttagcccttgaggagagctcagttccggaaggacgcgtcaaggtggcggtggtcggcattgactcaggaaggggtgggaagaggcacctgctgcggctgcggctgcggctacagtgttttgtgagctccgaggagacccagtcctgcctggggcagcacatcatcgctgcttcttcagctcaacagttcgttcatctcacgcctcttgctggcctgttagaaactgggagtcggcctcaggctagctttgctgagggaactctgcctcagtaaaagcgaattcatgtcttgcaagcgggtaaagcatttggataaatgaacaacagggaatgctacttgcagtaacagtttgaattcactgaaatgcttttgtctttagcgcagtggttgtagtggtttgtcaggggagaaggaaacccacatcatttgagcacctgaccttgccatccccgtaggcaggtccatgagacataagtgatgctcctccttggctaagtgcatggaggaaccaatcgctgaagctcatgaaaccacgaagatgaggacacaagaactaggtaacgcgctgtgccctctgctagcgcgatccttcctttctccccacaaccagcggtcacccacctctgcctgcccctatgtctctggctcccccaccctccctcccaggtcttcagcactttcctcttctcgtgactcatcttgcatctacttcttgtgtatcttgcattggatatgccaaagttctttccttttttgtgttttctttcttttaataatataaactccaaaatagattgtttgattcttttcatgtggaacatttaaaatattatttgtgctttatta

SEQ ID NO: 189839 - DNA, 2695 bp, Homo sapiens
  Payload ID: 17487
  Gene Symbol: TCP10L
  Gene Name: t-complex 10-like
  Uniprot ID: Q8TDR4
  ENST ID: ENST00000300258
  CDS Start-End: 115-762
ggaactgtccgctgctctctggtctctggatatgaggcaggagggcttggggacaactgtggggacatggcccagatgatctgatcctggcagtagtgactgttggggaccaggatgctggcaggtcaactcgaggccagggaccccaaagagggcacccacccagaggacccgtgcccaggagctggggctgtcatggagaagacagctgtggcagccgaggttctcacggaggactgcaacactggggagatgccaccattacagcagcagatcatcagactccaccaagagcttgggagacagaagtctctgtgggctgatgttcatggaaaactccggagtcatatagatgctttgagggagcagaacatggagctccgagaaaagctgagagctctgcagctgcagcggtggaaagccaggaagaaatctgcagcgtccccacacgcggggcaagaatcgcacactctggcattggaacctgcttttggaaaaatttcacctctgtcagctgatgaagagacaatacccaaatacgctggccacaagaatcagagtgccactctcctgggacaaagatcgtcatctaacaattcagctcctccaaagccaatgagtttaaagatagaaagaattagctcgtggaaaacaccaccacaggaaaatagagataaaaatctttccaggagacgtcaagacagaagagcaacacctactggaaggccaactccctgtgcagagagacgggggggtgtctgaagatggaaaggtggcctcggacacctgtgtcactctacactggccccttggaaaattcagattcagataaagttccacttaggtctaataaaagtactcaatttgttattcaaaatagacctagtaatttattaaactaattatgtttctatagataaaaacttgaagttcttcagacatgtctctaatgctataaaagcaaacaacttggattgggttttataaatcagttgctttcctgagctctgtagttggtatatttctgcagagtctttaaaaaaattaacccaccttgtagtatggagtgtcgggctgttgggtgagccctggggtcttgctggaaatcgaggatggctgaagatggctttgtgctcccagcctttgggctcaaggcattgcccgctccagggaccttgtgacaaggcgggcctgtgactgtcattgccccaggctatgcatccatcttcccgaagtctgcaaaacttgagtggcagaaaatcaccagtgcaggcttcccaggccgccatgctgcaggagcagatggcagcagccggaggagctggtgagcagagttggggactcctgtttctatgctccccgtgaaatgcggggctttctcgtggatacgcgtgagcagaacatcttactatggcaaggacatgtccttcctggagctgcctaatttgtggccactttttgtctgattccctcgttgggtcctcacctgtgagacttgccaacacccccagccctccaccccacacacagcccacatgccggtctccaggggccgtgactggagattccgaatcctagcggtcacttccctctgagcacactcccagcagaaggcgtgtggctggggctagatgcacttgggtgctttgttcccctttctccatttgccagcccatggcattgctgccaccctgatggagcgccctctcatctggcaccttcctggcctctttcccaggccccagttctgtccatgcagctgtgggtgcttcctgcattgcgggtctcacggggaggagacgagagtgcccctggttgagtcaggaaagaattctatcttcacgtcgctgccagcaaatgaccacagcagcttcacgacctctgcaggaacctatcttggtaaagaaacggggcctatgtggtggccgagcctcaggtgtggccgagcttcaggtgtggcccttatgcacagcacagcccaagcctgtgggcaccactcgccctgggctgcctggcacctggactccttcccatccttggccgaggtctgcgtggcccttcagggccgaatctgacactgtcttcctcctgagtctgccccccgggcttcctgcccacccccaggctgtttcatggcctctgcagggagcttcgtagaggtgaggctggtgccatctgtctgcttcagaccacctcaggctctgcgtgccctcacagtcccctctgcacttctctgtggggcagggaagcccttcccatcaggtctgctccagcctggctaccttgttcctgctgtcccctccccttcaggcccccggacaagacttcagtgtacttgctggtgccgggcagaatgggggaccttgcctctcacacacacctgctagtatctccgcaacctccaggcatcatctcagctgacagtgacgccatcctggggaagctcccctgactcctggctctcctggaagcctgtggtgctccttcacaatggcccgtggcccttcataggtcccgtaagccagtgtcacagggattcggcttttctcttctgtgtttgcctgctgcgggactgtgagcagcttcagggccaagacagtgcctttccatccgtgaatctcctgatccatcagaatactcgaaagagaaataccgactgagtgtattcattaaagaattaatgttccttacagga

SEQ ID NO: 189840 - DNA, 636 bp, Homo sapiens
  Payload ID: 17487
  Gene Symbol: TCP10L
  Gene Name: t-complex 10-like
  ENST ID: ENST00000582575
  CDS Start-End: 63-636
ccacagtccaaacgcccaggagcctccgccctgacctgctgccgcacgtggttgctgcagggatgctggcaggtcaactcgaggccagggaccccaaagagggcacccacccagaggacccgtgcccaggagctggggctgtcatggagaagacagctgtggcagccgaggttctcacggaggactgcaacactggggagatgccaccattacagcagcagatcatcagactccaccaagagcttgggagacagaagtctctgtgggctgatgttcatggaaaactccggagtcatatagatgctttgagggagcagaacatggagctccgagaaaagctgagagctctgcagctgcagcggtggaaagccaggaagaaatctgcagcgtccccacacgcggggcaagaatcgcacactctggcattggaacctgcttttggaaaaatttcacctctgtcagctgatgaagagacaatacccaaatacgctggccacaagaatcagagtgccactctcctgggacaaagatcgtcatctaacaattcagctcctccaaagccaatgagtttaaagatagaaagaattagctcgtggaaaacaccaccacaggaaaatagagataaaaatctttcca

SEQ ID NO: 189841 - DNA, 732 bp, Homo sapiens
  Payload ID: 17487
  Gene Symbol: TCP10L
  Gene Name: t-complex 10-like
  ENST ID: ENST00000472557
  CDS Start-End: 228-617
ggaactgtccgctgctctctggtctctggatatgaggcaggagggcttggggacaactgtggggacatggcccagatgatctgatcctggcagtagtgactgttggggaccagccattacagcagcagatcatcagactccaccaagagcttgggagacagaagtctctgtgggctgatgttcatggaaaactccggagtcatatagatgctttgagggagcagaacatggagctccgagaaaagctgagagctctgcagctgcagcggtggaaagccaggaagaaatctgcagcgtccccacacgcggggcaagaatcgcacactctggcattggaacctgcttttggaaaaatttcacctctgtcagctgatgaagagacaatacccaaatacgctggccacaagaatcagagtgccactctcctgggacaaagatcgtcatctaacaattcagctcctccaaagccaatgagtttaaagatagaaagaattagctcgtggaaaacaccaccacaggaaaatagagataaaaatctttccaggagacgtcaagacagaagagcaacacctactggaaggccaactccctgtgcagagagacgggggggtgtctgaagatggaaaggtggcctcggacacctgtgtcactctacactggccccttggaaaattcagattcagataaagttccacttaggtctaataaaagtactcaatttgttattcaaaa

SEQ ID NO: 189842 - DNA, 889 bp, Homo sapiens
  Payload ID: 17487
  Gene Symbol: TCP10L
  Gene Name: t-complex 10-like
  ENST ID: ENST00000491828
  CDS Start-End: 134-460
gttctcttcccaataacagccattacagcagcagatcatcagactccaccaagagcttgggagacagaagtctctgtgggctgatgttcatggaaaactccggagtcatatagatgctttgagggagcagaacatggagctccgagaaaagctgagagctctgcagctgcagcggtggaaagccaggaagaaatctgcagcgtccccacacgcggggcaagaatcgcacactctggcattggaacctgcttttggaaaaatttcacctctgtcagctgatgaagagacaatacccaaatacgctggccacaagaatcagagtgccactctcctgggacaaagatcgtcatctaacaattcagctcctccaaagctcctctttagaacattctcccagccagtgtgtctcttcctgtcccagctttgtgtcaccctcatactcaggaagcaaatctcgtgagtccacagccagcaactgatactgggttgatgtggatggagaaggcgcccccaactcctgaagatgatttatcccctcgcattctttcccaaagcaactgctgagcagataacactttattccctgaaggaagatcagaaatctactccaagcatttgtcacaaccaatgagtttaaagatagaaagaattagctcgtggaaaacaccaccacaggaaaatagagataaaaatctttccaggagacgtcaagacagaagagcaacacctactggaaggccaactccctgtgcagagagacgggggggtgtctgaagatggaaaggtggcctcggacacctgtgtcactctacactggccccttggaaaattcagattcagataaagttccacttaggtctaataaaagtactcaatttgttattcaaaa

SEQ ID NO: 189843 - DNA, 1488 bp, Homo sapiens
  Payload ID: 17488
  Gene Symbol: TCP10L2
  Gene Name: t-complex 10-like 2
  ENST ID: ENST00000283507
  CDS Start-End: 77-1000
gggaggacttggggacagctgtggggacacggcccagatgttctggtcccagcagaagtgactggcggggaccaggatgctggagggtcagctcgaggccagggagcccaaggagggcacccacccagaggacccgtgcccgggagctggggctgccatggagaagacacctgcagcagccgaggtccccagggaggacagcaatgccggggagatgccgtcattacagcagcagatcaccagcctccaccaagagctcgggagacagcagtcgctgtgggctgatattcacagaaaactccagagtcatatggatgccttgaggaagcagaaccgggagctccgagaagagctgagaggcctgcagcggcagcagtgggaagccgggaagaaacccgcagcgtccccacacgcggggcgagaatcacacactctggcattggaacctgcttttggaaaaatttcacctctgtcagctgatgaagagacaacgcccaaatacgctggccgcaagagtcagagtgcgactctcctgggacaaagatggtcatctaaccacttagctcctccaaagccaatgagtttaaagacagaaagaattaactcggggaaaacaccaccacaggaagatagagagaaaagtcctcccgggagacgtcaagacagaagtccagcacccactggaaggccgactcccggtgcagaaagacgggaggtgtctgaagacggaaagattatgcatccatcttcccgaagtctgcaaaactccggtggcagaaaatcaccagtgcaggcttcccaggccgccacgctgcaggagcagacggcagcagccggagttgctgacagaagctcatcagtcttagggagttctgaaggcggatttctcagccgcgttcaagctgaagagttcgccagttcttccccagacagtgcagagcggcagaaaaattctaccccaatggctccaaagaaatcgtgtttcccaatgggacagtgaaacatttcaaggatggacaggaagagaccttatttcctgatgggacaatcgtaagggtggaaaggaacggcgacaaaaccattgtgctcagcaacgggcagaaagaaatccacacagcccggttcaagaggagggagtacccggatggcaccgtcaagactgtgtattgcagcggctgtcaggaaaccaagtatgcctccgggagggttaagatcaaagatgaagctggaaatgtcgtcctggacgagaagcagatgagccctcaacacgcagcatcacatgggaaatgccaattgcagatttttgctaaaacagacaaaaactaataacatattagctgccctaaatgatcttggagagccaccaaaactttaggactacccaagtcatctagaaattgcaaaggaaaagacattctctcccctatttaggaaacttggttagagcagcacacgtcagagaacagaaggctcacaaaagaacgattt

SEQ ID NO: 189844 - DNA, 2185 bp, Homo sapiens
  Payload ID: 17488
  Gene Symbol: TCP10L2
  Gene Name: t-complex 10-like 2
  Uniprot ID: B9ZVM9
  ENST ID: ENST00000366832
  CDS Start-End: 132-1193
aagacagaaagtccgttggaaccgtcggctgctctctggtctctggagatgaggcgggaggacttggggacagctgtggggacacggcccagatgttctggtcccagcagaagtgactggcggggaccaggatgctggagggtcagctcgaggccagggagcccaaggagggcacccacccagaggacccgtgcccgggagctggggctgccatggagaagacacctgcagcagccgaggtccccagggaggacagcaatgccggggagatgccgtcattacagcagcagatcaccagcctccaccaagagctcgggagacagcagtcgctgtgggctgatattcacagaaaactccagagtcatatggatgccttgaggaagcagaaccgggagctccgagaagagctgagaggcctgcagcggcagcagtgggaagccgggaagaaacccgcagcgtccccacacgcggggcgagaatcacacactctggcattggaacctgcttttggaaaaatttcacctctgtcagctgatgaagagacaacgcccaaatacgctggccgcaagagtcagagtgcgactctcctgggacaaagatggtcatctaaccacttagctcctccaaagccaatgagtttaaagacagaaagaattaactcggggaaaacaccaccacaggaagatagagagaaaagtcctcccgggagacgtcaagacagaagtccagcacccactggaaggccgactcccggtgcagaaagacgggaggtgtctgaagacggaaagattatgcatccatcttcccgaagtctgcaaaactccggtggcagaaaatcaccagtgcaggcttcccaggccgccacgctgcaggagcagacggcagcagccggagttgctgacagaagctcatcagtcttagggagttctgaaggcggatttctcagccgcgttcaagctgaagagttcgccagttcttccccagacagtgcagagcggcagaatcttcctgtaaacccaccatcttccctggaaatagcacaggccatggacactaagatgaaaaaggaggaagtacaggaagaaaaacgacatccaaatggcaaggcagatgactgccggcggtccggtttcccgagtgaatttccaggagctctgcatgccgctccctccagacaggacatggggccctgacctggaggccaggcgtttctagcattgttgactgccagtttattaccagtaaataaagcaatacgcttttcaggaggaagatttgttttaaatacttaaaaaaaaacccaaaactatagcctcaaatatcttccagccaccacattttagcccttgaggagagctcagttccggaaggacgcgtcaaggtggcggtggtcggcattgactcaggaaggggtgggaagaggcacctgctgcggctgcggctgcggctacagtgttttgtgagctccgaggagacccagtcctgcctggggcagcacatcatcgctgcttcttcagctcaacagttcgttcatctcacgcctcttgctggcctgttagaaactgggagtcggcctcaggctagctttgctgagggaactctgcctcagtaaaagcgaattcatgtcttgcaagcggataaagcatttggataaatgaacaacagggaatgctacttgcagtaacagtttgaattcactgaaatgcttttgtctttagcgcagtggttgtagtggtttgtcaggggagaaggaaacccacatcatttgagcacctgaccttgccatccccataggcaggtccatgagacataagtgatgctcctccttggctaagtgcatggagaaaccaatcgctgaagctcatgaaaccacgaagatgaggacacaagaactaggtaacgcgctgtgccctctgctagcgcgatccttcctttctccccacaaccagcggtcacccacctctgcctgctcctacgtctctggctcccccaccctccctcccaggtcttcaacactttcctcttctcgtgactcatcttgcatctacttcttgtgtgtcttgcattggatatgccaaagttctttccttttttgtgttttctttcttttaataatataaactccaaaatagattgtttgattcttttcatgtggaacatttaaaatattatttgtgctttatta

SEQ ID NO: 189845 - DNA, 416 bp, Homo sapiens
  Payload ID: 17488
  Gene Symbol: TCP10L2
  Gene Name: t-complex 10-like 2
  ENST ID: ENST00000486697
  CDS Start-End: 284-416
ttatgagagtcagttttgccagtacacctctggatataaagaaaatcaaaatataagtgagcaaaaataagcccaaagacaaaagtggcaaggaggagaaaaatgggggctacagtctgaagttttatttcaacagggttaacataaacatagtgttttaagcttaaaatgatggaaaacccctacgtagatcttccaacgtggacattccaacaggaagctataaagagaagtaaaagtgacagcacattatcagtgaaaaataagactaggtttaaaaaggatgctggagggtcagctcgaggccagggagcccaaggagggcacccacccagaggacccgtgcccgggagctggggctgccatggagaagacacctgcagcagccgaggtccccagggaggacagcaatgccg

SEQ ID NO: 189846 - DNA, 1747 bp, Homo sapiens
  Payload ID: 17489
  Gene Symbol: TCP11X2
  Gene Name: t-complex 11 family, X-linked 2
  Uniprot ID: Q5H9J9
  ENST ID: ENST00000453326
  CDS Start-End: 330-1553
agacgcagaggcgaggccgccagtcgaggacgaggaggagataacatcaagatgccgaagactgaggaaactgtgctccagaatgatcccagtgtagcagagaatggggcccctgagcctaaaacaccagggcagagccagaaaagcaagagtttctgtttagatgaccagtctcctgacctgatgtcttttctgtcacagatctgatagagacagttaatgaagtttccaagctgagcatttcacatgaaattgtagtaaaccaagatttctatgtggaagagaccattttgcctccaaacagtgtagaaggcaggtttgcggaggcaatgtacaatgctttttggaaccatctgaaagaacagctattgagtactcctcctgacttcacttgtgcccttgaacttctaaaagatgttaaggagaaccgcctaagaaatgagatagaagaagctctggacacagatctcctcaagcaggaagcagaacatggggccctggatgtccctcatctttctaactacattctcaatttgatggctctgctatgtgcaccggttcgagatgaagcgatacagaaactagagaccataagagatccagtgcagttactgaggggcatcctccgtgttctgggcctaatgaaaatggacatggtgaactataccatccagagctttcgaccctacctgcaggaacattccatccagtatgaacaagctaaattccaggaactccttgataaacagcccagtctcctcgattataccacaaaatggctaaccaaagcagccacagacatcactacactatgtccgagttctcctgactcacctagctcctcctgcagcatggcgtgttcacttccaagcggggcaggtaacaattcagagccccccagtccaacaatggtgctataccaaggctacctgaacctcctcctctgggatcttgaaaacgtagaattcccagagactctgctgatggacagaatccggctccaggaactggcattccagttgcaccagttaactgtcctggcctcagtcttgctagtggccagaagcttctctggtgaagttttattcagatcacctgaatttgtggatagactgaaatgcaccaccaaggccctaactgaggaatttatctccaggcctgaagagactatgctgagtgtgagtgaacaggtgtctcaggaagtccatcaaggccttaaggacatgggcctcactactctgagcagtgaaaacacagcatctcttctaggccaactccagaacatcaccaagaaagagaactgcattcgtagcattgttgatcagtggatccgtttttttctcaaatgctgtttgcttcatggcatgcaggagtctctgctacactttcctggaggcctcattctcattgaaaaggagttggcagaactgggctggaagtttctcaatctgatgcatcataatcagcaggtatttggcccatactatgctgagatcctaaaacacatcatccatccagctcaagcacaagaaacagatgtggagcctaactgatagtgctggaccccagctatggcaacagggactcaggagagagaggtcagcatgtttctgggaggacatcacctgtggttagtcgaacagtcagccctcttcctcgctatagccaggacacagggatgcaggggtcaagcatgtaagcaccaactggcccaatccccttcactaataaacctctgagctgcaag

SEQ ID NO: 189847 - DNA, 2230 bp, Homo sapiens
  Payload ID: 17489
  Gene Symbol: TCP11X2
  Gene Name: t-complex 11 family, X-linked 2
  ENST ID: ENST00000429905
  CDS Start-End: 52-420
agacgcagaggcgaggccgccagtcgaggacgaggaggagataacatcaagatgccgaagactgaggaaactgtgctccagaatgatcccagtgtagcagagaatggggcccctgagcctaaaacaccagggcagagccagaaaagcaagagtttctgtttagatgaccagtctcctgatctgatagagacagttaatgaagtttccaagctgagcatttcacatgaaattgtagtaaaccaagatttctatgtggaagagaccattttgcctccaaacagtgtagaaggcaggtttgcggaggcaatgtacaatgctttttggaaccatctgaaagaacagctattgagtactcctcctgacttcacttgtgcccttgaacttctaaaagatgttaaggagaatcccggagatgaataggcgagcccttgcccacaaggaacttgcatgcttgagtcaaaaggctatttcaagggaaccttaaagattccagatttgctattttatcctcacactttggagtaaaacaatctaaaaatatccttatcctttattaagaatgcctcatctccttgtggtggtgtgtatttcatatttcttatatcccacacatttaaaaccacattcttatttttattcatatttttacctcattctacctaaaaaatagtaatgactactactataactgatcccagtgaagccttgaatggtaattgtcctctagacagaaagaaataatactctctaagaaatgtagagactcagttctctgcccccccagaagacataatctgggatgcctttggcctaagagcatagttcattggagaaagtttgaggttctgaacagaacttggctcctttgatttcctttgttgggcagaccttgctatcactgctattaccatggcagaaccgcctaagaaatgagatagaagaagctctggacacagatctcctcaagcaggaagcagaacatggggccctggatgtccctcatctttctaactacattctcaatttgatggctctgctatgtgcaccggttcgagatgaagcgatacagaaactagagaccataagagatccagtgcagttactgaggggcatcctccgtgttctgggcctaatgaaaatggacatggtgaactataccatccagagctttcgaccctacctgcaggaacattccatccagtatgaacaagctaaattccaggaactccttgataaacagcccagtctcctcgattataccacaaaatggctaaccaaagcagccacagacatcactacactatgtccgagttctcctgactcacctagctcctcctgcagcatggcgtgttcacttccaagcggggcagactctgctgatggacagaatccggctccaggaactggcattccagttgcaccagttaactgtcctggcctcagtcttgctagtggccagaagcttctctggtgaagttttattcagatcacctgaatttgtggatagactgaaatgcaccaccaaggccctaactgaggaatttatctccaggcctgaagagactatgctgagtgtgagtgaacaggtgtctcaggaagtccatcaaggccttaaggacatgggcctcactactctgagcagtgaaaacacagcatctcttctaggccaactccagaacatcaccaagaaagagaactgcattcgtagcattgttggagtctctgctacactttcctggaggcctcattctcattgaaaaggagttggcagaactgggctggaagtttctcaatctgatgcatcataatcagcagagtcatttttcacaaaacgaaatctttccagaagatcacgaataagagagatcaaagctaggcagcttgagttgaagtagagctggaagaaggagttttgaggactgtttcaaaaccactggactagatgatctctaaagtggtgacatggacataggataatggttatagacagtccccctcccaacgggaaaaaatgaaagcaagcaaaaagttaccagctccaagccaacttgaaatccaatcagcatttccaagttcgttctgtgagactgtagtgtcaggacaaagcaacaacaaaatgtgctctactctaaagaagtgtgggacatacagaactgaaggaggactaataacaacgaatgcaactaacacgtatttctccctcaataaacgccagatgttgtactacgtt

SEQ ID NO: 189848 - DNA, 2018 bp, Homo sapiens
  Payload ID: 17490
  Gene Symbol: TCP11
  Gene Name: t-complex 11, testis-specific
  Uniprot ID: Q8WWU5
  ENST ID: ENST00000244645
  CDS Start-End: 501-1826
agcctgccgcttccggctctggcggggggggcacgtgccccgtcccgttgccccggcgaccgcggcggtttgttctcaggccccggcctttctcaccgtgcgacgccccaacccgccgctccgccgcggtggtacgctccaggccgccaggccgcgaggcccaccgagcggacgccagtggatgacccgcggcgggggaggaggagataccatcagcaaaatgccagacgtcaaggagagtgtgcccccgaaatatcctggcgactcagagggcaggtcctgtaagcccgaaacctcaggacccccccaggaagacaagagcggctccgaggacccccctccctagaacgtaactagtcatcaaactgaggagctgtccgtgtgcaacaactcaagataaaattcttgactattgaaatgcgaaaaattagattgaggctttgcggctgaattagattggtttttcttgtggccacatgaggtcgctgctggttaactgaatggcaccaaaaggcatattggggtcatttccaacagctatgaacctgagtctggaaggcaaggtcaaggagacagtgcacaatgccttttgggaccatcttaaagagcaactatcagcaactccccctgacttcagctgtgctcttgaacttctgaaagaaattaaagagatcttgctatcactgctattaccacgccagaaccgcctgagaattgagattgaagaagctctggacatggacttgctcaagcaggaggcagaacatggggccctgaaagtcctctatctctctaagtacgttctcaacatgatggctttgctgtgtgcaccagttcgagatgaagcagtgcagaaactagaaaacattacggatcctgtttggctactgagagggatcttccaggttctgggccggatgaaaatggacatggtgaactacactatccagagccttcaaccccacctgcaggaacattccattcagtatgaacgggctaaattccaggaactcctcaataagcagcctagtctccttaatcacaccaccaaatggctgacccaagcagcaggagacctcaccatgtcacctccgacttgcccagacacttctgactcctccagtgtggctggcccctctcccaatgaggcagccaacaacccagagcccctcagccccacaatggtgctgtgtcagggcttcttgaacctccttctctgggaccttgaaaatgaagagttccctgagaccctgctgatggacagaacccggctgcaggagctgaagtcccagttgcaccagttaaccgtcatggcctcagtcttgctggtggccagtagtttctccggcagtgttttgtttggctcaccccaatttgtagataaactgaaacgcataaccaaatccttgttggaagactttcactccaggcctgaggaagctatactgactgtgagtgaacaggtatctcaggaaatccatcaaagcctcaagaatatgggccttgttgctctaagcagtgataatacagcatctctaatgggacagctccagaacattgccaagaaggagaactgtgtctgcagtgttattgatcagcggatccatttgtttctcaaatgctgtttggttcttggtgtgcagcggtctctattagaccttcctggaggccttactctcattgaagcagaactggcagaactgggccaaaagtttgtcaacttgacacatcacaatcagcaggtgtttggtccctactacactgagatcctaaaaaccctcatttccccagcccaggcactggaaacaaaagtggagtctgtttgatagcgtcggctcagagccctggtaccttggacccaagaggaggcccatcatcttcctggagtaacatcaccagtgaccagcagacagtgagcttctatcccaggccctgcagccagtacaccaaggctgtagggatcaagcatgtaaacaccaactggtccatacccattcattaataaacttcttaagtgc

SEQ ID NO: 189849 - DNA, 2166 bp, Homo sapiens
  Payload ID: 17490
  Gene Symbol: TCP11
  Gene Name: t-complex 11, testis-specific
  Uniprot ID: Q8WWU5
  ENST ID: ENST00000311875
  CDS Start-End: 419-1969
atgtgaggaaagagcgcggcccctgcgcccctgcggcacacgctgtgaaacaaccctcctgggtgtggctcggcttctcggctgtccaaacagcctgaagaaaagccccatgcatgctctggcctcgtctcagcagttccaggccatccttctcgaggggcgggagctgaccggcatgaaccggccgcagcgagccgctcgaggcctggttggcttcgagctcaggagggacgcacgagcctgccgcttccggctctggcggggggggcacgtgccccgtcccgttgccccggcgaccgcggcggtttgttctcaggccccggcctttctcaccgtgcgacgccccaacccgccgctccgccgcggtggtacgctccaggccgccaggccgcgaggcccaccgagcggacgccagtggatgacccgcggcgggggaggaggagataccatcagcaaaatgccagacgtcaaggagagtgtgcccccgaaatatcctggcgactcagagggcaggtcctgtaagcccgaaacctcaggacccccccaggaagacaagagcggctccgaggacccccctccctttctttctgtcacaggtctgacagaaaccgttaatgaagtttccaagctgagcaacaagattgggatgaattgtgattactacatggaagagaaggttttacctccaagcagtctggaaggcaaggtcaaggagacagtgcacaatgccttttgggaccatcttaaagagcaactatcagcaactccccctgacttcagctgtgctcttgaacttctgaaagaaattaaagagatcttgctatcactgctattaccacgccagaaccgcctgagaattgagattgaagaagctctggacatggacttgctcaagcaggaggcagaacatggggccctgaaagtcctctatctctctaagtacgttctcaacatgatggctttgctgtgtgcaccagttcgagatgaagcagtgcagaaactagaaaacattacggatcctgtttggctactgagagggatcttccaggttctgggccggatgaaaatggacatggtgaactacactatccagagccttcaaccccacctgcaggaacattccattcagtatgaacgggctaaattccaggaactcctcaataagcagcctagtctccttaatcacaccaccaaatggctgacccaagcagcaggagacctcaccatgtcacctccgacttgcccagacacttctgactcctccagtgtggctggcccctctcccaatgaggcagccaacaacccagagcccctcagccccacaatggtgctgtgtcagggcttcttgaacctccttctctgggaccttgaaaatgaagagttccctgagaccctgctgatggacagaacccggctgcaggagctgaagtcccagttgcaccagttaaccgtcatggcctcagtcttgctggtggccagtagtttctccggcagtgttttgtttggctcaccccaatttgtagataaactgaaacgcataaccaaatccttgttggaagactttcactccaggcctgaggaagctatactgactgtgagtgaacaggtatctcaggaaatccatcaaagcctcaagaatatgggccttgttgctctaagcagtgataatacagcatctctaatgggacagctccagaacattgccaagaaggagaactgtgtctgcagtgttattgatcagcggatccatttgtttctcaaatgctgtttggttcttggtgtgcagcggtctctattagaccttcctggaggccttactctcattgaagcagaactggcagaactgggccaaaagtttgtcaacttgacacatcacaatcagcaggtgtttggtccctactacactgagatcctaaaaaccctcatttccccagcccaggcactggaaacaaaagtggagtctgtttgatagcgtcggctcagagccctggtaccttggacccaagaggaggcccatcatcttcctggagtaacatcaccagtgaccagcagacagtgagcttctatcccaggccctgcagccagtacaccaaggctgtagggatcaagcatgtaaacaccaactggtccatacccattcattaataaacttcttaagtgcaagaa

SEQ ID NO: 189850 - DNA, 1689 bp, Homo sapiens
  Payload ID: 17490
  Gene Symbol: TCP11
  Gene Name: t-complex 11, testis-specific
  Uniprot ID: Q8WWU5
  ENST ID: ENST00000373974
  CDS Start-End: 143-1555
ccgtcccgttgccccggcgaccgcggcggtttgttctcaggccccggcctttctcaccgtgcgacgccccaacccgccgctccgccgcggtggtacgctccaggccgccaggccgcgaggcccaccgagcggacgccagtggatgacccgcggcgggggaggaggagttctttctgtcacaggtctgacagaaaccgttaatgaagtttccaagctgagcaacaagattgggatgaattgtgattactacatggaagagaaggttttacctccaagcagtctggaaggcaaggtcaaggagacagtgcacaatgccttttgggaccatcttaaagagcaactatcagcaactccccctgacttcagctgtgctcttgaacttctgaaagaaattaaagagatcttgctatcactgctattaccacgccagaaccgcctgagaattgagattgaagaagctctggacatggacttgctcaagcaggaggcagaacatggggccctgaaagtcctctatctctctaagtacgttctcaacatgatggctttgctgtgtgcaccagttcgagatgaagcagtgcagaaactagaaaacattacggatcctgtttggctactgagagggatcttccaggttctgggccggatgaaaatggacatggtgaactacactatccagagccttcaaccccacctgcaggaacattccattcagtatgaacgggctaaattccaggaactcctcaataagcagcctagtctccttaatcacaccaccaaatggctgacccaagcagcaggagacctcaccatgtcacctccgacttgcccagacacttctgactcctccagtgtggctggcccctctcccaatgaggcagccaacaacccagagcccctcagccccacaatggtgctgtgtcagggcttcttgaacctccttctctgggaccttgaaaatgaagagttccctgagaccctgctgatggacagaacccggctgcaggagctgaagtcccagttgcaccagttaaccgtcatggcctcagtcttgctggtggccagtagtttctccggcagtgttttgtttggctcaccccaatttgtagataaactgaaacgcataaccaaatccttgttggaagactttcactccaggcctgaggaagctatactgactgtgagtgaacaggtatctcaggaaatccatcaaagcctcaagaatatgggccttgttgctctaagcagtgataatacagcatctctaatgggacagctccagaacattgccaagaaggagaactgtgtctgcagtgttattgatcagcggatccatttgtttctcaaatgctgtttggttcttggtgtgcagcggtctctattagaccttcctggaggccttactctcattgaagcagaactggcagaactgggccaaaagtttgtcaacttgacacatcacaatcagcaggtgtttggtccctactacactgagatcctaaaaaccctcatttccccagcccaggcactggaaacaaaagtggagtctgtttgatagcgtcggctcagagccctggtaccttggacccaagaggaggcccatcatcttcctggagtaacatcaccagtgaccagcagacagtgagcttctatcccaggccctgcagccagtacaccaaggctgtaggg

SEQ ID NO: 189851 - DNA, 1882 bp, Homo sapiens
  Payload ID: 17490
  Gene Symbol: TCP11
  Gene Name: t-complex 11, testis-specific
  Uniprot ID: Q8WWU5
  ENST ID: ENST00000373979
  CDS Start-End: 359-1684
ctcaggccccggcctttctcaccgtgcgacgccccaacccgccgctccgccgcggtggtacgctccaggccgccaggccgcgaggcccaccgagcggacgccagtggatgacccgcggcgggggaggaggagataccatcagcaaaatgccagacgtcaaggagagtgtgcccccgaaatatcctggcgactcagagggcagagaacgtaactagtcatcaaactgaggagctgtccgtgtgcaacaactcaagataaaattcttgactattgaaatgcgaaaaattagattgaggctttgcggctgaattagattggtttttcttgtggccacatgaggtcgctgctggttaactgaatggcaccaaaaggcatattggggtcatttccaacagctatgaacctgagtctggaaggcaaggtcaaggagacagtgcacaatgccttttgggaccatcttaaagagcaactatcagcaactccccctgacttcagctgtgctcttgaacttctgaaagaaattaaagagatcttgctatcactgctattaccacgccagaaccgcctgagaattgagattgaagaagctctggacatggacttgctcaagcaggaggcagaacatggggccctgaaagtcctctatctctctaagtacgttctcaacatgatggctttgctgtgtgcaccagttcgagatgaagcagtgcagaaactagaaaacattacggatcctgtttggctactgagagggatcttccaggttctgggccggatgaaaatggacatggtgaactacactatccagagccttcaaccccacctgcaggaacattccattcagtatgaacgggctaaattccaggaactcctcaataagcagcctagtctccttaatcacaccaccaaatggctgacccaagcagcaggagacctcaccatgtcacctccgacttgcccagacacttctgactcctccagtgtggctggcccctctcccaatgaggcagccaacaacccagagcccctcagccccacaatggtgctgtgtcagggcttcttgaacctccttctctgggaccttgaaaatgaagagttccctgagaccctgctgatggacagaacccggctgcaggagctgaagtcccagttgcaccagttaaccgtcatggcctcagtcttgctggtggccagtagtttctccggcagtgttttgtttggctcaccccaatttgtagataaactgaaacgcataaccaaatccttgttggaagactttcactccaggcctgaggaagctatactgactgtgagtgaacaggtatctcaggaaatccatcaaagcctcaagaatatgggccttgttgctctaagcagtgataatacagcatctctaatgggacagctccagaacattgccaagaaggagaactgtgtctgcagtgttattgatcagcggatccatttgtttctcaaatgctgtttggttcttggtgtgcagcggtctctattagaccttcctggaggccttactctcattgaagcagaactggcagaactgggccaaaagtttgtcaacttgacacatcacaatcagcaggtgtttggtccctactacactgagatcctaaaaaccctcatttccccagcccaggcactggaaacaaaagtggagtctgtttgatagcgtcggctcagagccctggtaccttggacccaagaggaggcccatcatcttcctggagtaacatcaccagtgaccagcagacagtgagcttctatcccaggccctgcagccagtacaccaaggctgtagggatcaagcatgtaaacaccaactggtccatacccattcattaataaacttcttaagtgcaagaaa

SEQ ID NO: 189852 - DNA, 1962 bp, Homo sapiens
  Payload ID: 17490
  Gene Symbol: TCP11
  Gene Name: t-complex 11, testis-specific
  ENST ID: ENST00000455706
  CDS Start-End: 121-285
gcggcggtttgttctcaggccccggcctttctcaccgtgcgacgccccaacccgccgctccgccgcggtggtacgctccaggccgccaggccgcgaggcccaccgagcggacgccagtggatgacccgcggcgggggaggaggagataccatcagcaaaatgccagacgtcaaggagagtgtgcccccgaaatatcctggcgactcagagggcaggtcctgtaagcccgaaacctcaggacccccccaggaagacaagagcggctccgaggacccccctccctagaacgtaactagtcatcaaactgaggagctgtccgtgtgcaacaactcaagataaaattcttgactattgaaatgcgaaaaattagattgaggctttgcggctgaattagattggtttttcttgtggccacatgaggtcgctgctggttaactgaatggcaccaaaaggcatattggggtcatttccaacagctatgaacctgagtctggaaggcaaggtcaaggagacagtgcacaatgccttttgggaccatcttaaagagcaactatcagcaactccccctgacttcagctgtgctcttgaacttctgaaagaaattaaagagatcttgctatcactgctattaccacgccagaaccgcctgagaattgagattgaagaagctctggacatggacttgctcaagcaggaggcagaacatggggccctgaaagtcctctatctctctaagtacgttctcaacatgatggctttgctgtgtgcaccagttcgagatgaagcagtgcagaaactagaaaacattacggatcctgtttggctactgagagggatcttccaggttctgggccggatgaaaatggacatggtgaactacactatccagagccttcaaccccacctgcaggaacattccattcagtatgaacgggctaaattccaggaactcctcaataagcagcctagtctccttaatcacaccaccaaatggctgacccaagcagcaggagacctcaccatgtcacctccgacttgcccagacacttctgactcctccagtgtggctggcccctctcccaatgaggcagccaacaacccagagcccctcagccccacaatggtgctgtgtcagggcttcttgaacctccttctctgggaccttgaaaatgaagagttccctgagaccctgctgatggacagaacccggctgcaggagctgaagtcccagttgcaccagttaaccgtcatggcctcagtcttgctggtggccagtagtttctccggcagtgttttgtttggctcaccccaatttgtagataaactgaaacgcataaccaaatccttgttggaagactttcactccaggcctgaggaagctatactgactgtgagtgaacaggtatctcaggaaatccatcaaagcctcaagaatatgggccttgttgctctaagcagtgataatacagcatctctaatgggacagctccagaacattgccaagaaggagaactgtgtctgcagtgttattgatcagcggatccatttgtttctcaaatgctgtttggttcttggtgtgcagcggtctctattagaccttcctggaggccttactctcattgaagcagaactggcagaactgggccaaaagtttgtcaacttgacacatcacaatcagcaggtgtttggtccctactacactgagatcctaaaaaccctcatttccccagcccaggcactggaaacaaaagtggagtctgtttgatagcgtcggctcagagccctggtaccttggacccaagaggaggcccatcatcttcctggagtaacatcaccagtgaccagcagacagtgagcttctatcccaggccctgcagccagtacaccaaggctgtagggatcaagcatgtaaacaccaactggtccatacccattcattaataaacttcttaagtgcaagaa

SEQ ID NO: 189853 - DNA, 1690 bp, Homo sapiens
  Payload ID: 17490
  Gene Symbol: TCP11
  Gene Name: t-complex 11, testis-specific
  Uniprot ID: Q8WWU5
  ENST ID: ENST00000412155
  CDS Start-End: 95-1492
ctttctcaccgtgcgacgccccaacccgccgctccgccgcggtggtacgctccaggccgccaggccgcgaggcccaccgagcggacgccagtggatgacccgcggcgggggaggaggaggtctgacagaaaccgttaatgaagtttccaagctgagcaacaagattgggatgaattgtgattactacatggaagagaaggttttacctccaagcagtctggaaggcaaggtcaaggagacagtgcacaatgccttttgggaccatcttaaagagcaactatcagcaactccccctgacttcagctgtgctcttgaacttctgaaagaaattaaagagatcttgctatcactgctattaccacgccagaaccgcctgagaattgagattgaagaagctctggacatggacttgctcaagcaggaggcagaacatggggccctgaaagtcctctatctctctaagtacgttctcaacatgatggctttgctgtgtgcaccagttcgagatgaagcagtgcagaaactagaaaacattacggatcctgtttggctactgagagggatcttccaggttctgggccggatgaaaatggacatggtgaactacactatccagagccttcaaccccacctgcaggaacattccattcagtatgaacgggctaaattccaggaactcctcaataagcagcctagtctccttaatcacaccaccaaatggctgacccaagcagcaggagacctcaccatgtcacctccgacttgcccagacacttctgactcctccagtgtggctggcccctctcccaatgaggcagccaacaacccagagcccctcagccccacaatggtgctgtgtcagggcttcttgaacctccttctctgggaccttgaaaatgaagagttccctgagaccctgctgatggacagaacccggctgcaggagctgaagtcccagttgcaccagttaaccgtcatggcctcagtcttgctggtggccagtagtttctccggcagtgttttgtttggctcaccccaatttgtagataaactgaaacgcataaccaaatccttgttggaagactttcactccaggcctgaggaagctatactgactgtgagtgaacaggtatctcaggaaatccatcaaagcctcaagaatatgggccttgttgctctaagcagtgataatacagcatctctaatgggacagctccagaacattgccaagaaggagaactgtgtctgcagtgttattgatcagcggatccatttgtttctcaaatgctgtttggttcttggtgtgcagcggtctctattagaccttcctggaggccttactctcattgaagcagaactggcagaactgggccaaaagtttgtcaacttgacacatcacaatcagcaggtgtttggtccctactacactgagatcctaaaaaccctcatttccccagcccaggcactggaaacaaaagtggagtctgtttgatagcgtcggctcagagccctggtaccttggacccaagaggaggcccatcatcttcctggagtaacatcaccagtgaccagcagacagtgagcttctatcccaggccctgcagccagtacaccaaggctgtagggatcaagcatgtaaacaccaactggtccatacccattcattaataaacttcttaagtgcaagaaa

SEQ ID NO: 189854 - DNA, 1841 bp, Homo sapiens
  Payload ID: 17490
  Gene Symbol: TCP11
  Gene Name: t-complex 11, testis-specific
  Uniprot ID: Q8WWU5
  ENST ID: ENST00000444780
  CDS Start-End: 111-1646
gttctcaggccccggcctttctcaccgtgcgacgccccaacccgccgctccgccgcggtggtacgctccaggccgccaggccgcgaggcccaccgagcggacgccagtggatgacccgcggcgggggaggaggagataccatcagcaaaatgccagacgtcaaggagagtgtgcccccgaaatatcctggcgactcagagggcaggtcctgtaagcccgaaacctcaggacccccccaggaagacaagagcggctccgaggacccccctccctgtctgacagaaaccgttaatgaagtttccaagctgagcaacaagattgggatgaattgtgattactacatggaagagaaggttttacctccaagcagtctggaaggcaaggtcaaggagacagtgcacaatgccttttgggaccatcttaaagagcaactatcagcaactccccctgacttcagctgtgctcttgaacttctgaaagaaattaaagagatcttgctatcactgctattaccacgccagaaccgcctgagaattgagattgaagaagctctggacatggacttgctcaagcaggaggcagaacatggggccctgaaagtcctctatctctctaagtacgttctcaacatgatggctttgctgtgtgcaccagttcgagatgaagcagtgcagaaactagaaaacattacggatcctgtttggctactgagagggatcttccaggttctgggccggatgaaaatggacatggtgaactacactatccagagccttcaaccccacctgcaggaacattccattcagtatgaacgggctaaattccaggaactcctcaataagcagcctagtctccttaatcacaccaccaaatggctgacccaagcagcaggagacctcaccatgtcacctccgacttgcccagacacttctgactcctccagtgtggctggcccctctcccaatgaggcagccaacaacccagagcccctcagccccacaatggtgctgtgtcagggcttcttgaacctccttctctgggaccttgaaaatgaagagttccctgagaccctgctgatggacagaacccggctgcaggagctgaagtcccagttgcaccagttaaccgtcatggcctcagtcttgctggtggccagtagtttctccggcagtgttttgtttggctcaccccaatttgtagataaactgaaacgcataaccaaatccttgttggaagactttcactccaggcctgaggaagctatactgactgtgagtgaacaggtatctcaggaaatccatcaaagcctcaagaatatgggccttgttgctctaagcagtgataatacagcatctctaatgggacagctccagaacattgccaagaaggagaactgtgtctgcagtgttattgatcagcggatccatttgtttctcaaatgctgtttggttcttggtgtgcagcggtctctattagaccttcctggaggccttactctcattgaagcagaactggcagaactgggccaaaagtttgtcaacttgacacatcacaatcagcaggtgtttggtccctactacactgagatcctaaaaaccctcatttccccagcccaggcactggaaacaaaagtggagtctgtttgatagcgtcggctcagagccctggtaccttggacccaagaggaggcccatcatcttcctggagtaacatcaccagtgaccagcagacagtgagcttctatcccaggccctgcagccagtacaccaaggctgtagggatcaagcatgtaaacaccaactggtccatacccattcattaataaacttcttaagtgcaag

SEQ ID NO: 189855 - DNA, 1575 bp, Homo sapiens
  Payload ID: 17490
  Gene Symbol: TCP11
  Gene Name: t-complex 11, testis-specific
  Uniprot ID: Q8WWU5
  ENST ID: ENST00000418521
  CDS Start-End: 253-1575
agtcattctgagtgtgcctctgttggccacaaatgggtacaagagatgtaaattctgcagaggttgtgagtggcttagccagtgtttttcaatgagaaattccacagcatggaatttgagggtgcccaagggagctctctatgcctcttactgcaatcccatctctgttagccctgacagatctcagttctttctgtcacaggtctgacagaaaccgttaatgaagtttccaagctgagcaacaagattgggatgaattgtgattactacatggaagagaaggttttacctccaagcagtctggaaggcaaggtcaaggagacagtgcacaatgccttttgggaccatcttaaagagcaactatcagcaactccccctgacttcagctgtgctcttgaacttctgaaagaaattaaagagatcttgctatcactgctattaccacgccagaaccgcctgagaattgagattgaagaagctctggacatggacttgctcaagcaggaggcagaacatggggccctgaaagtcctctatctctctaagtacgttctcaacatgatggctttgctgtgtgcaccagttcgagatgaagcagtgcagaaactagaaaacattacggatcctgtttggctactgagagggatcttccaggttctgggccggatgaaaatggacatggtgaactacactatccagagccttcaaccccacctgcaggaacattccattcagtatgaacgggctaaattccaggaactcctcaataagcagcctagtctccttaatcacaccaccaaatggctgacccaagcagcaggagacctcaccatgtcacctccgacttgcccagacacttctgactcctccagtgtggctggcccctctcccaatgaggcagccaacaacccagagcccctcagccccacaatggtgctgtgtcagggcttcttgaacctccttctctgggaccttgaaaatgaagagttccctgagaccctgctgatggacagaacccggctgcaggagctgaagtcccagttgcaccagttaaccgtcatggcctcagtcttgctggtggccagtagtttctccggcagtgttttgtttggctcaccccaatttgtagataaactgaaacgcataaccaaatccttgttggaagactttcactccaggcctgaggaagctatactgactgtgagtgaacaggtatctcaggaaatccatcaaagcctcaagaatatgggccttgttgctctaagcagtgataatacagcatctctaatgggacagctccagaacattgccaagaaggagaactgtgtctgcagtgttattgatcagcggatccatttgtttctcaaatgctgtttggttcttggtgtgcagcggtctctattagaccttcctggaggccttactctcattgaagcagaactggcagaactgggccaaaagtttgtcaacttgacacatcacaatcagcaggtgtttggtccctactacactgagatcctaaaaaccctcatttccccagcccaggcactggaaacaaaagtggagtctgtttga

SEQ ID NO: 189856 - DNA, 1180 bp, Homo sapiens
  Payload ID: 17490
  Gene Symbol: TCP11
  Gene Name: t-complex 11, testis-specific
  ENST ID: ENST00000427376
  CDS Start-End: 125-256
gaccgcggcggtttgttctcaggccccggcctttctcaccgtgcgacgccccaacccgccgctccgccgcggtggtacgctccaggccgccaggccgcgaggcccaccgagcggacgccagtggatgacccgcggcgggggaggaggagtctggaaggcaaggtcaaggagacagtgcacaatgccttttgggaccatcttaaagagcaactatcagcaactccccctgacttcagctgtgctcttgaacttctgaaagaaattaaagagatcttgctatcactgctattaccacgccagaaccgcctgagaattgagattgaagaagctctggacatggacttgctcaagcaggaggcagaacatggggccctgaaagtcctctatctctctaagtacgttctcaacatgatggctttgctgtgtgcaccagttcgagatgaagcagtgcagaaactagaaaacattacggatcctgtttggctactgagagggatcttccaggttctgggccggatgaaaatggacatggtgaactacactatccagagccttcaaccccacctgcaggaacattccattcagtatgaacgggctaaattccaggaactcctcaataagcagcctagtctccttaatcacaccaccaaatggctgacccaagcagcaggagacctcaccatgtcacctccgacttgcccagacacttctgactcctccagtgtggctggcccctctcccaatgaggcagccaacaacccagagcccctcagccccacaatggtgctgtgtcagggcttcttgaacctccttctctgggaccttgaaaatgaagagttccctgagaccctgctgatggacagaacccggctgcaggagctgaagtcccagttgcaccagttaaccgtcatggcctcagtcttgctggtggccagtagtttctccggcagtgttttgtttggctcaccccaatttgtagataaactgaaacgcataaccaaatccttgttggaagactttcactccaggcctgaggaagctatactgactgtgagtgaacaggtatctcaggaaatccatcaaagcctcaagaatatgggccttgttgctctaagcagtgataatacagcatctctaatgggacagctccagaacattgccaagaaggagaactgtgtct

SEQ ID NO: 189857 - DNA, 837 bp, Homo sapiens
  Payload ID: 17490
  Gene Symbol: TCP11
  Gene Name: t-complex 11, testis-specific
  ENST ID: ENST00000486638
  CDS Start-End: 173-837
cgacgccccaacccgccgctccgccgcggtggtacgctccaggccgccaggccgcgaggcccaccgagcggacgccagtggatgacccgcggcgggggaggaggagatcttgctatcactgctattaccacgccagaaccgcctgagaattgagattgaagaagctctggacatggacttgctcaagcaggaggcagaacatggggccctgaaagtcctctatctctctaagtacgttctcaacatgatggctttgctgtgtgcaccagttcgagatgaagcagtgcagaaactagaaaacattacggatcctgtttggctactgagagggatcttccaggttctgggccggatgaaaatggacatggtgaactacactatccagagccttcaaccccacctgcaggaacattccattcagtatgaacgggctaaattccaggaactcctcaataagcagcctagtctccttaatcacaccaccaaatggctgacccaagcagcaggagacctcaccatgtcacctccgacttgcccagacacttctgactcctccagtgtggctggcccctctcccaatgaggcagccaacaacccagagcccctcagccccacaatggtgctgtgtcagggcttcttgaacctccttctctgggaccttgaaaatgaagagttccctgagaccctgctgatggacagaacccggctgcaggagctgaagtcccagttgcaccagttaaccgtcatggcctcagtcttgctggtggccagtagtttctccggcagtgttttgtttggctcaccccaatttgtagataaactgaaacgcataaccaa

SEQ ID NO: 189858 - DNA, 574 bp, Homo sapiens
  Payload ID: 17490
  Gene Symbol: TCP11
  Gene Name: t-complex 11, testis-specific
  ENST ID: ENST00000505400
  CDS Start-End: 366-574
gtgcgacgccccaacccgccgctccgccgcggtggtacgctccaggccgccaggccgcgaggcccaccgagcggacgccagtggatgacccgcggcgggggaggaggagagaacgtaactagtcatcaaactgaggagctgtccgtgtgcaacaactcaagataaaattcttgactattgaaatgcgaaaaattagattgaggctttgcggctgaattagattggtttttcttgtggccacatgaggtcgctgctggttaactgaatggcaccaaaaggcatattggggtcatttccaacagctatgaacctgaggtctgacagaaaccgttaatgaagtttccaagctgagcaacaagattgggatgaattgtgattactacatggaagagaaggttttacctccaagcagtctggaaggcaaggtcaaggagacagtgcacaatgccttttgggaccatcttaaagagcaactatcagcaactccccctgacttcagctgtgctcttgaacttctgaaagaaattaaagagatcttgctatcactgctattaccacgccagaaccgcctgag

SEQ ID NO: 189859 - DNA, 579 bp, Homo sapiens
  Payload ID: 17490
  Gene Symbol: TCP11
  Gene Name: t-complex 11, testis-specific
  ENST ID: ENST00000503195
  CDS Start-End: 158-283
acgctcctttgcccctttctgcccctcagcacccccaagaccctgaggccgctaccccccttcccgccgcccccagggacccccttggcaattggggaggccccttccccgacgccaacaacacgcctttctccctcacccagataccatcagcaaaatgccagacgtcaaggagagtgtgcccccgaaatatcctggcgactcagagggcaggtcctgtaagcccgaaacctcaggacccccccaggaagacaagagcggctccgaggacccccctccctagaacgtaactagtcatcaaactgaggagctgtccgtgtgcaacaactcaagataaaattcttgactattgaaatgcgaaaaattagattgaggctttgcggctgaattagattggtttttcttgtggccacatgaggtcgctgctggttaactgaatggcaccaaaaggcatattggggtcatttccaacagctatgaacctgagttctttctgtcacaggtctgacagaaaccgttaatgaagtttccaagctgagcaacaagattgggatgaattgtgattactacatggaagag

SEQ ID NO: 189860 - DNA, 576 bp, Homo sapiens
  Payload ID: 17490
  Gene Symbol: TCP11
  Gene Name: t-complex 11, testis-specific
  ENST ID: ENST00000509988
  CDS Start-End: 83-307
gcgacgccccaacccgccgctccgccgcggtggtacgctccaggccgccaggccgcgaggcccaccgagcggacgccagtggatgacccgcggcgggggaggaggagataccatcagcaaaatgccagacgtcaaggagagtgtgcccccgaaatatcctggcgactcagagggcaggtcctgtaagcccgaaacctcaggacccccccaggaagacaagagcggctccgaggacccccctccctgcccgagggcagaggtcttcaaagagtttttggttctagagaaagaagtgacccaagcgtgattacttgaatctgacaagatttgagactgaagaacgtaactagtcatcaaactgaggagctgtccgtgtgcaacaactcaagataaaattcttgactattgaaatgcgaaaaattagattgaggctttgcggctgaattagattggtttttcttgtggccacatgaggtcgctgctggttaactgaatggcaccaaaaggcatattggggtcatttccaacagctatgaacctgagatcttgctatcactgctattaccacgccagaac

SEQ ID NO: 189861 - DNA, 1978 bp, Homo sapiens
  Payload ID: 17490
  Gene Symbol: TCP11
  Gene Name: t-complex 11, testis-specific
  ENST ID: ENST00000504758
  CDS Start-End: 25-189
ggcccaccgagcggacgccagtggatgacccgcggcgggggaggaggagataccatcagcaaaatgccagacgtcaaggagagtgtgcccccgaaatatcctggcgactcagagggcaggtcctgtaagcccgaaacctcaggacccccccaggaagacaagagcggctccgaggacccccctccctagaacgtaactagtcatcaaactgaggagctgtccgtgtgcaacaactcaagataaaattcttgactattgaaatgcgaaaaattagattgaggctttgcggctgaattagattggtttttcttgtggccacatgaggtcgctgctggttaactgaatggcaccaaaaggcatattggggtcatttccaacagctatgaacctgagttctttctgtcacaggtctgacagaaaccgttaatgaagtttccaagctgagcaacaagattgggatgaattgtgattactacatggaagagaaggttttacctccaagcagtctggaaggcaaggtcaaggagacagtgcacaatgccttttgggaccatcttaaagagcaactatcagcaactccccctgacttcagctgtgctcttgaacttctgaaagaaattaaagagatcttgctatcactgctattaccacgccagaaccgcctgagaattgagattgaagaagctctggacatggacttgctcaagcaggaggcagaacatggggccctgaaagtcctctatctctctaagtacgttctcaacatgatggctttgctgtgtgcaccagttcgagatgaagcagtgcagaaactagaaaacattacggatcctgtttggctactgagagggatcttccaggttctgggccggatgaaaatggacatggtgaactacactatccagagccttcaaccccacctgcaggaacattccattcagtatgaacgggctaaattccaggaactcctcaataagcagcctagtctccttaatcacaccaccaaatggctgacccaagcagcaggagacctcaccatgtcacctccgacttgcccagacacttctgactcctccagtgtggctggcccctctcccaatgaggcagccaacaacccagagcccctcagccccacaatggtgctgtgtcagggcttcttgaacctccttctctgggaccttgaaaatgaagagttccctgagaccctgctgatggacagaacccggctgcaggagctgaagtcccagttgcaccagttaaccgtcatggcctcagtcttgctggtggccagtagtttctccggcagtgttttgtttggctcaccccaatttgtagataaactgaaacgcataaccaaatccttgttggaagactttcactccaggcctgaggaagctatactgactgtgagtgaacaggtatctcaggaaatccatcaaagcctcaagaatatgggccttgttgctctaagcagtgataatacagcatctctaatgggacagctccagaacattgccaagaaggagaactgtgtctgcagtgttattgatcagcggatccatttgtttctcaaatgctgtttggttcttggtgtgcagcggtctctattagaccttcctggaggccttactctcattgaagcagaactggcagaactgggccaaaagtttgtcaacttgacacatcacaatcagcaggtgtttggtccctactacactgagatcctaaaaaccctcatttccccagcccaggcactggaaacaaaagtggagtctgtttgatagcgtcggctcagagccctggtaccttggacccaagaggaggcccatcatcttcctggagtaacatcaccagtgaccagcagacagtgagcttctatcccaggccctgcagccagtacaccaaggctgtagggatcaagcatgtaaacaccaactggtccatacccattcattaataaacttcttaagtgcaagaa

SEQ ID NO: 189862 - DNA, 933 bp, Homo sapiens
  Payload ID: 17490
  Gene Symbol: TCP11
  Gene Name: t-complex 11, testis-specific
  ENST ID: ENST00000502480
  CDS Start-End: 1-736
agggatcttccaggttctgggccggatgaaaatggacatggtgaactacactatccagagccttcaaccccacctgcaggaacattccattcagtatgaacgggctaaattccaggaactcctcaataagcagcctagtctccttaatcacaccaccaaatggctgacccaagcagcaggagacctcaccatgtcacctccgacttgcccagacacttctgactcctccagtgtggctggcccctctcccaatgaggcagccaacaacccagagcccctcagccccacaatggtgctgtgtcagggcttcttgaacctccttctctgggaccttgaaaatgaagagttccctgagaccctgctgatggacagaacccggctgcaggagctgaagtcccagttgcaccagttaaccgtcatggcctcagtcttgctggtggccagtagtttctccggcagtgttttgtttggctcaccccaatttgtagataaactgaaacgcataaccaaatccttgttggaagactttcactccaggcctgaggaagctatactgactgtgagtgaacaggtatctcaggaaatccatcaaagcctcaagaatatgggccttgttgctctaagcagtgataatacagcatctctaatgggacagctccagaacattgccaagaaggagaactgtgtctgcagtgttattgcccaggcactggaaacaaaagtggagtctgtttgatagcgtcggctcagagccctggtaccttggacccaagaggaggcccatcatcttcctggagtaacatcaccagtgaccagcagacagtgagcttctatcccaggccctgcagccagtacaccaaggctgtagggatcaagcatgtaaacaccaactggtccatacccattcattaataaacttcttaagtgcaagaa

SEQ ID NO: 189863 - DNA, 970 bp, Homo sapiens
  Payload ID: 17490
  Gene Symbol: TCP11
  Gene Name: t-complex 11, testis-specific
  ENST ID: ENST00000469514
  CDS Start-End: 111-380
gttctcaggccccggcctttctcaccgtgcgacgccccaacccgccgctccgccgcggtggtacgctccaggccgccaggccgcgaggcccaccgagcggacgccagtggatgacccgcggcgggggaggaggagataccatcagcaaaatgccagacgtcaaggagagtgtgcccccgaaatatcctggcgactcagagggcaggtcctgtaagcccgaaacctcaggacccccccaggaagacaagagcggctccgaggacccccctcccttctggaaggcaaggtcaaggagacagtgcacaatgccttttgggaccatcttaaagagcaactatcagcaactccccctgacttcagctgtgctcttgaacttctgaaagaaattaaagagatcttgctatcactgctattaccacgccagaaccgcctgagaattgagattgaagaagctctggacatggacttgctcaagcaggaggcagaacatggggccctgaaagtcctctatctctctaagtacgttctcaacatgatggctttgctgtgtgcaccagttcgagatgaagcagtgcagaaactagaaaacattacggatcctgtttggctactgagagggatcttccaggttctgggccggatgaaaatggacatggtgaactacactatccagagccttcaaccccacctgcaggaacattccattcagtatgaacgggctaaattccaggaactcctcaataagcagcctagtctccttaatcacaccaccaaatggctgacccaagcagcaggagacctcaccatgtcacctccgacttgcccagacacttctgactcctccagtgtggctggcccctctcccaatgaggcagccaacaacccagagcccctcagccccacaatggtgctgtgtcagggcttcttgaacctccttctctgggaccttgaaaatgaagagttccctgag

SEQ ID NO: 189864 - DNA, 615 bp, Homo sapiens
  Payload ID: 17490
  Gene Symbol: TCP11
  Gene Name: t-complex 11, testis-specific
  ENST ID: ENST00000492680
  CDS Start-End: 306-615
gaccgcggcggtttgttctcaggccccggcctttctcaccgtgcgacgccccaacccgccgctccgccgcggtggtacgctccaggccgccaggccgcgaggcccaccgagcggacgccagtggatgacccgcggcgggggaggaggagagaacgtaactagtcatcaaactgaggagctgtccgtgtgcaacaactcaagataaaattcttgactattgaaatgcgaaaaattagattgaggctttgcggctgaattagattggtttttcttgtggccacatgaggtcgctgctggttaactgaatggcaccaaaaggcatattggggtcatttccaacagctatgaacctgagtctggaaggcaaggtcaaggagacagtgcacaatgccttttgggaccatcttaaagagcaactatcagcaactccccctgacttcagctgtgctcttgaacttctgaaagaaattaaagagatcttgctatcactgctattaccacgccagaaccgcctgagaattgagattgaagaagctctggacatggacttgctcaagcaggaggcagaacatggggccctgaaagtcctctatctctctaagtacgttctcaaca

SEQ ID NO: 189865 - DNA, 587 bp, Homo sapiens
  Payload ID: 17490
  Gene Symbol: TCP11
  Gene Name: t-complex 11, testis-specific
  ENST ID: ENST00000503908
  CDS Start-End: 83-325
gcgacgccccaacccgccgctccgccgcggtggtacgctccaggccgccaggccgcgaggcccaccgagcggacgccagtggatgacccgcggcgggggaggaggagataccatcagcaaaatgccagacgtcaaggagagtgtgcccccgaaatatcctggcgactcagagggcaggtcctgtaagcccgaaacctcaggacccccccaggaagacaagagcggctccgaggacccccctccctcttcaacaatgatcaactcgtggccaatctttgttcatctacatctcctccacatcttggagccaaataattttctgtgaaaaatcatgatgctgcatcaaaagagagtgataaaatatgatttattgtatacggctgcattttatacaccacgtaatcattttctttctgtcacaggtctgacagaaaccgttaatgaagtttccaagctgagcaacaagattgggatgaattgtgattactacatggaagagaaggttttacctccaagcagtctggaaggcaaggtcaaggagacagtgcacaatgccttttgggaccatcttaaagagcaactatcag

SEQ ID NO: 189866 - DNA, 657 bp, Homo sapiens
  Payload ID: 17490
  Gene Symbol: TCP11
  Gene Name: t-complex 11, testis-specific
  ENST ID: ENST00000507706
  CDS Start-End: 404-657
ctcaggccccggcctttctcaccgtgcgacgccccaacccgccgctccgccgcggtggtacgctccaggccgccaggccgcgaggcccaccgagcggacgccagtggatgacccgcggcgggggaggaggagagaacgtaactagtcatcaaactgaggagctgtccgtgtgcaacaactcaagataaaattcttgactattgaaatgcgaaaaattagattgaggctttgcggctgaattagattggtttttcttgtggccacatgaggtcgctgctggttaactgaatggcaccaaaaggcatattggggtcatttccaacagctatgaacctgagttctttctgtcacaggtctgacagaaaccgttaatgaagtttccaagctgagcaacaagattgggatgaattgtgattactacatggaagagaaggttttacctccaagcagtctggaaggcaaggtcaaggagacagtgcacaatgccttttgggaccatcttaaagagcaactatcagcaactccccctgacttcagctgtgctcttgaacttctgaaagaaattaaagagatcttgctatcactgctattaccacgccagaaccgcctgagaattgagattgaagaagctctggacatggacttgctcaagcagga

SEQ ID NO: 189867 - DNA, 1974 bp, Homo sapiens
  Payload ID: 17490
  Gene Symbol: TCP11
  Gene Name: t-complex 11, testis-specific
  ENST ID: ENST00000505911
  CDS Start-End: 36-200
ccaggccgcgaggcccaccgagcggacgccagtggatgacccgcggcgggggaggaggagataccatcagcaaaatgccagacgtcaaggagagtgtgcccccgaaatatcctggcgactcagagggcaggtcctgtaagcccgaaacctcaggacccccccaggaagacaagagcggctccgaggacccccctccctagaacgtaactagtcatcaaactgaggagctgtccgtgtgcaacaactcaagataaaattcttgactattgaaatgcgaaaaattagattgaggctttgcggctgaattagattggtttttcttgtggccacatgaggtcgctgctggttaactgaatggcaccaaaaggcatattggggtcatttccaacagctatgaacctgaggtctgacagaaaccgttaatgaagtttccaagctgagcaacaagattgggatgaattgtgattactacatggaagagaaggttttacctccaagcagtctggaaggcaaggtcaaggagacagtgcacaatgccttttgggaccatcttaaagagcaactatcagcaactccccctgacttcagctgtgctcttgaacttctgaaagaaattaaagagatcttgctatcactgctattaccacgccagaaccgcctgagaattgagattgaagaagctctggacatggacttgctcaagcaggaggcagaacatggggccctgaaagtcctctatctctctaagtacgttctcaacatgatggctttgctgtgtgcaccagttcgagatgaagcagtgcagaaactagaaaacattacggatcctgtttggctactgagagggatcttccaggttctgggccggatgaaaatggacatggtgaactacactatccagagccttcaaccccacctgcaggaacattccattcagtatgaacgggctaaattccaggaactcctcaataagcagcctagtctccttaatcacaccaccaaatggctgacccaagcagcaggagacctcaccatgtcacctccgacttgcccagacacttctgactcctccagtgtggctggcccctctcccaatgaggcagccaacaacccagagcccctcagccccacaatggtgctgtgtcagggcttcttgaacctccttctctgggaccttgaaaatgaagagttccctgagaccctgctgatggacagaacccggctgcaggagctgaagtcccagttgcaccagttaaccgtcatggcctcagtcttgctggtggccagtagtttctccggcagtgttttgtttggctcaccccaatttgtagataaactgaaacgcataaccaaatccttgttggaagactttcactccaggcctgaggaagctatactgactgtgagtgaacaggtatctcaggaaatccatcaaagcctcaagaatatgggccttgttgctctaagcagtgataatacagcatctctaatgggacagctccagaacattgccaagaaggagaactgtgtctgcagtgttattgatcagcggatccatttgtttctcaaatgctgtttggttcttggtgtgcagcggtctctattagaccttcctggaggccttactctcattgaagcagaactggcagaactgggccaaaagtttgtcaacttgacacatcacaatcagcaggtgtttggtccctactacactgagatcctaaaaaccctcatttccccagcccaggcactggaaacaaaagtggagtctgtttgatagcgtcggctcagagccctggtaccttggacccaagaggaggcccatcatcttcctggagtaacatcaccagtgaccagcagacagtgagcttctatcccaggccctgcagccagtacaccaaggctgtagggatcaagcatgtaaacaccaactggtccatacccattcattaataaacttcttaagtgcaagaa

SEQ ID NO: 189868 - DNA, 474 bp, Homo sapiens
  Payload ID: 17490
  Gene Symbol: TCP11
  Gene Name: t-complex 11, testis-specific
  ENST ID: ENST00000505335
  CDS Start-End: 88-219
accgtgcgacgccccaacccgccgctccgccgcggtggtacgctccaggccgccaggccgcgaggcccaccgagcggacgccagtggatgacccgcggcgggggaggaggagtctggaaggcaaggtcaaggagacagtgcacaatgccttttgggaccatcttaaagagcaactatcagcaactccccctgacttcagctgtgctcttgaacttctgaaagaaattaaagagggctgagagaggccaaccaaggacctcatttgagagggcatagctatgccatgagacgttactggcctgtgtatgctgctgaccacagtgcactgcaggaaccaagcactggagaagctattcatgctgcaggagccaagtactgcaggagcctgctgagtgaacataccagaaccgggaataaaagctcttgcctttgcaatgtctttctaatcttgctatcactgctattaccacgcca

SEQ ID NO: 189869 - DNA, 558 bp, Homo sapiens
  Payload ID: 17490
  Gene Symbol: TCP11
  Gene Name: t-complex 11, testis-specific
  ENST ID: ENST00000514751
  CDS Start-End: 83-247
gcgacgccccaacccgccgctccgccgcggtggtacgctccaggccgccaggccgcgaggcccaccgagcggacgccagtggatgacccgcggcgggggaggaggagataccatcagcaaaatgccagacgtcaaggagagtgtgcccccgaaatatcctggcgactcagagggcaggtcctgtaagcccgaaacctcaggacccccccaggaagacaagagcggctccgaggacccccctccctagaacgtaactagtcatcaaactgaggagctgtccgtgtgcaacaactcaagataaaattcttgactattgaaatgcgaaaaattagattgaggctttgcggctgaattagattggtttttcttgtggccacatgaggtcgctgctggttaactgaatggcaccaaaaggcatattggggtcatttccaacagctatgaacctgagcttcaacaatgatcaactcgtggccaatctttgttcatctacatctcctccacatcttggagccaaataattttctgtgaaaaatcatgatgctgcatcaaaagaga

SEQ ID NO: 189870 - DNA, 758 bp, Homo sapiens
  Payload ID: 17490
  Gene Symbol: TCP11
  Gene Name: t-complex 11, testis-specific
  ENST ID: ENST00000479418
  CDS Start-End: 36-143
ccaggccgcgaggcccaccgagcggacgccagtggatgacccgcggcgggggaggaggagataccatcagcaaaatgccagacgtcaaggagagtgtgcccccgaaatatcctggcgactcagagggcagagaacgtaactagtcatcaaactgaggagctgtccgtgtgcaacaactcaagataaaattcttgactattgaaatgcgaaaaattagattgaggctttgcggctgaattagattggtttttcttgtggccacatgaggtcgctgctggttaactgaatggcaccaaaaggcatattggggtcatttccaacagctatgaacctgagttctttctgtcacaggtctgacagaaaccgttaatgaagtttccaagctgagcaacaagattgggatgaattgtgattactacatggaagagaaggttttacctccaagcagtctggaaggcaaggtcaaggagacagtgcacaatgccttttgggaccatcttaaagagcaactatcagcaactccccctgacttcagctgtgctcttgaacttctgaaagaaattaaagaggagactggagggagagattctcctgctggccctgaagaagcaaacagctgtgttgtgaactgcctatcgagagggccacatagcaaggagctgcaggtggcttctaggacccggggttagcatccagacaatagccaatcttgctatcactgctattaccacgccagaaccgcctgagaattgagattg

SEQ ID NO: 189871 - DNA, 1669 bp, Homo sapiens
  Payload ID: 17490
  Gene Symbol: TCP11
  Gene Name: t-complex 11, testis-specific
  Uniprot ID: Q8WWU5
  ENST ID: ENST00000512012
  CDS Start-End: 158-1669
acgctcctttgcccctttctgcccctcagcacccccaagaccctgaggccgctaccccccttcccgccgcccccagggacccccttggcaattggggaggccccttccccgacgccaacaacacgcctttctccctcacccagataccatcagcaaaatgccagacgtcaaggagagtgtgcccccgaaatatcctggcgactcagagggcaggtcctgtaagcccgaaacctcaggacccccccaggaagacaagagcggctccgaggacccccctccctttctttctgtcacaggtctgacagaaaccgttaatgaagtttccaagctgagcaacaagattgggatgaattgtgattactacatggaagagaaggttttacctccaagcagtctggaaggcaaggtcaaggagacagtgcacaatgccttttgggaccatcttaaagagcaactatcagcaactccccctgacttcagctgtgctcttgaacttctgaaagaaattaaagagatcttgctatcactgctattaccacgccagaaccgcctgagaattgagattgaagaagctctggacatggacttgctcaagcaggaggcagaacatggggccctgaaagtcctctatctctctaagtacgttctcaacatgatggctttgctgtgtgcaccagttcgagatgaagcagtgcagaaactagaaaacattacggatcctgtttggctactgagagggatcttccaggttctgggccggatgaaaatggacatggtgaactacactatccagagccttcaaccccacctgcaggaacattccattcagtatgaacgggctaaattccaggaactcctcaataagcagcctagtctccttaatcacaccaccaaatggctgacccaagcagcaggagacctcaccatgtcacctccgacttgcccagacacttctgactcctccagtgtggctggcccctctcccaatgaggcagccaacaacccagagcccctcagccccacaatggtgctgtgtcagggcttcttgaacctccttctctgggaccttgaaaatgaagagttccctgagaccctgctgatggacagaacccggctgcaggagctgaagtcccagttgcaccagttaaccgtcatggcctcagtcttgctggtggccagtagtttctccggcagtgttttgtttggctcaccccaatttgtagataaactgaaacgcataaccaaatccttgttggaagactttcactccaggcctgaggaagctatactgactgtgagtgaacaggtatctcaggaaatccatcaaagcctcaagaatatgggccttgttgctctaagcagtgataatacagcatctctaatgggacagctccagaacattgccaagaaggagaactgtgtctgcagtgttattgatcagcggatccatttgtttctcaaatgctgtttggttcttggtgtgcagcggtctctattagaccttcctggaggccttactctcattgaagcagaactggcagaactgggccaaaagtttgtcaacttgacacatcacaatcagcaggtgtttggtccctactacactgagatcctaaaaaccctcatttccccagcccaggcactggaaacaaaagtggagtctgtttga

SEQ ID NO: 189872 - DNA, 2130 bp, Homo sapiens
  Payload ID: 17490
  Gene Symbol: TCP11
  Gene Name: t-complex 11, testis-specific
  Uniprot ID: Q8WWU5
  ENST ID: ENST00000611141
  CDS Start-End: 616-1938
agcctgccgcttccggctctggcggggggggcacgtgccccgtcccgttgccccggcgaccgcggcggtttgttctcaggccccggcctttctcaccgtgcgacgccccaacccgccgctccgccgcggtggtacgctccaggccgccaggccgcgaggcccaccgagcggacgccagtggatgacccgcggcgggggaggaggagataccatcagcaaaatgccagacgtcaaggagagtgtgcccccgaaatatcctggcgactcagagggcaggtcctgtaagcccgaaacctcaggacccccccaggaagacaagagcggctccgaggacccccctccctagaacgtaactagtcatcaaactgaggagctgtccgtgtgcaacaactcaagataaaattcttgactattgaaatgcgaaaaattagattgaggctttgcggctgaattagattggtttttcttgtggccacatgaggtcgctgctggttaactgaatggcaccaaaaggcatattggggtcatttccaacagctatgaacctgagttctttctgtcacaggtctgacagaaaccgttaatgaagtttccaagctgagcaacaagattgggatgaattgtgattactacatggaagagaaggttttacctccaagcagtctggaaggcaaggtcaaggagacagtgcacaatgccttttgggaccatcttaaagagcaactatcagcaactccccctgacttcagctgtgctcttgaacttctgaaagaaattaaagagatcttgctatcactgctattaccacgccagaaccgcctgagaattgagattgaagaagctctggacatggacttgctcaagcaggaggcagaacatggggccctgaaagtcctctatctctctaagtacgttctcaacatgatggctttgctgtgtgcaccagttcgagatgaagcagtgcagaaactagaaaacattacggatcctgtttggctactgagagggatcttccaggttctgggccggatgaaaatggacatggtgaactacactatccagagccttcaaccccacctgcaggaacattccattcagtatgaacgggctaaattccaggaactcctcaataagcagcctagtctccttaatcacaccaccaaatggctgacccaagcagcaggagacctcaccatgtcacctccgacttgcccagacacttctgactcctccagtgtggctggcccctctcccaatgaggcagccaacaacccagagcccctcagccccacaatggtgctgtgtcagggcttcttgaacctccttctctgggaccttgaaaatgaagagttccctgagaccctgctgatggacagaacccggctgcaggagctgaagtcccagttgcaccagttaaccgtcatggcctcagtcttgctggtggccagtagtttctccggcagtgttttgtttggctcaccccaatttgtagataaactgaaacgcataaccaaatccttgttggaagactttcactccaggcctgaggaagctatactgactgtgagtgaacaggtatctcaggaaatccatcaaagcctcaagaatatgggccttgttgctctaagcagtgataatacagcatctctaatgggacagctccagaacattgccaagaaggagaactgtgtctgcagtgttattgatcagcggatccatttgtttctcaaatgctgtttggttcttggtgtgcagcggtctctattagaccttcctggaggccttactctcattgaagcagaactggcagaactgggccaaaagtttgtcaacttgacacatcacaatcagcaggtgtttggtccctactacactgagatcctaaaaaccctcatttccccagcccaggcactggaaacaaaagtggagtctgtttgatagcgtcggctcagagccctggtaccttggacccaagaggaggcccatcatcttcctggagtaacatcaccagtgaccagcagacagtgagcttctatcccaggccctgcagccagtacaccaaggctgtagggatcaagcatgtaaacaccaactggtccatacccattcattaataaacttcttaagtgc

SEQ ID NO: 189873 - DNA, 2817 bp, Homo sapiens
  Payload ID: 17491
  Gene Symbol: TCP11L1
  Gene Name: t-complex 11, testis-specific-like 1
  Uniprot ID: Q9NUJ3
  ENST ID: ENST00000334274
  CDS Start-End: 401-1930
atgttttccacctctccctgaggaaacacggcgccgcccagctgcgagtcaccgcttactgaaccccttcggcaagcaggggaaagaccctcccgcctttccgtacgaagacatggcgctgccctatattgggctggcgcctcccggccaagagcagtctcctccttcctgatgctgagaagcggccgctctgaccgctgcccacccgagtcgggctgggaggaccgcccgccgcgtggcgagggatgcggcctcggaggggcagaggctgaaccgcccctgcctgccgcgcatccctccggcttccgccgcggcgccagcccgcgcctgattcgcggcgggagcggcaggagggagaacgccgactccgtggcaggaaagtgaataaacttaattgagaatgtctgaaaaccttgacaagtccaatgtaaatgaagcaggaaaatcaaaatccaatgattctgaggaaggcctcgaagatgctgtggaaggtgctgatgaagccttacaaaaagcaataaagtcagactcctccagcccccaaagagtgcagagacctcactctagtcctcctcgctttgtgacagtagaagaacttctagagacagcgagaggtgtcaccaacatggctctagcccatgaaattgtagtaaatggagactttcagattaaaccagttgaattaccagaaaacagcttgaagaagagagtaaaggagattgtacataaagcgttttgggattgcttgagtgtgcagctaagtgaagatcccccagcatatgaccatgctatcaaacttgtaggagaaatcaaagagactctcttatctttcttgctgcctggtcatactagactgagaaaccagataacagaagtcttggatctggatctgataaagcaggaagcagagaatggggcgctagacatttccaagctggcagaattcattattggcatgatggggacactgtgtgcacctgctcgagatgaggaagttaagaaactaaaggacattaaggaaatagtgccccttttcagagaaattttttctgtgttggacctaatgaaagtggacatggccaactttgctatcagtagcatcaggcctcatctcatgcagcagtcagttgaatacgaaaggaagaagtttcaagagattttggagaggcaaccaaattccctggactttgtcacccagtggctggaagaagcctcagaggaccttatgactcagaagtataaacacgccctgccagtggggggaatggctgctggctctggggacatgcccaggctgagccctgttgctgtccagaattacgcttacctgaagcttctgaagtgggaccacctccagaggccgttccccgaaacagttttaatggaccagtctcgcttccacgagctccagttgcagctggaacaactgaccatcctgggggctgtgttgctggtcaccttcagcatggcagcgccaggaatttccagccaggccgactttgctgagaaactcaagatgattgtgaagattttgctaacagatatgcacctgccctccttccatctgaaggacgtcctcactaccatcggggagaaggtgtgcctggaggtgagcagctgcctctccctgtgtgggtcctctcccttcaccacggacaaggagaccgtgctcaagggccagatccaggccgtggccagtcccgatgaccccattcgcaggatcatggaatctcgaatcctgaccttcttagaaacctaccttgcctcgggtcatcagaagccattgcccacagtccctgggggactcagtccagttcagagagagctggaggaagttgctattaaatttgctcgcctggtcaactataacaagatggtcttctgtccctactacgatgcaatcctgagtaagatcctcgtccgatcctaacgtgtatgcaccctacagcagcagtattactcactagccacagaatacctgttctgtactctaatgttgcattggaaaatggctatatagtacatgtctatttaacagcaccgattccaaagggaagaatattgtgtatcactgttgaaaagacttgttgagaaatccactgaattctattttgagagattgtatttatgagtgcaagtttacaaatcaaagaagcattttgttctcgagttttacaggtaacactcagctgttgtctccactcctcccccatcatgtccttccaaggaggctgggacctctctcttctgcaatctgggtagttctttcagatgcctcatgctgagctgacggccatccaagcgcaaaagagaccaagccatggcctcacctcctgccctccctcagacagccttgtccctcacccctcccttctggtatttttgttagaagggctatataacgtcttattgccattttctccccctatttattgcttcctccctgcctggcctagccagggctcccaagcccttttttctagaggagagttatttgtctctctctctttttttttttactttcttttttgtatttaaacattcttttaaccttcccccaaagatacagttattggactttaaaaagcttgttcttttatacaaaattactcctgcatctggttgagagcagttatgacttatgagatctagtgaaaggaaagtctttgactttcaagccttgaaagtcaaggaggaaatgtattgaaaaatagtttactgtaatgtgaacgaagagaaatgtctggaattcttactgaaaaattgaccctgagacaatacacagatgtgatgattgaattaaattctggaattaga

SEQ ID NO: 189874 - DNA, 2633 bp, Homo sapiens
  Payload ID: 17491
  Gene Symbol: TCP11L1
  Gene Name: t-complex 11, testis-specific-like 1
  Uniprot ID: Q9NUJ3
  ENST ID: ENST00000432887
  CDS Start-End: 217-1746
ggcctgaacagctgtttacaacggaatccggacgccgggcgcgagtggagctcagtgccagaggaggggattcccggcgccgggggacagagccccttttttcttttgccgaaagaccctttctgctggggagcctcttgtgtccagcctaggcccgcgtgcagcgccgacggatgaccgtcttcttggcaagaaagtgaataaacttaattgagaatgtctgaaaaccttgacaagtccaatgtaaatgaagcaggaaaatcaaaatccaatgattctgaggaaggcctcgaagatgctgtggaaggtgctgatgaagccttacaaaaagcaataaagtcagactcctccagcccccaaagagtgcagagacctcactctagtcctcctcgctttgtgacagtagaagaacttctagagacagcgagaggtgtcaccaacatggctctagcccatgaaattgtagtaaatggagactttcagattaaaccagttgaattaccagaaaacagcttgaagaagagagtaaaggagattgtacataaagcgttttgggattgcttgagtgtgcagctaagtgaagatcccccagcatatgaccatgctatcaaacttgtaggagaaatcaaagagactctcttatctttcttgctgcctggtcatactagactgagaaaccagataacagaagtcttggatctggatctgataaagcaggaagcagagaatggggcgctagacatttccaagctggcagaattcattattggcatgatggggacactgtgtgcacctgctcgagatgaggaagttaagaaactaaaggacattaaggaaatagtgccccttttcagagaaattttttctgtgttggacctaatgaaagtggacatggccaactttgctatcagtagcatcaggcctcatctcatgcagcagtcagttgaatacgaaaggaagaagtttcaagagattttggagaggcaaccaaattccctggactttgtcacccagtggctggaagaagcctcagaggaccttatgactcagaagtataaacacgccctgccagtggggggaatggctgctggctctggggacatgcccaggctgagccctgttgctgtccagaattacgcttacctgaagcttctgaagtgggaccacctccagaggccgttccccgaaacagttttaatggaccagtctcgcttccacgagctccagttgcagctggaacaactgaccatcctgggggctgtgttgctggtcaccttcagcatggcagcgccaggaatttccagccaggccgactttgctgagaaactcaagatgattgtgaagattttgctaacagatatgcacctgccctccttccatctgaaggacgtcctcactaccatcggggagaaggtgtgcctggaggtgagcagctgcctctccctgtgtgggtcctctcccttcaccacggacaaggagaccgtgctcaagggccagatccaggccgtggccagtcccgatgaccccattcgcaggatcatggaatctcgaatcctgaccttcttagaaacctaccttgcctcgggtcatcagaagccattgcccacagtccctgggggactcagtccagttcagagagagctggaggaagttgctattaaatttgctcgcctggtcaactataacaagatggtcttctgtccctactacgatgcaatcctgagtaagatcctcgtccgatcctaacgtgtatgcaccctacagcagcagtattactcactagccacagaatacctgttctgtactctaatgttgcattggaaaatggctatatagtacatgtctatttaacagcaccgattccaaagggaagaatattgtgtatcactgttgaaaagacttgttgagaaatccactgaattctattttgagagattgtatttatgagtgcaagtttacaaatcaaagaagcattttgttctcgagttttacaggtaacactcagctgttgtctccactcctcccccatcatgtccttccaaggaggctgggacctctctcttctgcaatctgggtagttctttcagatgcctcatgctgagctgacggccatccaagcgcaaaagagaccaagccatggcctcacctcctgccctccctcagacagccttgtccctcacccctcccttctggtatttttgttagaagggctatataacgtcttattgccattttctccccctatttattgcttcctccctgcctggcctagccagggctcccaagcccttttttctagaggagagttatttgtctctctctctttttttttttactttcttttttgtatttaaacattcttttaaccttcccccaaagatacagttattggactttaaaaagcttgttcttttatacaaaattactcctgcatctggttgagagcagttatgacttatgagatctagtgaaaggaaagtctttgactttcaagccttgaaagtcaaggaggaaatgtattgaaaaatagtttactgtaatgtgaacgaagagaaatgtctggaattcttactgaaaaattgaccctgagacaatacacagatgtgatgattgaattaaattctggaattaga

SEQ ID NO: 189875 - DNA, 3390 bp, Homo sapiens
  Payload ID: 17491
  Gene Symbol: TCP11L1
  Gene Name: t-complex 11, testis-specific-like 1
  ENST ID: ENST00000528107
  CDS Start-End: 1556-2020
gtggcaggtgagagcgggagctggggcggaggctggcggggcccgtccgggaggcgcgcggtccaagtcgcaggcatctcttcgcctcttcccgtcggatcccatcccgggatgtcgggggcaggcgaggaagaggcggggtccgcgggcgggtggagctcacccctcgaggctgtcctctcggcgcgcccgcgtcctcccctactcccggccctgccactccctcgctggcctgaacagctgtttacaacggaatccggacgccgggcgcgagtggagctcagtgccagaggaggggattcccggcgccgggggacagagccccttttttcttttgccgaaagaccctttctgctggggagcctcttgtgtccagcctaggcccgcgtgcagcgccgacggatgaccgtcttcttggcaagtgcgaggatcctcctcccctcggctctctttttagacacagtgggggttgaatggatgcgcgcgatataagcaaattaaatggttcgtggccgcatcctagagccctttaattagagttaccatttgtagaaggcctgccgtgcacaatccctcgtttcatctccccccaaaccgagcaggtaggtagctgtgttttacagaggaggacactgaagttacacagctagtaaagagccagaattggggcccaggtatgtctgaaaccaacgcccagcctcccagatacagtgacatcacagagatgacgtagggattcatctctatcaacagatacttgtgggtgtctatttgggggatatacagatggagcataagtggggaatatgactggtcctggctcttaagaagttcgaaatctaggtggggaattttaaaataaaaactagcacttttaccatctggccccaacgcatctttccatcatctctagccacttccttttctcattttcttgtgccttggcttctgccctctgagtgaaatgccctccttttcacctcctctccccctcctctccccctccagacatgttttaactaggtgaaatcctactccttttaaagatcagttcaaatgtcatcttttctgggaaggttttctcaatctcctcccaggcagagttagtttcttcctctgctatattccctgggcaatttcataatgccacttaagtttcattatggctccttgtaagcctgtctgcctccccctctagactatgtatttgcatctttctatttaaataagcacgctttgaattgaatttaaggcagtgacaaatgccaaatgtcaactagccagccctgcaggagttgagaaaggtgcaatcactggtgaggtccgggaagtgtcctgggaagagacaggacttgaactcaatcttaaggatggggttagtttactaagctgagcattagagacctagaaatcctccctttcctcctcactgcacagaatgaattacttcatccctcctgggctccttctcagcatgtgaagataataaaattagcagcgttttgtttgtcgtttctcacagaatatgctggaaagtgaataaacttaattgagaatgtctgaaaaccttgacaagtccaatgtaaatgaagcaggaaaatcaaaatccaatgattctgaggaaggcctcgaagatgctgtggaaggtgctgatgaagccttacaaaaagcaataaagtcagactcctccagcccccaaagagtgcagagacctcactctagtcctcctcgctttgtgacagtagaagaacttctagagacagcgagaggtgtcaccaacatggctctagcccatgaaattgtagtaaatggagactttcagattaaaccagttgaattaccagaaaacagagtctcgctctgttgtccaggctggagtgtagtggcactatctcggctcactgcaacctctggccaggctgatctcgaactcctcacctcaggtgaactgcctgcctcggcctccaaaagtgctgggattacaggccttgaagaagagagtaaaggagattgtacataaagcgttttgggattgcttgagtgtgcagctaagtgaagatcccccagcatatgaccatgctatcaaacttgtaggagaaatcaaagagactctcttatctttcttgctgcctggtcatactagactgagaaaccagataacagaagtcttggatctggatctgataaagcaggaagcagagaatggggcgctagacatttccaagctggcagaattcattattggcatgatggggacactgtgtgcacctgctcgagatgaggaagttaagaaactaaaggacattaaggaaatagtgccccttttcagagaaattttttctgtgttggacctaatgaaagtggacatggccaactttgctatcagtagcatcaggcctcatctcatgcagcagtcagttgaatacgaaaggaagaagtttcaagagattttggagaggcaaccaaattccctggactttgtcacccagtggctggaagaagcctcagaggaccttatgactcagaagtataaacacgccctgccagtggggggaatggctgctggctctggggacatgcccaggctgagccctgttgctgtccagaattacgcttacctgaagcttctgaagtgggaccacctccagaggccgttccccgaaacagttttaatggaccagtctcgcttccacgagctccagttgcagctggaacaactgaccatcctgggggctgtgttgctggtcaccttcagcatggcagcgccaggaatttccagccaggccgactttgctgagaaactcaagatgattgtgaagattttgctaacagatatgcacctgccctccttccatctgaaggacgtcctcactaccatcggggagaaggtgtgcctggaggtgagcagctgcctctccctgtgtgggtcctctcccttcaccacggacaaggagaccgtgctcaagggccagatccaggccgtggccagtcccgatgaccccattcgcaggatcatggaatctcgaatcctgaccttcttagaaacctaccttgcctcgggtcatcagaagccattgcccacagtccctgggggactcagtccagttcagagagagctggaggaagttgctattaaatttgctcgcctggtcaactataacaagatggtcttctgtccctactacgatgcaatcctgagtaagatcctcgtccgatcctaacgtgtatgcaccctacagcagcagtattactcactagccacagaatacctgttctgtactctaatgttgcattggaaaatggctatatagtacatgtctatttaacagcaccgattccaaagggaagaatattgtgtatcactgttgaaaagacttgttgagaaatcca

SEQ ID NO: 189876 - DNA, 1898 bp, Homo sapiens
  Payload ID: 17491
  Gene Symbol: TCP11L1
  Gene Name: t-complex 11, testis-specific-like 1
  Uniprot ID: Q9NUJ3
  ENST ID: ENST00000531632
  CDS Start-End: 197-1726
tacaacggaatccggacgccgggcgcgagtggagctcagtgccagaggaggggattcccggcgccgggggacagagccccttttttcttttgccgaaagaccctttctgctggggagcctcttgtgtccagcctaggcccgcgtgcagcgccgacggatgaccgtcttcttggaaagtgaataaacttaattgagaatgtctgaaaaccttgacaagtccaatgtaaatgaagcaggaaaatcaaaatccaatgattctgaggaaggcctcgaagatgctgtggaaggtgctgatgaagccttacaaaaagcaataaagtcagactcctccagcccccaaagagtgcagagacctcactctagtcctcctcgctttgtgacagtagaagaacttctagagacagcgagaggtgtcaccaacatggctctagcccatgaaattgtagtaaatggagactttcagattaaaccagttgaattaccagaaaacagcttgaagaagagagtaaaggagattgtacataaagcgttttgggattgcttgagtgtgcagctaagtgaagatcccccagcatatgaccatgctatcaaacttgtaggagaaatcaaagagactctcttatctttcttgctgcctggtcatactagactgagaaaccagataacagaagtcttggatctggatctgataaagcaggaagcagagaatggggcgctagacatttccaagctggcagaattcattattggcatgatggggacactgtgtgcacctgctcgagatgaggaagttaagaaactaaaggacattaaggaaatagtgccccttttcagagaaattttttctgtgttggacctaatgaaagtggacatggccaactttgctatcagtagcatcaggcctcatctcatgcagcagtcagttgaatacgaaaggaagaagtttcaagagattttggagaggcaaccaaattccctggactttgtcacccagtggctggaagaagcctcagaggaccttatgactcagaagtataaacacgccctgccagtggggggaatggctgctggctctggggacatgcccaggctgagccctgttgctgtccagaattacgcttacctgaagcttctgaagtgggaccacctccagaggccgttccccgaaacagttttaatggaccagtctcgcttccacgagctccagttgcagctggaacaactgaccatcctgggggctgtgttgctggtcaccttcagcatggcagcgccaggaatttccagccaggccgactttgctgagaaactcaagatgattgtgaagattttgctaacagatatgcacctgccctccttccatctgaaggacgtcctcactaccatcggggagaaggtgtgcctggaggtgagcagctgcctctccctgtgtgggtcctctcccttcaccacggacaaggagaccgtgctcaagggccagatccaggccgtggccagtcccgatgaccccattcgcaggatcatggaatctcgaatcctgaccttcttagaaacctaccttgcctcgggtcatcagaagccattgcccacagtccctgggggactcagtccagttcagagagagctggaggaagttgctattaaatttgctcgcctggtcaactataacaagatggtcttctgtccctactacgatgcaatcctgagtaagatcctcgtccgatcctaacgtgtatgcaccctacagcagcagtattactcactagccacagaatacctgttctgtactctaatgttgcattggaaaatggctatatagtacatgtctatttaacagcaccgattccaaagggaagaatattgtgtatcactgttgaaaagacttgttgagaaatccactg

SEQ ID NO: 189877 - DNA, 2468 bp, Homo sapiens
  Payload ID: 17491
  Gene Symbol: TCP11L1
  Gene Name: t-complex 11, testis-specific-like 1
  ENST ID: ENST00000527661
  CDS Start-End: 246-2033
agtctcctccttcctgatgctgagaagcggccgctctgaccgctgcccacccgagtcgggctgggaggaccgcccgccgcgtggcgagggatgcggcctcggaggggcagaggctgaaccgcccctgcctgccgcgcatccctccggcttccgccgcggcgccagcccgcgcctgattcgcggcgggagcggcaggagggagaacgccgactccgtggcaggaaagtgaataaacttaattgagaatgtctgaaaaccttgacaagtccaatgtaaatgaagcaggaaaatcaaaatccaatgattctgaggaaggcctcgaagatgctgtggaaggtgctgatgaagccttacaaaaagcaataaagtcagactcctccagcccccaaagagtgcagagacctcactctagtcctcctcgctttgtgacagtagaagaacttctagagacagcgagaggtgtcaccaacatggctctagcccatgaaattgtagtaaatggagactttcagattaaaccagttgaattaccagaaaacagcttgaagaagagagtaaaggagattgtacataaagcgttttgggattgcttgagtgtgcagctaagtgaagatcccccagcatatgaccatgctatcaaacttgtaggagaaatcaaagagactctcttatctttcttgctgcctggtcatactagactgagaaaccagataacagaagtcttggatctggatctgataaagcaggaagcagagaatggggcgctagacatttccaagctggcagaattcattattggcatgatggggacactgtgtgcacctgctcgagatgaggaagttaagaaactaaaggacattaaggaaatagtgccccttttcagagaaattttttctgtgttggacctaatgaaagtggacatggccaactttgctatcagtagcatcaggcctcatctcatgcagcagtcagttgaatacgaaaggaagaagtttcaagagattttggagaggcaaccaaattccctggactttgtcacccagtggctggaagaagcctcagaggaccttatgactcagaagtataaacacgccctgccagtggggggaatggctgctggctctggggacatgcccaggctgagccctgttgctgtccagaattacgcttacctgaagcttctgaagtgggaccacctccagaggccgttccccgaaacagttttaatggaccagtctcgcttccacgagctccagttgcagctggaacaactgaccatcctgggggctgtgttgctggtcaccttcagcatggcagcgccaggaatttccagccaggccgactttgctgagaaactcaagatgattgtgaagattttgctaacagatatgcacctgccctccttccatctgaaggacgtcctcactaccatcggggagaaggtgtgcctggaggtgagcagctgcctctccctgtgtgggtcctctcccttcaccacggacaaggagaccgtgctcaagggccagatccaggccgtggccagtcccgatgaccccattcgcaggatcatggaatctcgaatcctgaccttcttagaaacctaccttgcctcgggtcatcagaagccattgcccacagtccctgggggactcagtccagttcagagagagctggaggaagttgctattaaatttgctcgcctggtcaactataacaagatggtcttctgtccctactacgatgcaatcctgagaaaaagatggatatcttttggcaatttctttgggtccagcaatactgatatgagtccttggaattgtaggactgattatcccatgagtctgcacattagatttccaaagaaccatgtgatagaggcaccaatgacaatacaactttgtttccaagaaccttgtaacaaagcgttgtctcttttaaacataccacttgaggcaaaaggaatcctggacaggagttttctgcagaggcgtttaaaaccctaccgaatccgcttctgctgccgtgctctgtaaatgtcatgaacaggggggacaacggctcccttttcttcatcttcatctgaatcctcgttgggccttttgacggccttgtctctccagagctgttcaatgttgatcatcggattaacacaacctcgttgataaactcttcggacagctgttattctttgattttctgcataagatcctacagcttccctgagattggataagaaatgccatcaattatattataaccaaatctcattcaacccagcaatctcactactggatatctacccaaagaacaactctatggaaaatagtatggagatttctcaaagaactaaaaattatattttagctaaatcaactgtagatgtaaaaaaaaactatacaaatacttacacgccttttaggaaattgatgtaatccacccaaatctaagaaataaaatgaaatgttaat

SEQ ID NO: 189878 - DNA, 547 bp, Homo sapiens
  Payload ID: 17491
  Gene Symbol: TCP11L1
  Gene Name: t-complex 11, testis-specific-like 1
  ENST ID: ENST00000528898
  CDS Start-End: 385-547
gtttacaacggaatccggacgccgggcgcgagtggagctcagtgccagaggaggggattcccggcgccgggggacagagccccttttttcttttgccgaaagaccctttctgctggggagcctcttgtgtccagcctaggcccgcgtgcagcgccgacggatgaccgtcttcttggcaagtgcgaggatcctcctcccctcggctctctttttagacacagtgggggttgaatggatgcgcgcgatataagcaaattaaatggttcgtggccgcatcctagagccctttaattagagttaccatttgtagaaggcctgccgtgcacaatccctcgtttcatctccccccaaaccgagcaggaaagtgaataaacttaattgagaatgtctgaaaaccttgacaagtccaatgtaaatgaagcaggaaaatcaaaatccaatgattctgaggaaggcctcgaagatgctgtggaaggtgctgatgaagccttacaaaaagcaataaagtcagactcctccagcccccaaagagtgcagagacctcact

SEQ ID NO: 189879 - DNA, 905 bp, Homo sapiens
  Payload ID: 17491
  Gene Symbol: TCP11L1
  Gene Name: t-complex 11, testis-specific-like 1
  ENST ID: ENST00000530419
  CDS Start-End: 474-905
atgttttccacctctccctgaggaaacacggcgccgcccagctgcgagtcaccgcttactgaaccccttcggcaagcaggggaaagaccctcccgcctttccgtacgaagacatggcgctgccctatattgggctggcgcctcccggccaagagcagtctcctccttcctgatgctgagaagcggccgctctgaccgctgcccacccgagtcgggctgggaggaccgcccgccgcgtggcgagggatgcggcctcggaggggcagaggctgaaccgcccctgcctgccgcgcatccctccggcttccgccgcggcgccagcccgcgcctgattcgcggcgggagcggcaggagggagaacgccgactccgtggcagaccctttctgctggggagcctcttgtgtccagcctaggcccgcgtgcagcgccgacggatgaccgtcttcttggaaagtgaataaacttaattgagaatgtctgaaaaccttgacaagtccaatgtaaatgaagcaggaaaatcaaaatccaatgattctgaggaaggcctcgaagatgctgtggaaggtgctgatgaagccttacaaaaagcaataaagtcagactcctccagcccccaaagagtgcagagacctcactctagtcctcctcgctttgtgacagtagaagaacttctagagacagcgagaggtgtcaccaacatggctctagcccatgaaattgtagtaaatggagactttcagattaaaccagttgaattaccagaaaacagcttgaagaagagagtaaaggagattgtacataaagcgttttgggattgcttgagtgtgcagctaagtgaagatcccccagcatatgaccatgctatcaaacttgtaggagaaatcaaagagactctcttatctttc

SEQ ID NO: 189880 - DNA, 711 bp, Homo sapiens
  Payload ID: 17491
  Gene Symbol: TCP11L1
  Gene Name: t-complex 11, testis-specific-like 1
  ENST ID: ENST00000528962
  CDS Start-End: 1-475
ctccttccatctgaaggacgtcctcactaccatcggggagaaggtgtgcctggaggtgagcagctgcctctccctgtgtgggtcctctcccttcaccacggacaaggagaccgtgctcaagggccagatccaggccgtggccagtcccgatgaccccattcgcaggatcatggaatctcgaatcctgaccttcttagaaacctaccttgcctcgggtcatcagaagccattgcccacagtccctgggggactcagtccagttcagagagagctggaggaagttgctattaaatttgctcgcctggtcaactataacaagatggtcttctgtccctactacgatgcaatcctgatctctccagagctgttcaatgttgatcatcggattaacacaacctcgttgataaactcttcggacagctgttattctttgattttctgcataagatcctacagcttccctgagattggataagaaatgccatcaattatattataaccaaatctcattcaacccagcaatctcactactggatatctacccaaagaacaactctatggaaaatagtatggagatttctcaaagaactaaaaattatattttagctaaatcaactgtagatgtaaaaaaaaactatacaaatacttacacgccttttaggaaattgatgtaatccacccaaatctaagaaataaaatgaaatgttaata

SEQ ID NO: 189881 - DNA, 747 bp, Homo sapiens
  Payload ID: 17491
  Gene Symbol: TCP11L1
  Gene Name: t-complex 11, testis-specific-like 1
  ENST ID: ENST00000602733
  CDS Start-End: 430-747
ggagctggggcggaggctggcggggcccgtccgggaggcgcgcggtccaagtcgcaggcatctcttcgcctcttcccgtcggatcccatcccgggatgtcgggggcaggcgaggaagaggcggggtccgcgggcgggtggagctcacccctcgaggctgtcctctcggcgcgcccgcgtcctcccctactcccggccctgccactccctcgctggcctgaacagctgtttacaacggaatccggacgccgggcgcgagtggagctcagtgccagaggaggggattcccggcgccgggggacagagccccttttttcttttgccgaaagaccctttctgctggggagcctcttgtgtccagcctaggcccgcgtgcagcgccgacggatgaccgtcttcttggcaagaaagtgaataaacttaattgagaatgtctgaaaaccttgacaagtccaatgtaaatgaagcaggaaaatcaaaatccaatgattctgaggaaggcctcgaagatgctgtggaaggtgctgatgaagccttacaaaaagcaataaagtcagactcctccagcccccaaagagtgcagagacctcactctagtcctcctcgctttgtgacagtagaagaacttctagagacagcgagaggtgtcaccaacatggctctagcccatgaaattgtagtaaatggagactttcagattaaaccagttgaattaccagaaaacagcttgaagaagagagtaaaggag

SEQ ID NO: 189882 - DNA, 2219 bp, Homo sapiens
  Payload ID: 17492
  Gene Symbol: TCP11L2
  Gene Name: t-complex 11, testis-specific-like 2
  Uniprot ID: Q8N4U5
  ENST ID: ENST00000299045
  CDS Start-End: 175-1734
gggacactggggctgggggggtttgttgggctggtgagttttcgaggtgactgtgctgtgctcggtgaggggacgcccagagagccctgacccggggtcactccgtcgccgttctcctcttgtctacgtgctggacccggtgctacctttttacccacacttaagtgacgcaaaatgcccttcaatggcgagaagcagtgtgtgggagaggaccagccaagcgattctgattcttcccggttttccgaaagcatggcttcgctcagtgactatgaatgctccaggcagagctttgcaagtgactcctccagcaaatccagctctcctgcttcaacaagccctccaagggttgtaacatttgatgaagtgatggctacagcaaggaacttatcaaacttgactcttgctcatgagattgctgtaaatgagaactttcaattgaaacaagaggctctcccagaaaagagtttggctggtcgagtgaagcacattgttcaccaggccttctgggacgtcttggattcagaactaaatgctgaccctcctgagtttgaacatgccatcaaactgtttgaagaaatcagagagattcttctctcttttctcactcccggtggcaaccggcttcgcaaccaaatctgtgaagttttggacacagacctcattaggcagcaggctgagcacagtgctgttgacatccaaggcctggccaactatgtcatcagtacgatgggaaagctgtgtgctcccgtgcgagataatgatatcagagagttaaaggctactggcaacatcgtggaggtgctgagacaaatattccatgtcctggacctcatgcaaatggacatggccaattttacaattatgagtctcagaccgcaccttcaacgccagttggtggaatatgagagaaccaagttccaggaaattttggaagaaactccaagtgctcttgatcagactacagaatggataaaagaatctgtaaatgaagaattattttctctttctgagagtgctttaactcctggggccgaaaatacctccaagccaagcctgagccctactttggtgctaaataatagttacttgaaactgttacagtgggattatcagaaaaaagaattaccagagacacttatgacagatggagcacgtcttcaggaactaacagaaaagctgaatcaattgaaaattattgcctgcctgtccctaattaccaacaacatggtgggtgctattacaggaggcctgcctgagcttgcaagcaggttaacaaggatttcagctgttctacttgaaggcatgaacaaagagacctttaacttgaaggaagtcctgaattctattggtattcagacttgtgttgaggttaacaagaccctgatggaaagaggtttacccactttaaatgctgagattcaagctaatcttataggtcaattttcaagcattgaagaggaggacaatcctatctggtccttgattgataaacgaattaagctttacatgagaaggctactttgtcttccaagccctcaaaaatgcatgcctcctatgccaggaggcctagctgtcattcagcaggagctagaagccctaggctctcaatatgcaaacattgtgaatctcaacaaacaagtgtatggaccattttatgcaaatatacttcgaaagctgctcttcaatgaggaagccatggggaaggtagatgcttcacctcctactaactaaagaagaactgacattggacgagagattggaaatccagtactttggtatccagtccacttccattgatggcattagagatccagcacattctcagtactgtggtgcagtattagcccaaatctgtgtaatgggtaatattagcattacagaagacacacacatcacatagaccctcagaagacgtaaacatcacatagaccctatttgtgcatcattttcaagtttaaaacaaatatttgtaatgaacagaaaacaatttgtaattaattatattacctatataatacttgtaaatgttttcttaaccatttatatttggcttatgacatttaacccctaaggagttgtttttctcacttgttattatcaaacctaatggtttttaattttggtacaactccttaaagggttgaaggttgtgacaataactgagggaactgatgttctgaataaatgatgtgaagtaaacacaattgtatttgaaa

SEQ ID NO: 189883 - DNA, 625 bp, Homo sapiens
  Payload ID: 17492
  Gene Symbol: TCP11L2
  Gene Name: t-complex 11, testis-specific-like 2
  ENST ID: ENST00000551802
  CDS Start-End: 231-625
aaggcggggtcaggggccatcaagctcggctcctagttcatgtcttcccactccgcgtccccttgtttgacctcgaactgccgtcccgcgtgggagcggggagcggggcaccgagtggccgccccgcgtgtcggggtggacacggacttcgggcctcggaggccgcttcgccgctgtttaaatcctgctggacaggtgctacctttttacccacacttaagtgacgcaaaatgcccttcaatggcgagaagcagtgtgtgggagaggaccagccaagcgattctgattcttcccggttttccgaaagcatggcttcgctcagtgactatgaatgctccaggcagagctttgcaagtgactcctccagcaaatccagctctcctgcttcaacaagccctccaagggttgtaacatttgatgaagtgatggctacagcaaggaacttatcaaacttgactcttgctcatgagattgctgtaaatgagaactttcaattgaaacaagaggctctcccagaaaagagtttggctggtcgagtgaagcacattgttcaccaggccttctgggacgtcttggattcagaactaaatgctgaccctcctgagtttgaacatgccatcaaact

SEQ ID NO: 189884 - DNA, 153 bp, Homo sapiens
  Payload ID: 17492
  Gene Symbol: TCP11L2
  Gene Name: t-complex 11, testis-specific-like 2
  ENST ID: ENST00000553143
  CDS Start-End: 101-153
acgcacgccaagtcttcagagggcctggatgggtgtgactccaaggagctaatcgtcccgtgcaggtgctacctttttacccacacttaagtgacgcaaaatgcccttcaatggcgagaagcagtgtgtgggagaggaccagccaagcgattc

SEQ ID NO: 189885 - DNA, 1067 bp, Homo sapiens
  Payload ID: 17492
  Gene Symbol: TCP11L2
  Gene Name: t-complex 11, testis-specific-like 2
  ENST ID: ENST00000548428
  CDS Start-End: 775-1067
gggtgaggtcgtgcagactgctgctgcgtccccttgccgggacctttggttaaggggaagaggtggagaaaagccgattgggcctgggctcgaacgctgaaccctcaggtgttgcttgtgcttcccaaagctgctactgtaggtggcaccactgggggtaatagcaatgatttgaggtggcatatggatgaacatagttacttgttttcgttactattaagaaaatctgttccattaagtaagcagtttcacaatgatagagtttccttttaaaataaatatatttaaatgcaaaaatctagtcaagatagagacgcggttactaaattatagtaaaggtaaggagggagacgtagaaatagtcatgaagagtggcactcaaacgacttaagtttgggaaatcttagatggttgtcctgctaccttaactgtgaagaaactggacaagttgtccttgtccccagtgggtgtctcagcacccatggtcaccagcccagtcagggactttgctcttcttacctgccaacggataatgagttaatctcagtggttcccacttgaggaggctccctgccgtggtccttttcctctcttctctagggatttcatgcatcaccctgacagccagtggaagttgcctgatttgaagaggcccagggccgaagatacccagtcatgtgtggaagcagcttcaatgccattttgtgagaggttgagggccccagagggggaagcacaggtgctacctttttacccacacttaagtgacgcaaaatgcccttcaatggcgagaagcagtgtgtgggagaggaccagccaagcgattctgattcttcccggttttccgaaagcatggcttcgctcagtgactatgaatgctccaggcagagctttgcaagtgactcctccagcaaatccagctctcctgcttcaacaagccctccaagggttgtaacatttgatgaagtgatggctacagcaaggaacttatcaaacttgactcttgctcatgagattgctgtaaatgagaactttcaattgaaacaagaggctctcccagaaaagag

SEQ ID NO: 189886 - DNA, 534 bp, Homo sapiens
  Payload ID: 17492
  Gene Symbol: TCP11L2
  Gene Name: t-complex 11, testis-specific-like 2
  ENST ID: ENST00000549906
  CDS Start-End: 125-307
ctgtgctgtgctcggtgaggggacgcccagagagccctgacccggggtcactccgtcgccgttctcctcttgtctacgtgctggacccggtgctacctttttacccacacttaagtgacgcaaaatgcccttcaatggcgagaagcagtgtgtgggagaggaccagccaagcgattctgattcttcccggttttccgaaagcatggcttcgctcagtgactatgaatgctccaggcagagctttgcaagtgactcctccagcaaatccagctctcctgctttgctttatgaacatcttactgcatgaagcctttctggaaagacttttggatatcactggattattggaccaaagtatatagacatttttaaggagaatcttgagtcagacctggcaaaagaaattaacagcagccaccccagcaacaagccctccaagggttgtaacatttgatgaagtgatggctacagcaaggaacttatcaaacttgactcttgctcatgagattgctgtaaatgagaactttcaattga

SEQ ID NO: 189887 - DNA, 985 bp, Homo sapiens
  Payload ID: 17492
  Gene Symbol: TCP11L2
  Gene Name: t-complex 11, testis-specific-like 2
  ENST ID: ENST00000553098
  CDS Start-End: 284-985
ctggtgagttttcgaggtgactgtgctgtgctcggtgaggggacgcccagagagccctgacccggggtcactccgtcgccgttctcctcttgtctacgtgctggacccgggatttcatgcatcaccctgacagccagtggaagttgcctgatttgaagaggcccagggccgaagatacccagtcatgtgtggaagcagcttcaatgccattttgtgagaggttgagggccccagagggggaagcacaggtgctacctttttacccacacttaagtgacgcaaaatgcccttcaatggcgagaagcagtgtgtgggagaggaccagccaagcgattctgattcttcccggttttccgaaagcatggcttcgctcagtgactatgaatgctccaggcagagctttgcaagtgactcctccagcaaatccagctctcctgcttcaacaagccctccaagggttgtaacatttgatgaagtgatggctacagcaaggaacttatcaaacttgactcttgctcatgagattgctgtaaatgagaactttcaattgaaacaagaggctctcccagaaaagagtttggctggtcgagtgaagcacattgttcaccaggccttctgggacgtcttggattcagaactaaatgctgaccctcctgagtttgaacatgccatcaaactgtttgaagaaatcagagagattcttctctcttttctcactcccggtggcaaccggcttcgcaaccaaatctgtgaagttttggacacagacctcattaggcagcaggctgagcacagtgctgttgacatccaaggcctggccaactatgtcatcagtacgatgggaaagctgtgtgctcccgtgcgagataatgatatcagagagttaaaggctactggcaacatcgtggaggtgctgagacaaatattccatgtcctggacctcatgcaaatggacatggccaattttacaattatgagtctcaga

SEQ ID NO: 189888 - DNA, 1788 bp, Homo sapiens
  Payload ID: 17492
  Gene Symbol: TCP11L2
  Gene Name: t-complex 11, testis-specific-like 2
  Uniprot ID: Q8N4U5
  ENST ID: ENST00000547153
  CDS Start-End: 175-975
gggacactggggctgggggggtttgttgggctggtgagttttcgaggtgactgtgctgtgctcggtgaggggacgcccagagagccctgacccggggtcactccgtcgccgttctcctcttgtctacgtgctggacccggtgctacctttttacccacacttaagtgacgcaaaatgcccttcaatggcgagaagcagtgtgtgggagaggaccagccaagcgattctgattcttcccggttttccgaaagcatggcttcgctcagtgactatgaatgctccaggcagagctttgcaagtgactcctccagcaaatccagctctcctgcttcaacaagccctccaagggttgtaacatttgatgaagtgatggctacagcaaggaacttatcaaacttgactcttgctcatgagattgctgtaaatgagaactttcaattgaaacaagaggctctcccagaaaagagtttggctggtcgagtgaagcacattgttcaccaggccttctgggacgtcttggattcagaactaaatgctgaccctcctgagtttgaacatgccatcaaactgtttgaagaaatcagagagattcttctctcttttctcactcccggtggcaaccggcttcgcaaccaaatctgtgaagttttggacacagacctcattaggcagcaggctgagcacagtgctgttgacatccaaggcctggccaactatgtcatcagtacgatgggaaagctgtgtgctcccgtgcgagataatgatatcagagagttaaaggctactggcaacatcgtggaggtgctgagacaaatattccatgtcctggacctcatgcaaatggacatggccaattttacaattatgagtctcagaccgcaccttcaacgccagttggtggaatatgagagaaccaagttccaggaaattttggaagaaactccaagaaaagccgaggttgcaggtgcctcatgaggctgaccttgcttttggaaccagagagagcagtcaccgtgccagcctgtgagagtgaagtctctgccgatccctaagagaagagccaacgtttcactctaaacgcatgctccttctgctttaccggtcattctcaagtctgactacaaattagaatcatctggggcgtttaaacacagaggcctgagccctgcctcagacagaataaatcaaagtctccaggagctgtgcccatgaactctttttttcctttttaaagctccccaggtgattctaaagtcagccaggattgagaaccactatgccacactgttgcttttgttcaaggtaactaaatgggctcttaaatgtgtcagctgtaaatgattaaacttgcagtataaatgcttattactgccacattgtaattatattcacgatgatttccactcgcgctctctcagttggatgtcttttaaatgaaagactgcaagtcttttacatctttataaaacagaactagcaaaccaaaaacaacatttgccaactgaggagaaacaagagttgtgaaattctgggggtggtgttgctttagtgtggcaaacagaactactcataaattatccctgctcaagtgctgggtccaagaagaatttcagtctctctctactctgcacctgtgttcaggctgtatttcttggcaattgtcaccttataaattctaccaaatgtataattgtataagaactgtggtataaaaagcaatttgtttctagtgggaaaccttagaactgggcctaaagcaaaataaagtgaattttgtcctaaggcaga

SEQ ID NO: 189889 - DNA, 3198 bp, Homo sapiens
  Payload ID: 17492
  Gene Symbol: TCP11L2
  Gene Name: t-complex 11, testis-specific-like 2
  ENST ID: ENST00000546625
  CDS Start-End: 160-978
ggggggtttgttgggctggtgagttttcgaggtgactgtgctgtgctcggtgaggggacgcccagagagccctgacccggggtcactccgtcgccgttctcctcttgtctacgtgctggacccggtgctacctttttacccacacttaagtgacgcaaaatgcccttcaatggcgagaagcagtgtgtgggagaggaccagccaagcgattctgattcttcccggttttccgaaagcatggcttcgctcagtgactatgaatgctccaggcagagctttgcaagtgactcctccagcaaatccagctctcctgcttcaacaagccctccaagggttgtaacatttgatgaagtgatggctacagcaaggaacttatcaaacttgactcttgctcatgagattgctgtaaatgagaactttcaattgaaacaagaggctctcccagaaaagagtttggctggtcgagtgaagcacattgttcaccaggccttctgggacgtcttggattcagaactaaatgctgaccctcctgagtttgaacatgccatcaaactgtttgaagaaatcagagagattcttctctcttttctcactcccggtggcaaccggcttcgcaaccaaatctgtgaagttttggacacagacctcattaggcagcaggctgagcacagtgctgttgacatccaaggcctggccaactatgtcatcagtacgatgggaaagctgtgtgctcccgtgcgagataatgatatcagagagttaaaggctactggcaacatcgtggaggtgctgagacaaatattccatgtcctggacctcatgcaaatggacatggccaattttacaattatgagtctcagaccgcaccttcaacgccagttggtggaatatgagagaaccaagttccaggaaattttggaagaaactccaagtgagtataatataatgtgtatttatattgaaattaggttaaaatgatgattttaaatgttaaaatttaaattaaattaaattaaattaaattaaattaataaataaataaaatttaatttaatttaaattaattaaaatttaaaatgttaaaggttaaaatgaaaattaggtgatgttttcatttttgacttcatatatagtatcactaaagaattttggcctttctattaaacatttttttaccttccaaaattgacatcacaaacttacagttgtttattctgtccaggaactgtgctaagcactattcgtttcttcattcattcaagatatatttattgagtgcctcctgtgtttcagacactgcttaggtgcagtggatactgcagcgaacagaatggaatacagttgccgtccccaaggagctgacattctagtaggcatgacaaataaataaacatatattgtcaggtgtattattaagtgctatgaagaaaaataggataaagggacagtaatgggtcagaagtgaggacagcattgttttttagatgtgatggactgggaaggtctctgtaagtaacatttgagtaaagtttgcaaagaaatgaggaaggggcatgtaaagatggggaaaagaacgttctagcctgagggactgcaggtacaaaggcactgaagcagaaactgcttatgagtttgacaaacacagggcagacattgtgacgggagtagagttggtaaggggagagtggtaagagatgaggctgaaaaggagataaaggcaggtcacatagagcattgttagtaaatgagaggagtttggatttcattccatgtgcggtggaaactcatcagagagttttaatcaggggagcaacatctgattttcatttttgaagaatattcttgttcctggctacagaataggtcatgtgggaacaaagagggaaacagaggtaccaattaggtggtattacagttgctcaggcaagaaatgatggtggcttgttccagatggtaatggtggaaggagtgagaagagaccagattctggatacattttgaaagtggagtaatcagatttgctgaagattggataagggagaaaagagttgagggtgactctaaggtttttggcctcgtacaaccgggtgaatggtcatacagtttgagtgaaactggtgagaccaggagaaagaaggttgggagatgacatggaatcaagagttcagtttggtgatgtaaacttttgagatttcatttgacatcaatgtggagatgttaggtaggcatttagatatgaattatgagtttacaggaataatggaaactgtatatgtatttgggaatcatcagtatatgtatgatatataaagccatggaactgggtactagttaacacttagaaaatccttatcacactctaagtactttacctgtacaaactaatttaatccttgcaacaactatatgaagttaccccccattttatgggtgcggaaactgaggcactgtgaggttaagtcactggcctatgtaacacacttaaaagtataggagctcacctaggaaggcagcttggctccatagtccatgttcctgtccattatattacactgggtgagactacctagggggagtgagtgtggactctgaaagaaactgacgtggggcactccagcagctagaagctgaagttgagatgaggaggagggtctaacaatggagactatgagggagtagccagagaggtagtgtgacagtcaggagaggcgggtgtcctgtaagatacgtgaagaaggtatttggagaaggaaggcatgtttggatttgacaagcattgctaagtggtcaagaaagacacaggccaacttgaccattggatttgactgtttgatgatggtcagtaaccttgatgagagtggtttcagtggatttgtgtgcattaaagccagactgggcagggcacagtggctcacacctgtaatcctagcactttgggaggccgaggcaggcacatcacctgagatcaggagttcaagaccagcctggccaacatgctgaaaccccttctctactaaaatctaaaaattagccgggatgatggcaggtgcctgtaatcccagctgctcgggaggttgagatgggagaatcgcttgaacccaggagatggtggttgcagtgagccaaggtcgcatcattgcactccagcctggggggctgagcaagactccgtctcggaaaaaaaaaaaaaaaaaaaaa

SEQ ID NO: 189890 - DNA, 544 bp, Homo sapiens
  Payload ID: 17492
  Gene Symbol: TCP11L2
  Gene Name: t-complex 11, testis-specific-like 2
  ENST ID: ENST00000551228
  CDS Start-End: 492-544
tggcactcaaacgacttaagtttgggaaatcttagatggttgtcctgctaccttaactgtgaagaaactggacaagttgtccttgtccccagtgggtgtctcagcacccatggtcaccagcccagtcagggactttgctcttcttacctgccaacggataatgagttaatctcagtggttcccacttgaggaggctccctgccgtggtccttttcctctcttctctagggatttcatgcatcaccctgacagccagtggaagttgcctgatttgaagaggcccagggccgaagatacccagtcatgtgtggaagcagcttcaatgccattttgtgagaggttgagggccccagagggggaagcacagtgacctgctatcgtgttggaggctttgcttggagtcatcttcagtcttttctgttgactttacctttgaccagtgattaaatcctccaggtgctacctttttacccacacttaagtgacgcaaaatgcccttcaatggcgagaagcagtgtgtgggagaggaccagccaagcgattc

SEQ ID NO: 189891 - DNA, 616 bp, Homo sapiens
  Payload ID: 17493
  Gene Symbol: TCTE1
  Gene Name: t-complex-associated-testis-expressed 1
  ENST ID: ENST00000371504
  CDS Start-End: 4-600
cgcatgttcttcgagcggcacctggagaacctgctaaagcactttatcccaggcaccacagaccctgcggtgatcctcgacctgctgccgctctgccggaattacgtgcgcagggtccacgtcgatcagttccttccgccggtgcagctcccggcccagctccggccgggcgaccagtccgactcaggcagcgagggagagatggaggagcccaccgttgaccactaccaactgggcgatctggtagctggcctgagccacctggaggagctggacctggtgtacgatgtcaaggactgcggcatgaatttcgagtggaatctcttcctcttcacctaccgtgactgcctctccttggcagccgccatcaaggcatgccacaccctcaaggacggtgggaagcagctcctggaaggcatgtcagacaacaagaccctcctggaatttgacttgcgcctgtcagatgtggcccaggaaagcgagtacctcattggccaggccctctacgcaaaccgagaagcagcccgccagcgggccctgaatcccagccacttcatgtcaaccataactgccaatggccctgagaactctgtgggataaaatgacctgacttgga

SEQ ID NO: 189892 - DNA, 3067 bp, Homo sapiens
  Payload ID: 17493
  Gene Symbol: TCTE1
  Gene Name: t-complex-associated-testis-expressed 1
  Uniprot ID: Q5JU00
  ENST ID: ENST00000371505
  CDS Start-End: 124-1629
gtgaggcgagcgccggggctcccggagcggatccctacctgtttcaaggacctgccagtctgagaagcttcttgtcataaggccatccaggggccacgcacccctaccttgccagcctccagcatgcaggataccgtaacgacatcagcattgttggaccccagccactcctcagtctccacccaggacaattcctccactggaggacacacttcaagcacaagcccacagctctcaaagccttcaatcacaccagtccctgcaaagtccaggaacccacatcccagggccaatatccgtcggatgcgccggatcattgctgaggatcctgagtggtcactggccatcgtgcccctcctcacagagctctgcattcagcacattatcaggaacttccagaaaaaccctatcctgaagcagatgctcccggaacaccagcagaaggtcctgaaccacctgtcccctgacctaccactggctgtgaccgccaacctgatagacagtgagaactactggctccgctgctgcatgcatcgctggcccgtgtgccacgtggcccaccatggcggcagctggaaacgcatgttcttcgagcggcacctggagaacctgctaaagcactttatcccaggcaccacagaccctgcggtgatcctcgacctgctgccgctctgccggaattacgtgcgcagggtccacgtcgatcagttccttccgccggtgcagctcccggcccagctccggccgggcgaccagtccgactcaggcagcgagggagagatggaggagcccaccgttgaccactaccaactgggcgatctggtagctggcctgagccacctggaggagctggacctggtgtacgatgtcaaggactgcggcatgaatttcgagtggaatctcttcctcttcacctaccgtgactgcctctccttggcagccgccatcaaggcatgccacaccctcaagatcttcaagctgacccgaagcaaggtggatgatgacaaggcacgcatcataattcgaagccttctggaccacccagtcctcgaggagctggacttgtcacaaaacctcattggagaccgtggtgcacgaggtgctgccaagctgctgagccacagccgcctgcgtgtgctcaacctggctaacaaccaggtgcgtgcacccggtgcccagtccctggctcacgctctggcacacaacaccaacctcatttccctcaacctacgtctcaactgcatcgaggatgagggtggccaggctcttgcccatgccttgcagaccaacaagtgcctcaccacgctgcacctcggtggcaatgagctgtctgagcccaccgccacactcctgtcacaggtgctcgccatcaacaccacactcaccagcatcaacctgtcctgcaaccacatcgggctggacggtgggaagcagctcctggaaggcatgtcagacaacaagaccctcctggaatttgacttgcgcctgtcagatgtggcccaggaaagcgagtacctcattggccaggccctctacgcaaaccgagaagcagcccgccagcgggccctgaatcccagccacttcatgtcaaccataactgccaatggccctgagaactctgtgggataaaatgacctgacttggatcatggccccagccccatccctcatttcatacccctgccatgcctgctgcagagtatcacactggttcagagggagcggggagggggactgtgaataaccttggagtgatcaagggttgtatggatggagacatgaggcagggaagggagcctggcatgggggaagaaagggtatgcagtagggacccagcctttgtgcccagggaaaggatattactggacacccacaaatgaccaacttctttcaggaacagggaagtcagagaggtgtctgagggactgtgcctgccagattctcccgttggggctgcctgcctccctgactccccaccattttcttctctaccaaacagatccttgatcttcaaacacacacacacacacacacacacacacacacacacacacacacacaccctctggctacagcagggctatgcctggctctctctgccaccctcatccctgtagatgcatttccctgttgcttgactctgctttaagtgatccagttctacaggccacgccatcccctagttccccaactcccaacctgggaaggggacaatgagctgacaccaggggctcagacccagtggactcctctggggaggcaactgtagatgacaacttccagggaaggatgacacaatccctgccacccaccccagagagcttccctgggagggagggaaagaagtgccacactgggacaggaagtcagtgagtcatccacgactttattatccaccagtttgatttgtacaatctttgcgcttaaatccacgacaaaaaggccacagtgtgatgcacccaattgacagagacctgtcttctccccagccaggcccagcccaccccacaagcccttgtccccaggacacatggagccttccaggtgccctacatgagtcccccatcactctgtagctgtccaccctggggccacacctacaggaatcacatcagcccccagggccacaagagacctagctgactgattcaggctgagcgccattgcccatcctccttgggctgattcattggcccagagcctccagaactgtgtccccaaagggcaggtcatgggctacaaccccagtccaggagtgcctgctctccagggactccttccgctaagcaggcgctgagcagagcaccaaagggggcttgggagtgactgcatgtgtgtgcctgtctaggcaacctagagtctgtctgtgcctgacaccctctgacagttccggagtgcaaacgtgtaggtgtgagggtgtgtgtgtgtgtgtgtgtgtgtatagccacagctgctagcagaagttctaattagagaaacaagaacattcagtgtaaagtttaattttagagattaattaattttctggttttcattttccctggcaatcagtaaagctaccaagaaaa

SEQ ID NO: 189893 - DNA, 769 bp, Homo sapiens
  Payload ID: 17494
  Gene Symbol: TCTE3
  Gene Name: t-complex-associated-testis-expressed 3
  Uniprot ID: Q8IZS6
  ENST ID: ENST00000366774
  CDS Start-End: 102-698
cgaggcgcaggtgggagacttccgccctcgcgggactggctagggcgtttgaccgccggcggtgaaggggaggcggtgggcgtcttggagaacagagcgagatggagaagcgaggccgaggcgtgaagtcgagccccatccagaccccgaaccagacccctcagcaggctccggtgacgcctaggaaagaaaggaggcctagcatgttcgagaaggaggcatatacacagattttaagagaaagactgagagagtcaattcacaatgttcagtatgtggagcctccttttgatgactcaattgctgatataggtaaagaatggaagagtgccctggcaaaattaaagtttgctaattcatatagaatggagccattgaagaaattccaagctcattcagtagaaactaaagtccagcagatactaacagaaagtcttaaagatgtcaaatatgatgataaagtattctctcacttgtcacttgaattggcagaccgcatactgttagcagtcaaagaatttgggtaccaccgttataagttcattataaaagtattatttattcaaaagactggccaagcaataaatattgccagcagatggatctgggacattgcatgggacagctgggtcgcagctaaacacgaagcagaatcctacgtggcactggtcttggtgtttgccctttattatgaatagctcattacaggtactaaggattgtttacttccgaacttttcaaaaataaatgaaatttacatatttgtaaa

SEQ ID NO: 189894 - DNA, 769 bp, Homo sapiens; identical to SEQ ID NO: 189893
  Payload ID: 17494
  Gene Symbol: TCTE3
  Gene Name: t-complex-associated-testis-expressed 3
  Uniprot ID: Q8IZS6
  ENST ID: ENST00000610291
  CDS Start-End: 102-698

SEQ ID NO: 189895 - DNA, 2001 bp, Homo sapiens
  Payload ID: 17495
  Gene Symbol: TCTEX1D1
  Gene Name: Tctex1 domain containing 1
  Uniprot ID: Q8N7M0
  ENST ID: ENST00000282670
  CDS Start-End: 129-668
gagtccagggagagtgcgcgggcggccgccggctgaatgaagcctgggacgcgggagccgcgccgcgcgcagtgtctgcagtgccggaggtctgggaggctccgggcgaagcctccctgctgcaggttatgatgatgtcagacaatgctaaaggcagagcagctcattcatggaagaaaagagggagtatttcttctctaagtaatcatgaattttggcgaaaggaaattcatgggcgcatcaaagattctatgagtactgtgtcttatatggaagaacccagtcagcgtgatgatatctctcgccttacagttcagatggaaaacacctatcagttgggtcctcccaaacattttcctgtggtcaccgtcaatcatattttgaaagatgtagtaaccagctatctacaagtagaagaatatgaaccagagctctgtagacagatgactaaaaccatttctgaggttattaaagcccaggtcaaggacttgatgattccacggtataaactaattgtgattgttcacattggacaactgaacaggcagagcatacttattggaagcagatgcctctgggatcctaaaagtgataccttttcatcttatgttttcagaaattcttctctcttcgctcttgcaaatgtctatgcagtttaccttgagtgattgaaaataagaaatctagctcttacttttgaaaattctgaggcaggctgtatgtctgtacacaaaagttttactgccaaaaactttgagaaagaaacaacactgatatttcaagcaactggaagcttttgaattttttcatattctagtaaagatttggggaggggagggtagccacagaaagaatcttgtttatctaaagcaggaacttgatcttggttttgctggattgctttccatagacatagattcttattaaatatttgttttggtactaattattttaattattctttaattagagtgttacaatttcctgcattgttttttaataaaaagaagctttagaaaaactatggctatataccctgaccaataaatgatagtagaatattcaacatggtatacacaaatgataaataatgtgcctcagtgctgcatataaaagaatactggttttcattttgtacttaataaattgagcagcattcattaagtgcaattattgttacatgtacctgacagttgaaactgctgaggtagaattaatggcttcataacaattatcgtggtcccacgggctgcaagctaaaactagaagctcttgtggcttgcctgcactttacacaattgtgggagaaccgaaagttggctcttcagtaatggaaactataaagtgaataaaggctttttgggacactgaagtagacattgtgatattaaatatacatgatgcttaatactaaatgtgtctgtaacacataaaatcatttattggaaagagacattgcttttaaatatcctaggctaacaaactttttcacaaaatatatggctggcaccttaacaaataaagcatgtgtagttaccattttactcctatgaatttaatactaaagtgacccagtgaggtttttgaatagacgggtgctaaaatttacagggctgaaatagcttattattctgctggttaatgtatcttacgccacggatcatttatttttatgaagctttcaagtctttgtgtgcaagtaaaatgatgttgtggcgttgttcttggatggtaagtggactgcctagaggacatttgttaaaggtcaaagacaaattgtacacatatggagaaaattagcaatgctgtagtcttaaggaaaaaatgatttatcattcatatcaaaaagagtttagcaaatggaaaaccagttaatgctttaattttaaaatgttttggtgtcttacttttccctaaaaatgacatgtagtaaaaaatggatacttttaaaatcccttcccttctgctattttctggcttttaaagtgattattcaaaatg

SEQ ID NO: 189896 - DNA, 1010 bp, Homo sapiens
  Payload ID: 17495
  Gene Symbol: TCTEX1D1
  Gene Name: Tctex1 domain containing 1
  ENST ID: ENST00000528352
  CDS Start-End: 94-324
aatgaagcctgggacgcgggagccgcgccgcgcgcagtgtctgcagtgccggaggtctgggaggctccgggcgaagcctccctgctgcaggttatgatgatgtcagacaatgctaaaggcagagcagctcattcatggaagaaaagagggagtatttcttctctaagtaatcatgaattttggcgaaaggaaattcatgggcgcatcaaagattctatgagtactgtgtcttatatggaagaacccagtcagcgtgatgatatctctcgccttacagttcagatggaaaacacctatcagttggcacaatataagggactttaatgaattgagtgatttgatgttgctttagtttcttcctcagcaaaaagcattgtattagactctgaggaggataaaatccgagcttgcttaccatttcactggaaacgcaggtcctcccaaacattttcctgtggtcaccgtcaatcatattttgaaagatgtagtaaccagctatctacaagtagaagaatatgaaccagagctctgtagacagatgactaaaaccatttctgaggttattaaagcccaggtcaaggacttgatgattccacggtataaactaattgtgattgttcacattggacaactgaacaggcagagcatacttattggaagcagatgcctctgggatcctaaaagtgataccttttcatcttatgttttcagaaattcttctctcttcgctcttgcaaatgtctatgcagtttaccttgagtgattgaaaataagaaatctagctcttacttttgaaaattctgaggcaggctgtatgtctgtacacaaaagttttactgccaaaaactttgagaaagaaacaacactgatatttcaagcaactggaagcttttgaattttttcatattctagtaaagatttggggaggggagggtagccacagaaagaatcttgtttatctaaagcaggaacttgatcttggttttgctggattgctttccatagacata

SEQ ID NO: 189897 - DNA, 673 bp, Homo sapiens
  Payload ID: 17496
  Gene Symbol: TCTEX1D2
  Gene Name: Tctex1 domain containing 2
  Uniprot ID: Q8WW35
  ENST ID: ENST00000325318
  CDS Start-End: 137-565
tgtgcggggcgctcgcgggcttcagcgaggcgggagggcggccctgttgccctggagacgctttccctgctgccggccgcgaccgcaacccgctaggccttcatcgcgagctacgcccggaccgagaagccccggcatggccacgtccatcggagtgtccttctcggtgggcgacggggtgcctgaggctgagaagaacgcaggggagcccgagaacacctatattctgcggcctgttttccagcagaggttcaggccctctgtggttaaagactgtatccatgctgtgctcaaggaggaactggcaaatgctgaatattctccagaagaaatgcctcagcttacaaaacatttatcagaaaacattaaagataaattaaaagaaatgggatttgaccgatacaaaatggtggtgcaagtagtgattggagaacaaagaggtgaaggagtattcatggcttctcgctgtttctgggatgctgacactgacaactatactcatgatgttttcatgaatgacagtttattctgcgttgtagcagcatttggctgtttctactactgaatgaatctttgaaaagctggtaaaagacatgaccatgaagaaatctgaactttttaatattgttaaatatcttgacaaaataaagatgttagtagtttgacaactgaa

SEQ ID NO: 189898 - DNA, 800 bp, Homo sapiens
  Payload ID: 17496
  Gene Symbol: TCTEX1D2
  Gene Name: Tctex1 domain containing 2
  ENST ID: ENST00000446494
  CDS Start-End: 148-546
gggagggcggctgtgcggggcgctcgcgggcttcagcgaggcgggagggcggccctgttgccctggagacgctttccctgctgccggccgcgaccgcaacccgctaggccttcatcgcgagctacgcccggaccgagaagccccggcatggccacgtccatcggagtgtccttctcggtgggcgacggggtgcctgaggctgagaagaacgcaggggagcccgagaacacctatattctgcggcctgttttccagcagaggttcaggccctctgtggttaaagactgtatccatgctgtgctcaaggaggaactggcaaatgctgaatattctccagaagaaatgcctcagcttacaaaacatttatcagaaaacattaaagataaattaaaagaaatgggatttgaccgatacaaaatggtggtgcaagtagtgattggagaacaaagaggtgaaggagtattgctggagtgcagtggcatgatctcggctcactgcaacctctgcctgccgggttcaagtgattctcctgcctcagcctcctgagtagctgggattacaggcgctcaccaccacgcccagcatggcttctcgctgtttctgggatgctgacactgacaactatactcatgatgttttcatgaatgacagtttattctgcgttgtagcagcatttggctgtttctactactgaatgaatctttgaaaagctggtaaaagacatgaccatgaagaaatctgaactttttaatattgttaaatatcttgacaaaataaagatgttagtagtttgacaactg

SEQ ID NO: 189899 - DNA, 603 bp, Homo sapiens
  Payload ID: 17496
  Gene Symbol: TCTEX1D2
  Gene Name: Tctex1 domain containing 2
  ENST ID: ENST00000426563
  CDS Start-End: 63-200
ggccgcgaccgcaacccgctaggccttcatcgcgagctacgcccggaccgagaagccccggcatggccacgtccatcggagtgtccttctcggtgggcgacggggtgcctgaggctgagaagaacgcaggggagcccgagaacacctatattctgcggcctgttttccagcagaggcgggttcaggccctctgtggttaaagactgtatccatgctgtgctcaaggaggaactggcaaatgctgaatattctccagaagaaatgcctcagcttacaaaacatttatcagaaaacattaaagataaattaaaagaaatgggatttgaccgatacaaaatggtggtgcaagtagtgattggagaacaaagaggtgaaggagtattcatggcttctcgctgtttctgggatgctgacactgacaactatactcatgatgttttcatgaatgacagtttattctgcgttgtagcagcatttggctgtttctactactgaatgaatctttgaaaagctggtaaaagacatgaccatgaagaaatctgaactttttaatattgttaaatatcttgacaaaataaagatgttagtagtttgacaactgaa

SEQ ID NO: 189900 - DNA, 763 bp, Homo sapiens
  Payload ID: 17497
  Gene Symbol: TCTEX1D4
  Gene Name: Tctex1 domain containing 4
  Uniprot ID: Q5JR98
  ENST ID: ENST00000339355
  CDS Start-End: 8-673
caggtccatggccagcaggcctctgcccccgggacgccaggaggaggagaatgccaaagactccgggcggaaaccctcaccggtgcggccccgaggctgcctgcccagcattgatgaggcccgaccggcaggtccaggtccagccccggcctcgcgccggggctccatgctgggcctggccgcgtccttctcccgccgcaactcgctggtcgggccaggcgcgggtcctgggggtcagcggccatccctgggcccggtgccccctctgggctcaagggtcagcttctcagggttgcccctggcgcccgcccgttgggtggcgccctcctaccgcacggagccagtgcccggggagcgctgggaggctgcgcgtgcacagcgtgccctggaggcggcgctggccgcagggctgcacgacgcgtgctactccagcgacgaggccgcgcggctggtgcgggagctctgcgagcaggtgcacgttcgcctgcgcgagctcagcccgccacgctacaagctggtatgcagtgtggtgctggggccgcgcgcgggccagggcgttcacgtggtcagccgtgcgctctgggacgtggcgcgcgatgggctggcctcggtctcctacaccaacacctcgctcttcgcggtggccacggtccacgggctctactgcgagtgagggggagtccaattctgcaaaattgtttattatcctaggaggaggcccccctggggctcacatcccaataaataagtgtctgacaataaa

SEQ ID NO: 189901 - DNA, 1905 bp, Homo sapiens
  Payload ID: 17498
  Gene Symbol: TGDS
  Gene Name: TDP-glucose 4,6-dehydratase
  Uniprot ID: O95455
  ENST ID: ENST00000261296
  CDS Start-End: 122-1174
gcctctggctgctctgttaacgtgtcccgcgagcgaggcgcgtcgcaaaaggtcgcggcggaacttccctgcgcttttcagaccatactctttacggtactaggcactgctgagctgggagatgtcggcggcgtgttgggaggaaccgtggggtcttcccggcggctttgcgaagcgggtcctggtgaccggcggtgctggtttcattgcatcacatatgattgtctctttagtggaagattatccaaactatatgatcataaatctagacaagctggattactgtgcaagcttgaagaatcttgaaaccatttctaacaaacagaactacaaatttatacagggtgacatatgtgattctcactttgtgaaactgctttttgaaacagagaaaatagatatagtactacattttgccgcacaaacacatgtagatctttcattcgtacgtgcctttgagtttacctatgttaatgtttatggcactcacgttttggtaagtgctgctcatgaagccagagtggagaagtttatttatgtcagcacagatgaagtatatggtggcagtcttgataaggaatttgatgaatcttcacccaaacaacctacaaatccttatgcatcatctaaagcagctgctgaatgttttgtacagtcttactgggaacaatataagtttccagttgtcatcacaagaagcagtaatgtttatggaccacatcaatatccagaaaaggttattccaaaatttatatctttgctacagcacaacaggaaatgttgcattcatgggtcagggcttcaaacaagaaacttcctttatgctactgatgttgtagaagcatttctcactgtcctcaaaaaagggaaaccaggtgaaatttataacatcggaaccaattttgaaatgtcagttgtccagcttgccaaagaactaatacaactgatcaaagagaccaattcagagtctgaaatggaaaattgggttgattatgttaatgatagacccaccaatgacatgagatacccaatgaagtcagaaaaaatacatggcttaggatggagacctaaagtgccttggaaagaaggaataaagaaaacaattgaatggtacagagagaattttcacaactggaagaatgtggaaaaggcattagaaccctttccggtataatcaccatttatatagtcgagacagttgtcaaagaagaaagttatcctacctcgccaagtggtatgaaattaagtgaccaaatgaagtgcactcttttcttttggaattagattcatgactttctgtataaaattcaaatgcagaatgcctcaatctttgggagagtttcagtactggcatagaatttaaatgtcaaaattctttctgaaaccctttctcctagaaactaggaaataataggtgtagaagactctccctaagggtagccaggaagaagtctcctgattcggacaaccatgaggggtagtggtgctagggagaaggcaaccttcactggttttgaactcagtgcctaagaaagtctctgaaatgttcgtttttaggcaatataggatgtcttaggccctaattcaccatttcttttttaagatctgatatgctatcattgccttaataatggaacaaaatagaagcatatctaacactttttaaattgataattttgtaaaattgattacgttgaatgctttttaagagaagtgtgtaaagtttttatattttcacaattaacgtatgtaaaaccttgtatcagaaatttatcatgtttactgtttaaaatgattgtatttataaaattgtcaatatcttaatgtatttaatgtagaatattgctttttaaaataatgtttttattttgctgtagaaaaataaaaaaaaatttgattatatat

SEQ ID NO: 189902 - DNA, 3075 bp, Homo sapiens
  Payload ID: 17499
  Gene Symbol: TEAD1
  Gene Name: TEA domain family member 1 (SV40 transcriptional enhancer factor)
  Uniprot ID: P28347
  ENST ID: ENST00000334310
  CDS Start-End: 159-1232
tcgcagttaccaccaaacccaggaggagactctccctggaaaacttcccttccctttcggtttattttcttgaaaaggctccaggcttcggcttggaaaatcccaccgccaaaattgagcccagcagctggagcggcagtgagagccctgccgaaaacatggaaaggatgagtgactctgcagataagccaattgacaatgatgcagaaggggtctggagccccgacatcgagcaaagctttcaggaggccctggctatctatccaccatgtgggaggaggaaaatcatcttatcagacgaaggcaaaatgtatggtaggaatgaattgatagccagatacatcaaactcaggacaggcaagacgaggaccagaaaacaggtgtctagtcacattcaggttcttgccagaaggaaatctcgtgattttcattccaagctaaaggtaacaagcatggatcagactgcaaaggataaggccctgcagcacatggcggccatgtcctcagcccagatcgtctcggccactgccattcataacaagctggggctgcctgggattccacgcccgaccttcccaggggcgccggggttctggccgggaatgattcaaacagggcagccaggatcctcacaagacgtcaagccttttgtgcagcaggcctaccccatccagccagcggtcacagcccccattccagggtttgagcctgcatcggccccagctccctcagtccctgcctggcaaggtcgctccattggcacaaccaagcttcgcctggtggaattttcagcttttctcgagcagcagcgagacccagactcggctgatttaaactgcaatattcaagatgatgctggggctttttatggtgtaaccagtcagtacgagagttctgaaaatatgacagtcacctgttccaccaaagtttgctcctttgggaagcaagtagtagaaaaagtagagacggagtatgcaaggtttgagaatggccgatttgtataccgaataaaccgctccccaatgtgtgaatatatgatcaacttcatccacaagctcaaacacttaccagagaaatatatgatgaacagtgttttggaaaacttcacaattttattggtggtaacaaacagggatacacaagaaactctactctgcatggcctgtgtgtttgaagtttcaaatagtgaacacggagcacaacatcatatttacaggcttgtaaaggactgaacatggttatttatatatatagatatctgtatatacacacacacatatgtgcacacacacactctctctccattatcgaacgactgactgtaaacctcaccacacagggtggtgccctggccccgaggtcaccccgacttttctaaatcttgtttgagtgaagtcattttttcatgtgttcatactatcattgtagctgtgaagttctggtacagttgtaaaaagagaaattgagttgtttctctatgttcttcagatgtgcagcccacaattcctcgggaaaggtgaacctgaacaacccaagtctctctctgcagagccctgtttctaattgtggtagaaaatattgagacagagcatttgccatgggacatttacagcctttatacaaatgtatttagttctcttttttccaacataaaattcttgttttaagatacaagtaaaattaatctttaaatataaatgtaaattagtacacaaaactaagaatctttagacttatctttgtaactaattagggtggaagttatgaaagaatgtaattcactaaattattttttaaatgaaacctttttttttctttttgaaaccaaatgttaaactatagccttaagaaatgcttggtagaagtgtcctaatgagacaaatttgtacttttatcctcaaggttaacactaatctcctaatccattaaactcttgaacaggtattacaaaggaagaaaacttcaccccttatccttaacatatatagtatatttaaaaaatataaaattgtattgtactaatgtgatgatggattatttaatgaaaaagaaaaaatggctctttttgcaataagtagatacatactgaaaaaatctaaacttacaatgtttatagtcttgtgtgtgcagttatattttatatggacgaccaaattttttattaagatgagtaaatatttgaaccactgaattttaataacaaaattttaaaattggcatgaatacggaatactgcactgtgagatgcaaagtatacagaatctgtggctgggagaaaatttcatcaaatagacaagtaaaaggctcatcagttttagcatctctgctccccagaaaattgtaagcatcctcaccagcctgtggatacattctttatttctagtgacccaatatgcatattaacctgctataactagggctatatgtgtaggtatgtgtatacatatacacaaatgcacatatagagttaacacatttagtgaacacttgtttagtgtcactcagtttgctaggtgctgatatgtacgtatatctcaatgtgtctgtagacttagatacatcctcttgaagcacatccatttctttagcgtctctcagtaagttacagtacttgtttgacttaggtttaagaggcccagctacctatctctgaccttttcaaataggctcatttgggagattcttttgccaggagagattcaactttccaatctaagtattccagagcattgcccaggcagagttggtttgatgtggccagatgttttgagttatttcccttaagtgtttcactggggagagaacagggagtgctcctccagcttcccaaagaaatatgtttttgtaagtggtaggaacatgtgcacacaatagaacatgaaataagttttttaacttgtaaaacatgtcaagatttttccaccaagctagaaaataaaaaacttagttctaccacatccaattaacttacacacccccttccctgtctcaacacctgctttgaccctgcttttctattattacatcagtcagcatcttgtggtccctaacatgaggatgtggctggctcgtggg

SEQ ID NO: 189903 - DNA, 8158 bp, Homo sapiens
  Payload ID: 17499
  Gene Symbol: TEAD1
  Gene Name: TEA domain family member 1 (SV40 transcriptional enhancer factor)
  ENST ID: ENST00000361985
  CDS Start-End: 350-1435
agggagtgtggtggcattgctctgcagagacatgaacagctccctgggagacactgctggggaaagatgagtcgagtctacggttttttctcatcctcctgtttattttcttgaaaaggctccaggcttcggcttggaaaatcccaccgccaaaattgagcccagcagctggagcggcagtgagagccctgccgaaaacatggaaaggatgagtgactctgcagataagccaattgacaatgatgcagaaggggtctggagccccgacatcgagcaaagctttcaggaggccctggctatctatccaccatgtgggaggaggaaaatcatcttatcagacgaaggcaaaatgtatggtaggaatgaattgatagccagatacatcaaactcaggacaggcaagacgaggaccagaaaacaggtgtctagtcacattcaggttcttgccagaaggaaatctcgtgattttcattccaagctaaaggatcagactgcaaaggataaggccctgcagcacatggcggccatgtcctcagcccagatcgtctcggccactgccattcataacaagctggggctgcctgggattccacgcccgaccttcccaggggcgccggggttctggccgggaatgattcaaacagggcagccaggatcctcacaagacgtcaagccttttgtgcagcaggcctaccccatccagccagcggtcacagcccccattccagggtttgagcctgcatcggccccagctccctcagtccctgcctggcaaggtcgctccattggcacaaccaagcttcgcctggtggaattttcagcttttctcgagcagcagcgagacccagactcgtacaacaaacacctcttcgtgcacattgggcatgccaaccattcttacagtgacccattgcttgaatcagtggacattcgtcagatttatgacaaatttcctgaaaagaaaggtggcttaaaggaactgtttggaaagggccctcaaaatgccttcttcctcgtaaaattctgggctgatttaaactgcaatattcaagatgatgctggggctttttatggtgtaaccagtcagtacgagagttctgaaaatatgacagtcacctgttccaccaaagtttgctcctttgggaagcaagtagtagaaaaagtagagacggagtatgcaaggtttgagaatggccgatttgtataccgaataaaccgctccccaatgtgtgaatatatgatcaacttcatccacaagctcaaacacttaccagagaaatatatgatgaacagtgttttggaaaacttcacaattttattggtggtaacaaacagggatacacaagaaactctactctgcatggcctgtgtgtttgaagtttcaaatagtgaacacggagcacaacatcatatttacaggcttgtaaaggactgaacatggttatttatatatatagatatctgtatatacacacacacatatgtgcacacacacactctctctccattatcgaacgactgactgtaaacctcaccacacagggtggtgccctggccccgaggtcaccccgacttttctaaatcttgtttgagtgaagtcattttttcatgtgttcatactatcattgtagctgtgaagttctggtacagttgtaaaaagagaaattgagttgtttctctatgttcttcagatgtgcagcccacaattcctcgggaaaggtgaacctgaacaacccaagtctctctctgcagagccctgtttctaattgtggtagaaaatattgagacagagcatttgccatgggacatttacagcctttatacaaatgtatttagttctcttttttccaacataaaattcttgttttaagatacaagtaaaattaatctttaaatataaatgtaaattagtacacaaaactaagaatctttagacttatctttgtaactaattagggtggaagttatgaaagaatgtaattcactaaattattttttaaatgaaacctttttttttctttttgaaaccaaatgttaaactatagccttaagaaatgcttggtagaagtgtcctaatgagacaaatttgtacttttatcctcaaggttaacactaatctcctaatccattaaactcttgaacaggtattacaaaggaagaaaacttcaccccttatccttaacatatatagtatatttaaaaaatataaaattgtattgtactaatgtgatgatggattatttaatgaaaaagaaaaaatggctctttttgcaataagtagatacatactgaaaaaatctaaacttacaatgtttatagtcttgtgtgtgcagttatattttatatggacgaccaaattttttattaagatgagtaaatatttgaaccactgaattttaataacaaaattttaaaattggcatgaatacggaatactgcactgtgagatgcaaagtatacagaatctgtggctgggagaaaatttcatcaaatagacaagtaaaaggctcatcagttttagcatctctgctccccagaaaattgtaagcatcctcaccagcctgtggatacattctttatttctagtgacccaatatgcatattaacctgctataactagggctatatgtgtaggtatgtgtatacatatacacaaatgcacatatagagttaacacatttagtgaacacttgtttagtgtcactcagtttgctaggtgctgatatgtacgtatatctcaatgtgtctgtagacttagatacatcctcttgaagcacatccatttctttagcgtctctcagtaagttacagtacttgtttgacttaggtttaagaggcccagctacctatctctgaccttttcaaataggctcatttgggagattcttttgccaggagagattcaactttccaatctaagtattccagagcattgcccaggcagagttggtttgatgtggccagatgttttgagttatttcccttaagtgtttcactggggagagaacagggagtgctcctccagcttcccaaagaaatatgtttttgtaagtggtaggaacatgtgcacacaatagaacatgaaataagttttttaacttgtaaaacatgtcaagatttttccaccaagctagaaaataaaaaacttagttctaccacatccaattaacttacacacccccttccctgtctcaacacctgctttgaccctgcttttctattattacatcagtcagcatcttgtggtccctaacatgaggatgtggctggctcgtgggaaacagcaaaacactaagcctgacctctcccaaattgggaagaccagaggagaaagtgcaaaactgtccccatttggaatgcccattccttctagaaaccagttggacagtgctcctctgcccttcataaacagactactgttgggtccctgattccaggctggcctgtgaaggattgccccaggtgtcccctttcacggttgtcacatttacagtgacttctgttgaacacccctcttagggatgtttcttttgctcttatttcctgcatctttccttaagggaagccccatcctctcccaggaccaggagtttatgaccaggcgagcacaaatggctaaaagccaagctgtcctagaacttcagtgggagagctgtctggttcatattctacccaggaatggtacttttcagtgcagccaggagggctcttgggatttcctttccaaagcacaaaaatactgggacccaagaagaacagctagaggacaactctgttggcacagagacggggacagcccagtctgctgacctcacagggtcagctgggcccccctggtgcttcaccacctgcatcctcttgctcagaatgcctttgcagttgagttttctgggtttctatgattgaccttgaggtttactccttgctcttacaacatttctaaggatttttaaaagtttacttcttgtcttgttcttctaaagctttctccaggacagatattttccctgtcttaaccactggtccagtcatcccagtgggcttctctttgtctctcccagattagacctttgggtgagattggcatcacaacatctaatctgagtctgtcttttgtccttcattctgtatggcagtctccctttgttataaaagctttctaaagcatactaaagaagccttcccagagccccgtcttgcttctcttccaggtgctctatcccctcgagaccctctggtgccaggcttgcttcacggccatcttgtgttgtcactgcagagtttggaggccagttttccacagcctaaacagggaggagctgcagaatggggctctggtctctgggcattcatttccctcatagaggctgagaataaaacaaggacttattcacacatgttctagaaccccagaatggcccaagttacctgagaccagggtttctcaaccttgacaccattgacattttggactgggtaattctttgttctgcagagctgtcctttgcactgtaggagatttactaatatccctggcctctacccagtagtaccactagcacctattccccacccagcgtgtctccagatattgtcaaatatcccatcgggtgcaaaatgatccctggtcaagatctgttgcccaagatgttacaggtcacaatgaccacatttgaaattgttttccctttcattttaccctgtgaaagcatctctcctagagccttgcaagaggcaggtgacattgtgtccatatttcttcctgtttcagaacttctgtttcacaacaatttctctctcgctacaagtattctttcactcagcactggggaagttgggaacagctggtcaccatcatccctttaatcaactcacacctgtttaaagagtgtttctgatttgaccttcatcccttagtttactggcgttaaaaaaagtctcagcaattttcattatttctcgtgggtctcattatcaaacctttacttatttcggcatatttcctctgggcttcttctagtttctgccttacaagcaatgctgttctgtaaatttattgaaacctctggaacatttcacctttagagatggaggatggaaggattggtaccagaagagggctaagatacgttttctgtcttgagctgaaagcacagtctactctccttcgttttgtcgatgagaaagttgaggccagaggggaggtgacatgtttagagtcacccagctggttagtgacagaaaaagcgtgagagttgtctaggattcctgccactttggtccctggcctctcctgggggaggctgctgttcttaggtgctctaagcttaatccctcagaatgtgtggacaggtcagcttagaagagatggggagattcaggatccccctgtgccagagcacagcctcaccggatgctgcttcccacactgaagtgtcctgtccgaccattgctatctgaggcatccacaagcaggtaggaaagctggcgagccattttacttcctgaggacaattccccagccacaggctctgagtcaaatttctatttggtaagcatcctagcagcaaagtcctgcactcagaccagccaaaaaacagcccccattccaagtacttggtgtcaaaagtccccgaacgacttttaaacccaagtcttcttaaggtttcagtactgtggtggctttagcagttgtttttgtgcaactataaattatttaaatcatctgagatgacagtcaattttacaaaccaggtacatattaatttgtataattttgtatatgctctggtacactacctgaactaacgaagggtagaactaattctgtttgtcagtgttcacacctgtaacattaggaggatatgtctgcattgcttatttctttatgttggtgtttctgtggcaaagccctgcacatggcatttctgaaaagccttaaatctttaagatgttgcatgtagggtatgcagtgcaaaaggctgcctcagaactgtgagcccttttgtaagctggaagcatttctcttactactgttacttttgtaggaagttttcaattcagagctgccaaagtgttcccgtaagcagtgccttagtaataccttagtcatgccgccagccttttcttacaccaattcctaatgttcatttacgaattggcccaatattggaaacaaaacaagcaaaaattgtcttcatttttgttttgtaagcccattttttctccagttctataggaaactgactgcttggtgtaaaatccgaaactggacacaagtcagttctttcaccacactcaaatgtatataccaaaacaaaaggttgcaacttcatagtttactatgaaaagcaaattgtactttttaatgttgccttttaaattcatgaccaaatacttagctatttgtgaatcttctgcactctagcatgaaagtgcctttggtttgagattccagcttagaaaagtgctgccataataacgataatttgtagagagaccaaaaatattttgagatcaccgtaatgcctttggtttaccgggatgagtaaccaaccacaggcctctgttcacaagagcacgacgtggtccccgcctgctgctagtctgtctgccactgggggcctcccaacatccatagcacacttcagcggaaggaccccagaaactgttgtgtttgtgtgtgctgatgacctagtgtgtcatttcacctcgtcacccagccctgcgtccggatgaggggacttctgcacaaatgacagaatctcggctggtggacagatactacagctttctcctcctccttgtgttcgtgttcagtctctgtggagactttcttttccattcaaatgacagtgcgcacttatctggtttacacaatgataccattttgaaagttggaagcctcaaactgagacgacagtgcagaacaaaacaaaagtgagttagggtcgttaaaattgaagtgttcttcttagggcaaacatgttgactccgagtattgtgtatgaatgtgctacgagaaacttccaaagagcaccattcacaatttggcattttcaaagaatgttccagccctcaaaggggcaactctttaaagtccttgttggcttttatccaaaccttgtagaaattgggaaagctgatagaggtaaggaagacgagtgaaaaggacaagaaggccaaacaccagccaaaaagaaactaggaaaaaaagattttctttgctaatatagatgtaaaaataacatcagacatctttgaaaattagcctctaaactcttaatacatacgttctgtgtgtctctacctggcgtctttaagaatatcctctctgggctctgaaattttaggagtgattcttatccactccaagttgtaagtatttgtagaaatttgtgcaaacaaacaaaaactatcaaatgaaaagaaaatgtactcaacctaacttatagttagcagctggaattctcaactcttccctgccagcactataccacagtgtggaagaaattagtcaaatgcttgttttcctgcttctcttttcaactgttactgtgctttgtttgaaagtagttttctctctcaaagccgttgcttatatcgttaagaatgaaggtttgtgtttaaaatttattgcattgcaaagggtagtttcactgaagtcatgcaccattaaataagatgaaatatttgtatttattgtcctacttcctaagccgtaacttcttttcctctgtgaatttgcattgagtcactcatgctacactacatcgctttagtatttgagatggcatttatgtttcctctcgtttatcatgaaatggggtcagattccatcagattccacctctgtcaggtggactcttgtctgccttccatgatgagattttttttctccttcccctttctttaagagaggctgacagatctaggtgtcaatcaattggaaaccagtctctgattttttttcattagttattttctatcattagtttcactgtgtaaattagatatcaactgcacttctttaaaaaaaaatacatctccctattacctccttgaaagatttacttctgtaggcctttttcaataggctcatgactgcagacaaggaaaaaaaaagtaaaaacaaaaacagtatgtgcctgaaaatgac

SEQ ID NO: 189904 - DNA, 477 bp, Homo sapiens
  Payload ID: 17499
  Gene Symbol: TEAD1
  Gene Name: TEA domain family member 1 (SV40 transcriptional enhancer factor)
  ENST ID: ENST00000527376
  CDS Start-End: 1-477
gtgacgcccccccacccctccacctttgcccggagcgcgggcagcagcccagcgcgccagccggccccggggcaggagcggtgctaggcaggggtggggtggccgggcccagggaccgggagccggggagggagccgggcaccgagcagagggcgggggaagcggcgccgaagtttgcctcggactcgccgggcgctgcggtggctccctgggccgaggtttattttcttgaaaaggctccaggcttcggcttggaaaatcccaccgccaaaattgagcccagcagctggagcggcagtgagagccctgccgaaaacatggaaaggatgagtgactctgcagataagccaattgacaatgatgcagaaggggtctggagccccgacatcgagcaaagctttcaggaggccctggctatctatccaccatgtgggaggaggaaaatcatcttatcagacgaaggcaaaatgtatggta

SEQ ID NO: 189905 - DNA, 2544 bp, Homo sapiens
  Payload ID: 17499
  Gene Symbol: TEAD1
  Gene Name: TEA domain family member 1 (SV40 transcriptional enhancer factor)
  ENST ID: ENST00000527636
  CDS Start-End: 452-1732
ggccgcgtccaggcacaggccatgcagtgacgcccccccacccctccacctttgcccggagcgcgggcagcagcccagcgcgccagccggccccggggcaggagcggtgctaggcaggggtggggtggccgggcccagggaccgggagccggggagggagccgggcaccgagcagagggcgggggaagcggcgccgaagtttgcctcggactcgccgggcgctgcggtggctccctgggccgaggactgttgctgccgctgccgccgccgcttcattgcacattcaagtggaaaattttcaggagtcagcagaaacattgtgtccaaaaaagactgagtcgcagttaccaccaaacccaggaggagactctccctggaaaacttcccttccctttcggtttattttcttgaaaaggctccaggcttcggcttggaaaatcccaccgccaaaattgagcccagcagctggagcggcagtgagagccctgccgaaaacatggaaaggatgagtgactctgcagataagccaattgacaatgatgcagaaggggtctggagccccgacatcgagcaaagctttcaggaggccctggctatctatccaccatgtgggaggaggaaaatcatcttatcagacgaaggcaaaatgtatggtaggaatgaattgatagccagatacatcaaactcaggacaggcaagacgaggaccagaaaacaggtgtctagtcacattcaggttcttgccagaaggaaatctcgtgattttcattccaagctaaaggatcagactgcaaaggataaggccctgcagcacatggcggccatgtcctcagcccagatcgtctcggccactgccattcataacaagctggggctgcctgggattccacgcccgaccttcccaggggcgccggggttctggccgggaatgattcaaacagggcagccaggatcctcacaagacgtcaagccttttgtgcagcaggcctaccccatccagccagcggtcacagcccccattccagggtttgagcctgcatcggccccagctccctcagtccctgcctggcaaggtcgctccattggcacaaccaagcttcgcctggtggaattttcagcttttctcgagcagcagcgagacccagactcgtacaacaaacacctcttcgtgcacattgggcatgccaaccattcttacagtgacccattgcttgaatcagtggacattcgtcagatttatgacaaatttcctgaaaagaaaggtggcttaaaggaactgtttggaaagggccctcaaaatgccttcttcctcgtaaaattctgggctgatttaaactgcaatattcaagatgatgctggggctttttatggtgtaaccagtcagtacgagagttctgaaaatatgacagtcacctgttccaccaaagtttgctcctttgggaagcaagtagtagaaaaagtagagacggagtatgcaaggtttgagaatggccgatttgtataccgaataaaccgctccccaatgtgtgaatatatgatcaacttcatccacaagctcaaacacttaccagagaaatatatgatgaacagtgttttggaaaacttcacaattttattggtggtaacaaacagggatacacaagaaactctactctgcatggcctgtgtgtttgaagtttcaaatagtgaacacggagcacaacatcatatttacaggcttgtaaaggactgaacatggttatttatatatatagatatctgtatatacacacacacatatgtgcacacacacactctctctccattatcgaacgactgactgtaaacctcaccacacagggtggtgccctggccccgaggtcaccccgacttttctaaatcttgtttgagtgaagtcattttttcatgtgttcatactatcattgtagctgtgaagttctggtacagttgtaaaaagagaaattgagttgtttctctatgttcttcagatgtgcagcccacaattcctcgggaaaggtgaacctgaacaacccaagtctctctctgcagagccctgtttctaattgtggtagaaaatattgagacagagcatttgccatgggacatttacagcctttatacaaatgtatttagttctcttttttccaacataaaattcttgttttaagatacaagtaaaattaatctttaaatataaatgtaaattagtacacaaaactaagaatctttagacttatctttgtaactaattagggtggaagttatgaaagaatgtaattcactaaattattttttaaatgaaacctttttttttctttttgaaaccaaatgttaaactatagccttaagaaatgcttggtagaagtgtcctaatgagacaaatttgtacttttatcctcaaggttaacactaatctcctaatccattaaactcttgaacaggtattacaaaggaagaaaacttcaccccttatccttaacatatatagtatatttaaaaaatataaaattgtattgtactaatgtgatgatggattatttaatg

SEQ ID NO: 189906 - DNA, 8477 bp, Homo sapiens
  Payload ID: 17499
  Gene Symbol: TEAD1
  Gene Name: TEA domain family member 1 (SV40 transcriptional enhancer factor)
  ENST ID: ENST00000526600
  CDS Start-End: 224-1216
tgagaggcttcacattctgttggaaaatggatttaatccctaaaaaaagccttgccccattgggtcttcccagtaaatgttgagaggtacggtaggttgagtgtggtttagccttctggctgtgttatttatccatgcatgtttgctttttttggcctattttgtggctctgtattttagtccatgtgctcgtggctgtgcctgtgtaacctgcctggtagccatgcgttatgtattaagttggtgtgtcactgtcaccttcaaggatcagactgcaaaggataaggccctgcagcacatggcggccatgtcctcagcccagatcgtctcggccactgccattcataacaagctggggctgcctgggattccacgcccgaccttcccaggggcgccggggttctggccgggaatgattcaaacagggcagccaggatcctcacaagacgtcaagccttttgtgcagcaggcctaccccatccagccagcggtcacagcccccattccagggtttgagcctgcatcggccccagctccctcagtccctgcctggcaaggtcgctccattggcacaaccaagcttcgcctggtggaattttcagcttttctcgagcagcagcgagacccagactcgtacaacaaacacctcttcgtgcacattgggcatgccaaccattcttacagtgacccattgcttgaatcagtggacattcgtcagatttatgacaaatttcctgaaaagaaaggtggcttaaaggaactgtttggaaagggccctcaaaatgccttcttcctcgtaaaattctgggctgatttaaactgcaatattcaagatgatgctggggctttttatggtgtaaccagtcagtacgagagttctgaaaatatgacagtcacctgttccaccaaagtttgctcctttgggaagcaagtagtagaaaaagtagagacggagtatgcaaggtttgagaatggccgatttgtataccgaataaaccgctccccaatgtgtgaatatatgatcaacttcatccacaagctcaaacacttaccagagaaatatatgatgaacagtgttttggaaaacttcacaattttattggtggtaacaaacagggatacacaagaaactctactctgcatggcctgtgtgtttgaagtttcaaatagtgaacacggagcacaacatcatatttacaggcttgtaaaggactgaacatggttatttatatatatagatatctgtatatacacacacacatatgtgcacacacacactctctctccattatcgaacgactgactgtaaacctcaccacacagggtggtgccctggccccgaggtcaccccgacttttctaaatcttgtttgagtgaagtcattttttcatgtgttcatactatcattgtagctgtgaagttctggtacagttgtaaaaagagaaattgagttgtttctctatgttcttcagatgtgcagcccacaattcctcgggaaaggtgaacctgaacaacccaagtctctctctgcagagccctgtttctaattgtggtagaaaatattgagacagagcatttgccatgggacatttacagcctttatacaaatgtatttagttctcttttttccaacataaaattcttgttttaagatacaagtaaaattaatctttaaatataaatgtaaattagtacacaaaactaagaatctttagacttatctttgtaactaattagggtggaagttatgaaagaatgtaattcactaaattattttttaaatgaaacctttttttttctttttgaaaccaaatgttaaactatagccttaagaaatgcttggtagaagtgtcctaatgagacaaatttgtacttttatcctcaaggttaacactaatctcctaatccattaaactcttgaacaggtattacaaaggaagaaaacttcaccccttatccttaacatatatagtatatttaaaaaatataaaattgtattgtactaatgtgatgatggattatttaatgaaaaagaaaaaatggctctttttgcaataagtagatacatactgaaaaaatctaaacttacaatgtttatagtcttgtgtgtgcagttatattttatatggacgaccaaattttttattaagatgagtaaatatttgaaccactgaattttaataacaaaattttaaaattggcatgaatacggaatactgcactgtgagatgcaaagtatacagaatctgtggctgggagaaaatttcatcaaatagacaagtaaaaggctcatcagttttagcatctctgctccccagaaaattgtaagcatcctcaccagcctgtggatacattctttatttctagtgacccaatatgcatattaacctgctataactagggctatatgtgtaggtatgtgtatacatatacacaaatgcacatatagagttaacacatttagtgaacacttgtttagtgtcactcagtttgctaggtgctgatatgtacgtatatctcaatgtgtctgtagacttagatacatcctcttgaagcacatccatttctttagcgtctctcagtaagttacagtacttgtttgacttaggtttaagaggcccagctacctatctctgaccttttcaaataggctcatttgggagattcttttgccaggagagattcaactttccaatctaagtattccagagcattgcccaggcagagttggtttgatgtggccagatgttttgagttatttcccttaagtgtttcactggggagagaacagggagtgctcctccagcttcccaaagaaatatgtttttgtaagtggtaggaacatgtgcacacaatagaacatgaaataagttttttaacttgtaaaacatgtcaagatttttccaccaagctagaaaataaaaaacttagttctaccacatccaattaacttacacacccccttccctgtctcaacacctgctttgaccctgcttttctattattacatcagtcagcatcttgtggtccctaacatgaggatgtggctggctcgtgggaaacagcaaaacactaagcctgacctctcccaaattgggaagaccagaggagaaagtgcaaaactgtccccatttggaatgcccattccttctagaaaccagttggacagtgctcctctgcccttcataaacagactactgttgggtccctgattccaggctggcctgtgaaggattgccccaggtgtcccctttcacggttgtcacatttacagtgacttctgttgaacacccctcttagggatgtttcttttgctcttatttcctgcatctttccttaagggaagccccatcctctcccaggaccaggagtttatgaccaggcgagcacaaatggctaaaagccaagctgtcctagaacttcagtgggagagctgtctggttcatattctacccaggaatggtacttttcagtgcagccaggagggctcttgggatttcctttccaaagcacaaaaatactgggacccaagaagaacagctagaggacaactctgttggcacagagacggggacagcccagtctgctgacctcacagggtcagctgggcccccctggtgcttcaccacctgcatcctcttgctcagaatgcctttgcagttgagttttctgggtttctatgattgaccttgaggtttactccttgctcttacaacatttctaaggatttttaaaagtttacttcttgtcttgttcttctaaagctttctccaggacagatattttccctgtcttaaccactggtccagtcatcccagtgggcttctctttgtctctcccagattagacctttgggtgagattggcatcacaacatctaatctgagtctgtcttttgtccttcattctgtatggcagtctccctttgttataaaagctttctaaagcatactaaagaagccttcccagagccccgtcttgcttctcttccaggtgctctatcccctcgagaccctctggtgccaggcttgcttcacggccatcttgtgttgtcactgcagagtttggaggccagttttccacagcctaaacagggaggagctgcagaatggggctctggtctctgggcattcatttccctcatagaggctgagaataaaacaaggacttattcacacatgttctagaaccccagaatggcccaagttacctgagaccagggtttctcaaccttgacaccattgacattttggactgggtaattctttgttctgcagagctgtcctttgcactgtaggagatttactaatatccctggcctctacccagtagtaccactagcacctattccccacccagcgtgtctccagatattgtcaaatatcccatcgggtgcaaaatgatccctggtcaagatctgttgcccaagatgttacaggtcacaatgaccacatttgaaattgttttccctttcattttaccctgtgaaagcatctctcctagagccttgcaagaggcaggtgacattgtgtccatatttcttcctgtttcagaacttctgtttcacaacaatttctctctcgctacaagtattctttcactcagcactggggaagttgggaacagctggtcaccatcatccctttaatcaactcacacctgtttaaagagtgtttctgatttgaccttcatcccttagtttactggcgttaaaaaaagtctcagcaattttcattatttctcgtgggtctcattatcaaacctttacttatttcggcatatttcctctgggcttcttctagtttctgccttacaagcaatgctgttctgtaaatttattgaaacctctggaacatttcacctttagagatggaggatggaaggattggtaccagaagagggctaagatacgttttctgtcttgagctgaaagcacagtctactctccttcgttttgtcgatgagaaagttgaggccagaggggaggtgacatgtttagagtcacccagctggttagtgacagaaaaagcgtgagagttgtctaggattcctgccactttggtccctggcctctcctgggggaggctgctgttcttaggtgctctaagcttaatccctcagaatgtgtggacaggtcagcttagaagagatggggagattcaggatccccctgtgccagagcacagcctcaccggatgctgcttcccacactgaagtgtcctgtccgaccattgctatctgaggcatccacaagcaggtaggaaagctggcgagccattttacttcctgaggacaattccccagccacaggctctgagtcaaatttctatttggtaagcatcctagcagcaaagtcctgcactcagaccagccaaaaaacagcccccattccaagtacttggtgtcaaaagtccccgaacgacttttaaacccaagtcttcttaaggtttcagtactgtggtggctttagcagttgtttttgtgcaactataaattatttaaatcatctgagatgacagtcaattttacaaaccaggtacatattaatttgtataattttgtatatgctctggtacactacctgaactaacgaagggtagaactaattctgtttgtcagtgttcacacctgtaacattaggaggatatgtctgcattgcttatttctttatgttggtgtttctgtggcaaagccctgcacatggcatttctgaaaagccttaaatctttaagatgttgcatgtagggtatgcagtgcaaaaggctgcctcagaactgtgagcccttttgtaagctggaagcatttctcttactactgttacttttgtaggaagttttcaattcagagctgccaaagtgttcccgtaagcagtgccttagtaataccttagtcatgccgccagccttttcttacaccaattcctaatgttcatttacgaattggcccaatattggaaacaaaacaagcaaaaattgtcttcatttttgttttgtaagcccattttttctccagttctataggaaactgactgcttggtgtaaaatccgaaactggacacaagtcagttctttcaccacactcaaatgtatataccaaaacaaaaggttgcaacttcatagtttactatgaaaagcaaattgtactttttaatgttgccttttaaattcatgaccaaatacttagctatttgtgaatcttctgcactctagcatgaaagtgcctttggtttgagattccagcttagaaaagtgctgccataataacgataatttgtagagagaccaaaaatattttgagatcaccgtaatgcctttggtttaccgggatgagtaaccaaccacaggcctctgttcacaagagcacgacgtggtccccgcctgctgctagtctgtctgccactgggggcctcccaacatccatagcacacttcagcggaaggaccccagaaactgttgtgtttgtgtgtgctgatgacctagtgtgtcatttcacctcgtcacccagccctgcgtccggatgaggggacttctgcacaaatgacagaatctcggctggtggacagatactacagctttctcctcctccttgtgttcgtgttcagtctctgtggagactttcttttccattcaaatgacagtgcgcacttatctggtttacacaatgataccattttgaaagttggaagcctcaaactgagacgacagtgcagaacaaaacaaaagtgagttagggtcgttaaaattgaagtgttcttcttagggcaaacatgttgactccgagtattgtgtatgaatgtgctacgagaaacttccaaagagcaccattcacaatttggcattttcaaagaatgttccagccctcaaaggggcaactctttaaagtccttgttggcttttatccaaaccttgtagaaattgggaaagctgatagaggtaaggaagacgagtgaaaaggacaagaaggccaaacaccagccaaaaagaaactaggaaaaaaagattttctttgctaatatagatgtaaaaataacatcagacatctttgaaaattagcctctaaactcttaatacatacgttctgtgtgtctctacctggcgtctttaagaatatcctctctgggctctgaaattttaggagtgattcttatccactccaagttgtaagtatttgtagaaatttgtgcaaacaaacaaaaactatcaaatgaaaagaaaatgtactcaacctaacttatagttagcagctggaattctcaactcttccctgccagcactataccacagtgtggaagaaattagtcaaatgcttgttttcctgcttctcttttcaactgttactgtgctttgtttgaaagtagttttctctctcaaagccgttgcttatatcgttaagaatgaaggtttgtgtttaaaatttattgcattgcaaagggtagtttcactgaagtcatgcaccattaaataagatgaaatatttgtatttattgtcctacttcctaagccgtaacttcttttcctctgtgaatttgcattgagtcactcatgctacactacatcgctttagtatttgagatggcatttatgtttcctctcgtttatcatgaaatggggtcagattccatcagattccacctctgtcaggtggactcttgtctgccttccatgatgagattttttttctccttcccctttctttaagagaggctgacagatctaggtgtcaatcaattggaaaccagtctctgattttttttcattagttattttctatcattagtttcactgtgtaaattagatatcaactgcacttctttaaaaaaaaatacatctccctattacctccttgaaagatttacttctgtaggcctttttcaataggctcatgactgcagacaaggaaaaaaaaagtaaaaacaaaaacagtatgtgcctgaaaatgacaaaaaaaaaatttgtaacatttaaaaaagaaacctgaatagcctttaattctttaataatacacttaaattttatgtaaatcggttttcgccacgtgtgtttgttcacattctaaatgacttaatgggattctcacggtctgtgtctttgtgtcacgtgtataaaatgggcttgtgatgtaagcgtttcatctggtcagtggttcctttgatattgtactgctgctgggagtgggctgtggaacctgccttcgggtaactgggttcctcttgggtagattggagagatgggggtgggcgtgggcaaattctcacacatgttttcttaacctatttgcagaaactttcaaaaggcatttgattaaacctcttggcagtacagtattcttgtatttgttaacgtctgtgtttaggtactggtacctttttgttttaaaatgttctaagtgttggctttaaagtgaatttatctttagtatgatagttatatgaaaattataggatttgtgtgcagagaatttttttataaagtgctttgt

SEQ ID NO: 189907 - DNA, 3063 bp, Homo sapiens
  Payload ID: 17499
  Gene Symbol: TEAD1
  Gene Name: TEA domain family member 1 (SV40 transcriptional enhancer factor)
  ENST ID: ENST00000527575
  CDS Start-End: 114-1220
tcgcagttaccaccaaacccaggaggagactctccctggaaaacttcccttccctttcggtttattttcttgaaaaggctccaggcttcggcttggaaaatcccaccgccaaaattgagcccagcagctggagcggcagtgagagccctgccgaaaacatggaaaggatgagtgactctgcagataagccaattgacaatgatgcagaaggggtctggagccccgacatcgagcaaagctttcaggaggccctggctatctatccaccatgtgggaggaggaaaatcatcttatcagacgaaggcaaaatgtatggtaggaatgaattgatagccagatacatcaaactcaggacaggcaagacgaggaccagaaaacaggtgtctagtcacattcaggttcttgccagaaggaaatctcgtgattttcattccaagctaaaggatcagactgcaaaggataaggccctgcagcacatggcggccatgtcctcagcccagatcgtctcggccactgccattcataacaagctggggctgcctgggattccacgcccgaccttcccaggggcgccggggttctggccgggaatgattcaaacagggcagccaggatcctcacaagacgtcaagccttttgtgcagcaggcctaccccatccagccagcggtcacagcccccattccagggtttgagcctgcatcggccccagctccctcagtccctgcctggcaaggtcgctccattggcacaaccaagcttcgcctggtggaattttcagcttttctcgagcagcagcgagacccagactcggctgatttaaactgcaatattcaagatgatgctggggctttttatggtgtaaccagtcagtacgagagttctgaaaatatgacagtcacctgttccaccaaagtttgctcctttgggaagcaagtagtagaaaaagtagagacggagtatgcaaggtttgagaatggccgatttgtataccgaataaaccgctccccaatgtgtgaatatatgatcaacttcatccacaagctcaaacacttaccagagaaatatatgatgaacagtgttttggaaaacttcacaattttattggtggtaacaaacagggatacacaagaaactctactctgcatggcctgtgtgtttgaagtttcaaatagtgaacacggagcacaacatcatatttacaggcttgtaaaggactgaacatggttatttatatatatagatatctgtatatacacacacacatatgtgcacacacacactctctctccattatcgaacgactgactgtaaacctcaccacacagggtggtgccctggccccgaggtcaccccgacttttctaaatcttgtttgagtgaagtcattttttcatgtgttcatactatcattgtagctgtgaagttctggtacagttgtaaaaagagaaattgagttgtttctctatgttcttcagatgtgcagcccacaattcctcgggaaaggtgaacctgaacaacccaagtctctctctgcagagccctgtttctaattgtggtagaaaatattgagacagagcatttgccatgggacatttacagcctttatacaaatgtatttagttctcttttttccaacataaaattcttgttttaagatacaagtaaaattaatctttaaatataaatgtaaattagtacacaaaactaagaatctttagacttatctttgtaactaattagggtggaagttatgaaagaatgtaattcactaaattattttttaaatgaaacctttttttttctttttgaaaccaaatgttaaactatagccttaagaaatgcttggtagaagtgtcctaatgagacaaatttgtacttttatcctcaaggttaacactaatctcctaatccattaaactcttgaacaggtattacaaaggaagaaaacttcaccccttatccttaacatatatagtatatttaaaaaatataaaattgtattgtactaatgtgatgatggattatttaatgaaaaagaaaaaatggctctttttgcaataagtagatacatactgaaaaaatctaaacttacaatgtttatagtcttgtgtgtgcagttatattttatatggacgaccaaattttttattaagatgagtaaatatttgaaccactgaattttaataacaaaattttaaaattggcatgaatacggaatactgcactgtgagatgcaaagtatacagaatctgtggctgggagaaaatttcatcaaatagacaagtaaaaggctcatcagttttagcatctctgctccccagaaaattgtaagcatcctcaccagcctgtggatacattctttatttctagtgacccaatatgcatattaacctgctataactagggctatatgtgtaggtatgtgtatacatatacacaaatgcacatatagagttaacacatttagtgaacacttgtttagtgtcactcagtttgctaggtgctgatatgtacgtatatctcaatgtgtctgtagacttagatacatcctcttgaagcacatccatttctttagcgtctctcagtaagttacagtacttgtttgacttaggtttaagaggcccagctacctatctctgaccttttcaaataggctcatttgggagattcttttgccaggagagattcaactttccaatctaagtattccagagcattgcccaggcagagttggtttgatgtggccagatgttttgagttatttcccttaagtgtttcactggggagagaacagggagtgctcctccagcttcccaaagaaatatgtttttgtaagtggtaggaacatgtgcacacaatagaacatgaaataagttttttaacttgtaaaacatgtcaagatttttccaccaagctagaaaataaaaaacttagttctaccacatccaattaacttacacacccccttccctgtctcaacacctgctttgaccctgcttttctattattacatcagtcagcatcttgtggtccctaacatgaggatgtggctggctcgtggg

SEQ ID NO: 189908 - DNA, 2164 bp, Homo sapiens
  Payload ID: 17500
  Gene Symbol: TEAD2
  Gene Name: TEA domain family member 2
  Uniprot ID: Q15562
  ENST ID: ENST00000311227
  CDS Start-End: 92-1435
cccacttttcccaaacaaagctcccggcaactttctccctcgcagcgccccgcccgcccgcggctccccagccccaggccgggaggcccagatgggggaaccccgggctggggccgccctggacgatggcagcggctggacgggcagtgaggaaggcagtgaggagggtaccggcggcagtgagggggctgggggtgacgggggcccggatgcagagggggtgtggagcccagacattgagcagagcttccaggaggccctggccatctatccaccctgcggccgccggaaaataattttgtctgatgaaggcaagatgtatggtcggaatgaactgatcgcccgctacatcaagctgagaacggggaagacccgaactcgaaaacaggtttctagtcacatccaggttttggcccgaaggaaatcaagggaaatccagtccaagttgaaggaccaggtttccaaggacaaggctttccagacaatggcaaccatgtcctctgcccagctcatctccgcgccttctctgcaggccaaactgggtcccactggtcctcaggcctctgagcttttccagttttggtctggaggatctgggcccccctggaatgttccagatgtgaagccattctcacagacaccgttcaccttgtcactgactcccccatctactgacctcccagggtacgagcccccccaagccctctcacccctgcccccacctaccccatcgcccccagcctggcaggctcggggcctgggcaccgcccggttgcagctggtagagttctcagccttcgtggaaccgccagatgcagttgattcttaccagaggcacctgttcgtgcacatcagccagcactgccccagccccggagcgccgccgctcgagagtgtggacgtccggcagatctacgacaaattccctgagaaaaagggtggcctccgagagctatatgatcgtggccccccccatgccttcttcctggtcaagttctgggcggacctgaactggggcccaagtggtgaggaggcaggggccggtggcagcatcagcagtggtggcttctacggagtgagcagccagtatgagagcctggaacacatgaccctcacctgttcctccaaggtctgctcttttggcaagcaggtggtggagaaggtggagacggaacgggcccagctggaggacggcagatttgtgtaccgcctgctgcgctcgcccatgtgcgagtacctggtgaatttcttgcacaagttgcggcagctgcctgagcgatacatgatgaacagcgtcctggaaaacttcaccatcctccaggtggtgacaaacagagacacccaggaactgctgctctgcaccgcctatgtcttcgaggtctccaccagcgagcgtggggcccagcatcacatttaccgcctggtcagggactgaagggggaccccaaaactggctcaccccccagaacaccctcctcccagggagggtcctccagctcacctcatgcttcttatttggggagagggctgtgatgtaaaggggttgacctcagaggcctaagcaactggggccatcccccccattagaggggcccccaaaacttggttggagagctgaacaggctgggactgaggaaaggataaaccccgatattgggacctcacagtgggtgtctgaaaggacagatcactccggagtatcagggattgtggggacaggagtgagacaaccccccaggtacagcactggcttttcttttcagcccctgacaggccacccccactcctctgcatgtcttggagagcgctagttacacattggcttgtcccctttactttttcccagccacccctccccctgaaatttctgcccctctctaccaccctcactccatgacctgtgagatcacaaagtgaagatgaaccctttctgtgcaggagcagagccaggtgggccctggacattttttttttttttaatataacgagatatttataagtgggtgctagggtcttgactttatctccgctgcacaagcagtgtgttgaactttctaatctcatccctctcctaagtgagccctgagctagacggtttccttcctcccctctcaaagtttgtttgtttgtgttctgacagaggataaagctattttaccaaaaa

SEQ ID NO: 189909 - DNA, 2440 bp, Homo sapiens
  Payload ID: 17500
  Gene Symbol: TEAD2
  Gene Name: TEA domain family member 2
  Uniprot ID: Q15562
  ENST ID: ENST00000377214
  CDS Start-End: 364-1716
cttctcctccctcagactcaggagtccagaccccagccccttctccctcacacccaggagtccaggcctccagcccccgctccctcagacccaggagtccaggccccagatcctcctccctcagtcctaggagtccgggccccagcccctcctccctcagactcaggagttcaggccccagatcctcctccctcagacccaggaataccccccagctcctcttccctcagacccaggagtccaggtccccagcccctcctccctcagacccagtggtccagagtcccagccctctcagcttcaagtcccttgagggtggggtttgggggaagcttgctgagttctgtgttcctccaggcccagatgggggaaccccgggctggggccgccctggacgatggcagcggctggacgggcagtgaggaaggcagtgaggagggtaccggcggcagtgagggggctgggggtgacgggggcccggatgcagagggggtgtggagcccagacattgagcagagcttccaggaggccctggccatctatccaccctgcggccgccggaaaataattttgtctgatgaaggcaagatgtatggtcggaatgaactgatcgcccgctacatcaagctgagaacggggaagacccgaactcgaaaacaggtttctagtcacatccaggttttggcccgaaggaaatcaagggaaatccagtccaagttgaaggaccaggtttccaaggacaaggctttccagacaatggcaaccatgtcctctgcccagctcatctccgcgccttctctgcaggccaaactgggtcccactggtcctcaggtggtccaggcctctgagcttttccagttttggtctggaggatctgggcccccctggaatgttccagatgtgaagccattctcacagacaccgttcaccttgtcactgactcccccatctactgacctcccagggtacgagcccccccaagccctctcacccctgcccccacctaccccatcgcccccagcctggcaggctcggggcctgggcaccgcccggttgcagctggtagagttctcagccttcgtggaaccgccagatgcagttgattcttaccagaggcacctgttcgtgcacatcagccagcactgccccagccccggagcgccgccgctcgagagtgtggacgtccggcagatctacgacaaattccctgagaaaaagggtggcctccgagagctatatgatcgtggccccccccatgccttcttcctggtcaagttctgggcggacctgaactggggcccaagtggtgaggaggcaggggccggtggcagcatcagcagtggtggcttctacggagtgagcagccagtatgagagcctggaacacatgaccctcacctgttcctccaaggtctgctcttttggcaagcaggtggtggagaaggtggagacggaacgggcccagctggaggacggcagatttgtgtaccgcctgctgcgctcgcccatgtgcgagtacctggtgaatttcttgcacaagttgcggcagctgcctgagcgatacatgatgaacagcgtcctggaaaacttcaccatcctccaggtggtgacaaacagagacacccaggaactgctgctctgcaccgcctatgtcttcgaggtctccaccagcgagcgtggggcccagcatcacatttaccgcctggtcagggactgaagggggaccccaaaactggctcaccccccagaacaccctcctcccagggagggtcctccagctcacctcatgcttcttatttggggagagggctgtgatgtaaaggggttgacctcagaggcctaagcaactggggccatcccccccattagaggggcccccaaaacttggttggagagctgaacaggctgggactgaggaaaggataaaccccgatattgggacctcacagtgggtgtctgaaaggacagatcactccggagtatcagggattgtggggacaggagtgagacaaccccccaggtacagcactggcttttcttttcagcccctgacaggccacccccactcctctgcatgtcttggagagcgctagttacacattggcttgtcccctttactttttcccagccacccctccccctgaaatttctgcccctctctaccaccctcactccatgacctgtgagatcacaaagtgaagatgaaccctttctgtgcaggagcagagccaggtgggccctggacattttttttttttttaatataacgagatatttataagtgggtgctagggtcttgactttatctccgctgcacaagcagtgtgttgaactttctaatctcatccctctcctaagtgagccctgagctagacggtttccttcctcccctctcaaagtttgtttgtttgtgttctgacagaggataaagctattttacc

SEQ ID NO: 189910 - DNA, 1444 bp, Homo sapiens
  Payload ID: 17500
  Gene Symbol: TEAD2
  Gene Name: TEA domain family member 2
  Uniprot ID: Q15562
  ENST ID: ENST00000539846
  CDS Start-End: 243-1202
aaagctcccggcaactttctccctcgcagcgccccgcccgcccgcggctccccagccccaggccgggaggtcggaatgaactgatcgcccgctacatcaagctgagaacggggaagacccgaactcgaaaacaggtttctagtcacatccaggttttggcccgaaggaaatcaagggaaatccagtccaagttgaaggctctgaacgtggaccaggtttccaaggacaaggctttccagacaatggcaaccatgtcctctgcccagctcatctccgcgccttctctgcaggccaaactgggtcccactggtcctcaggtggtccaggcctctgagcttttccagttttggtctggaggatctgggcccccctggaatgttccagatgtgaagccattctcacagacaccgttcaccttgtcactgactcccccatctactgacctcccagggtacgagcccccccaagccctctcacccctgcccccacctaccccatcgcccccagcctggcaggctcggggcctgggcaccgcccggttgcagctggtagagttctcagccttcgtggaaccgccagatgcagttgattcttaccagaggcacctgttcgtgcacatcagccagcactgccccagccccggagcgccgccgctcgagagtgtggacgtccggcagatctacgacaaattccctgagaaaaagggtggcctccgagagctatatgatcgtggccccccccatgccttcttcctggtcaagttctgggcggacctgaactggggcccaagtggtgaggaggcaggggccggtggcagcatcagcagtggtggcttctacggagtgagcagccagtatgagagcctggaacacatgaccctcacctgttcctccaaggtctgctcttttggcaagcaggtggtggagaaggtggagacggaacgggcccagctggaggacggcagatttgtgtaccgcctgctgcgctcgcccatgtgcgagtacctggtgaatttcttgcacaagttgcggcagctgcctgagcgatacatgatgaacagcgtcctggaaaacttcaccatcctccaggtggtgacaaacagagacacccaggaactgctgctctgcaccgcctatgtcttcgaggtctccaccagcgagcgtggggcccagcatcacatttaccgcctggtcagggactgaagggggaccccaaaactggctcaccccccagaacaccctcctcccagggagggtcctccagctcacctcatgcttcttatttggggagagggctgtgatgtaaaggggttgacctcagaggcctaagcaactggggccatcccccccattagaggggcccccaaaacttggttggagagctgaacaggctgggactgaggaaaggataaaccccgatattgggacctcacagtgggtgtctg

SEQ ID NO: 189911 - DNA, 2141 bp, Homo sapiens
  Payload ID: 17500
  Gene Symbol: TEAD2
  Gene Name: TEA domain family member 2
  Uniprot ID: Q15562
  ENST ID: ENST00000593945
  CDS Start-End: 57-1412
aggccgggaggtaggaaggcgccggcgggagtcggggatcctgctttggggcccagatgggggaaccccgggctggggccgccctggacgatggcagcggctggacgggcagtgaggaaggcagtgaggagggtaccggcggcagtgagggggctgggggtgacgggggcccggatgcagagggggtgtggagcccagacattgagcagagcttccaggaggccctggccatctatccaccctgcggccgccggaaaataattttgtctgatgaaggcaagatgtatggtcggaatgaactgatcgcccgctacatcaagctgagaacggggaagacccgaactcgaaaacaggtttctagtcacatccaggttttggcccgaaggaaatcaagggaaatccagtccaagttgaaggctctgaacgtggaccaggtttccaaggacaaggctttccagacaatggcaaccatgtcctctgcccagctcatctccgcgccttctctgcaggccaaactgggtcccactggtcctcaggcctctgagcttttccagttttggtctggaggatctgggcccccctggaatgttccagatgtgaagccattctcacagacaccgttcaccttgtcactgactcccccatctactgacctcccagggtacgagcccccccaagccctctcacccctgcccccacctaccccatcgcccccagcctggcaggctcggggcctgggcaccgcccggttgcagctggtagagttctcagccttcgtggaaccgccagatgcagttgattcttaccagaggcacctgttcgtgcacatcagccagcactgccccagccccggagcgccgccgctcgagagtgtggacgtccggcagatctacgacaaattccctgagaaaaagggtggcctccgagagctatatgatcgtggccccccccatgccttcttcctggtcaagttctgggcggacctgaactggggcccaagtggtgaggaggcaggggccggtggcagcatcagcagtggtggcttctacggagtgagcagccagtatgagagcctggaacacatgaccctcacctgttcctccaaggtctgctcttttggcaagcaggtggtggagaaggtggagacggaacgggcccagctggaggacggcagatttgtgtaccgcctgctgcgctcgcccatgtgcgagtacctggtgaatttcttgcacaagttgcggcagctgcctgagcgatacatgatgaacagcgtcctggaaaacttcaccatcctccaggtggtgacaaacagagacacccaggaactgctgctctgcaccgcctatgtcttcgaggtctccaccagcgagcgtggggcccagcatcacatttaccgcctggtcagggactgaagggggaccccaaaactggctcaccccccagaacaccctcctcccagggagggtcctccagctcacctcatgcttcttatttggggagagggctgtgatgtaaaggggttgacctcagaggcctaagcaactggggccatcccccccattagaggggcccccaaaacttggttggagagctgaacaggctgggactgaggaaaggataaaccccgatattgggacctcacagtgggtgtctgaaaggacagatcactccggagtatcagggattgtggggacaggagtgagacaaccccccaggtacagcactggcttttcttttcagcccctgacaggccacccccactcctctgcatgtcttggagagcgctagttacacattggcttgtcccctttactttttcccagccacccctccccctgaaatttctgcccctctctaccaccctcactccatgacctgtgagatcacaaagtgaagatgaaccctttctgtgcaggagcagagccaggtgggccctggacattttttttttttttaatataacgagatatttataagtgggtgctagggtcttgactttatctccgctgcacaagcagtgtgttgaactttctaatctcatccctctcctaagtgagccctgagctagacggtttccttcctcccctctcaaagtttgtttgtttgtgttctgacagaggataaagctattttaccaaaaa

SEQ ID NO: 189912 - DNA, 2167 bp, Homo sapiens
  Payload ID: 17500
  Gene Symbol: TEAD2
  Gene Name: TEA domain family member 2
  Uniprot ID: Q15562
  ENST ID: ENST00000601519
  CDS Start-End: 86-1438
cgcccgcccgcggctccccagccccaggccgggaggtaggaaggcgccggcgggagtcggggatcctgctttggggtgtgcccagatgggggaaccccgggctggggccgccctggacgatggcagcggctggacgggcagtgaggaaggcagtgaggagggtaccggcggcagtgagggggctgggggtgacgggggcccggatgcagagggggtgtggagcccagacattgagcagagcttccaggaggccctggccatctatccaccctgcggccgccggaaaataattttgtctgatgaaggcaagatgtatggtcggaatgaactgatcgcccgctacatcaagctgagaacggggaagacccgaactcgaaaacaggtttctagtcacatccaggttttggcccgaaggaaatcaagggaaatccagtccaagttgaaggaccaggtttccaaggacaaggctttccagacaatggcaaccatgtcctctgcccagctcatctccgcgccttctctgcaggccaaactgggtcccactggtcctcaggtggtccaggcctctgagcttttccagttttggtctggaggatctgggcccccctggaatgttccagatgtgaagccattctcacagacaccgttcaccttgtcactgactcccccatctactgacctcccagggtacgagcccccccaagccctctcacccctgcccccacctaccccatcgcccccagcctggcaggctcggggcctgggcaccgcccggttgcagctggtagagttctcagccttcgtggaaccgccagatgcagttgattcttaccagaggcacctgttcgtgcacatcagccagcactgccccagccccggagcgccgccgctcgagagtgtggacgtccggcagatctacgacaaattccctgagaaaaagggtggcctccgagagctatatgatcgtggccccccccatgccttcttcctggtcaagttctgggcggacctgaactggggcccaagtggtgaggaggcaggggccggtggcagcatcagcagtggtggcttctacggagtgagcagccagtatgagagcctggaacacatgaccctcacctgttcctccaaggtctgctcttttggcaagcaggtggtggagaaggtggagacggaacgggcccagctggaggacggcagatttgtgtaccgcctgctgcgctcgcccatgtgcgagtacctggtgaatttcttgcacaagttgcggcagctgcctgagcgatacatgatgaacagcgtcctggaaaacttcaccatcctccaggtggtgacaaacagagacacccaggaactgctgctctgcaccgcctatgtcttcgaggtctccaccagcgagcgtggggcccagcatcacatttaccgcctggtcagggactgaagggggaccccaaaactggctcaccccccagaacaccctcctcccagggagggtcctccagctcacctcatgcttcttatttggggagagggctgtgatgtaaaggggttgacctcagaggcctaagcaactggggccatcccccccattagaggggcccccaaaacttggttggagagctgaacaggctgggactgaggaaaggataaaccccgatattgggacctcacagtgggtgtctgaaaggacagatcactccggagtatcagggattgtggggacaggagtgagacaaccccccaggtacagcactggcttttcttttcagcccctgacaggccacccccactcctctgcatgtcttggagagcgctagttacacattggcttgtcccctttactttttcccagccacccctccccctgaaatttctgcccctctctaccaccctcactccatgacctgtgagatcacaaagtgaagatgaaccctttctgtgcaggagcagagccaggtgggccctggacattttttttttttttaatataacgagatatttataagtgggtgctagggtcttgactttatctccgctgcacaagcagtgtgttgaactttctaatctcatccctctcctaagtgagccctgagctagacggtttccttcctcccctctcaaagtttgtttgtttgtgttctgacagaggataaagctattttaccaaaaa

SEQ ID NO: 189913 - DNA, 566 bp, Homo sapiens
  Payload ID: 17500
  Gene Symbol: TEAD2
  Gene Name: TEA domain family member 2
  ENST ID: ENST00000598823
  CDS Start-End: 1-223
gaaggaccaggtttccaaggacaaggctttccagacaatggcaaccatgtcctctgcccagctcatctccgcgccttctctgcaggccaaactgggtcccactggtcctcaggtggtccaggcctctgagcttttccagttttggtctggaggatctgggcccccctggaatgttccagagaagaaactccttcccagaagccccccagcagatttcccctaacgtctcattggctaggactgtgtcacatggccacttctaactgcaagggaggctgggaaaggtacgagcccccccaagccctctcacccctgcccccacctaccccatcgcccccagcctggcaggctcggggcctgggcaccgcccggttgcagctggtagagttctcagccttcgtggaaccgccagatgcagttgattcttaccagaggcacctgttcgtgcacatcagccagcactgccccagccccggagcgccgccgctcgagagtgtggacgtccggcagatctacgacaaattccctgagaaaaagggtggcctccgagagctatatgatcgtgg

SEQ ID NO: 189914 - DNA, 2191 bp, Homo sapiens
  Payload ID: 17500
  Gene Symbol: TEAD2
  Gene Name: TEA domain family member 2
  Uniprot ID: Q15562
  ENST ID: ENST00000598810
  CDS Start-End: 107-1462
tgatggcagggcgcccctgtcccccagcttgtggttctgtgggtctctcctggtctcggcctcagctgctgccctgagtctctgtccctgccctttctaggcccagatgggggaaccccgggctggggccgccctggacgatggcagcggctggacgggcagtgaggaaggcagtgaggagggtaccggcggcagtgagggggctgggggtgacgggggcccggatgcagagggggtgtggagcccagacattgagcagagcttccaggaggccctggccatctatccaccctgcggccgccggaaaataattttgtctgatgaaggcaagatgtatggtcggaatgaactgatcgcccgctacatcaagctgagaacggggaagacccgaactcgaaaacaggtttctagtcacatccaggttttggcccgaaggaaatcaagggaaatccagtccaagttgaaggctctgaacgtggaccaggtttccaaggacaaggctttccagacaatggcaaccatgtcctctgcccagctcatctccgcgccttctctgcaggccaaactgggtcccactggtcctcaggcctctgagcttttccagttttggtctggaggatctgggcccccctggaatgttccagatgtgaagccattctcacagacaccgttcaccttgtcactgactcccccatctactgacctcccagggtacgagcccccccaagccctctcacccctgcccccacctaccccatcgcccccagcctggcaggctcggggcctgggcaccgcccggttgcagctggtagagttctcagccttcgtggaaccgccagatgcagttgattcttaccagaggcacctgttcgtgcacatcagccagcactgccccagccccggagcgccgccgctcgagagtgtggacgtccggcagatctacgacaaattccctgagaaaaagggtggcctccgagagctatatgatcgtggccccccccatgccttcttcctggtcaagttctgggcggacctgaactggggcccaagtggtgaggaggcaggggccggtggcagcatcagcagtggtggcttctacggagtgagcagccagtatgagagcctggaacacatgaccctcacctgttcctccaaggtctgctcttttggcaagcaggtggtggagaaggtggagacggaacgggcccagctggaggacggcagatttgtgtaccgcctgctgcgctcgcccatgtgcgagtacctggtgaatttcttgcacaagttgcggcagctgcctgagcgatacatgatgaacagcgtcctggaaaacttcaccatcctccaggtggtgacaaacagagacacccaggaactgctgctctgcaccgcctatgtcttcgaggtctccaccagcgagcgtggggcccagcatcacatttaccgcctggtcagggactgaagggggaccccaaaactggctcaccccccagaacaccctcctcccagggagggtcctccagctcacctcatgcttcttatttggggagagggctgtgatgtaaaggggttgacctcagaggcctaagcaactggggccatcccccccattagaggggcccccaaaacttggttggagagctgaacaggctgggactgaggaaaggataaaccccgatattgggacctcacagtgggtgtctgaaaggacagatcactccggagtatcagggattgtggggacaggagtgagacaaccccccaggtacagcactggcttttcttttcagcccctgacaggccacccccactcctctgcatgtcttggagagcgctagttacacattggcttgtcccctttactttttcccagccacccctccccctgaaatttctgcccctctctaccaccctcactccatgacctgtgagatcacaaagtgaagatgaaccctttctgtgcaggagcagagccaggtgggccctggacattttttttttttttaatataacgagatatttataagtgggtgctagggtcttgactttatctccgctgcacaagcagtgtgttgaactttctaatctcatccctctcctaagtgagccctgagctagacggtttccttcctcccctctcaaagtttgtttgtttgtgttctgacagaggataaagctattttaccaaaaa

SEQ ID NO: 189915 - DNA, 579 bp, Homo sapiens
  Payload ID: 17500
  Gene Symbol: TEAD2
  Gene Name: TEA domain family member 2
  ENST ID: ENST00000596757
  CDS Start-End: 231-579
aaagctcccggcaactttctccctcgcagcgccccgcccgcccgcggctccccagccccaggccgggaggtcggaatgaactgatcgcccgctacatcaagctgagaacggggaagacccgaactcgaaaacaggtttctagtcacatccaggttttggcccgaaggaaatcaagggaaatccagtccaagttgaaggaccaggtttccaaggacaaggctttccagacaatggcaaccatgtcctctgcccagctcatctccgcgccttctctgcaggccaaactgggtcccactggtcctcaggcctctgagcttttccagttttggtctggaggatctgggcccccctggaatgttccagatgtgaagccattctcacagacaccgttcaccttgtcactgactcccccatctactgacctcccagggtacgagcccccccaagccctctcacccctgcccccacctaccccatcgcccccagcctggcaggctcggggcctgggcaccgcccggttgcagctggtagagttctcagccttcgtggaaccgccagatgcagttgattcttaccaga

SEQ ID NO: 189916 - DNA, 2983 bp, Homo sapiens
  Payload ID: 17501
  Gene Symbol: TEAD3
  Gene Name: TEA domain family member 3
  Uniprot ID: Q99594
  ENST ID: ENST00000338863
  CDS Start-End: 229-1536
acaaactttccgtcccgctcgctccctcctccgcgctcggcgcctcccgctccagcccggctcattccgcacattccggccagccccctccccacgaccccccttccccggccccccttgcggctccctcgggcccggcggagcggcccggccggagcgcccccgcgagctcggaccaggctcagccgcccagtgggctcaggcccagagcccagagcaaccagcacaatagcgtccaacagctggaacgccagcagcagccccggggaggcccgggaggatgggcccgagggcctggacaaggggctggacaacgatgcggagggcgtgtggagcccggacatcgagcagagcttccaggaggccctggccatctacccgccctgcggccggcggaagatcatcctgtcagacgagggcaagatgtacggccgaaatgagttgattgcacgctatattaaactgaggacggggaagactcggacgagaaaacaggtgtccagccacatacaggttctagctcggaagaaggtgcgggagtaccaggttggcatcaaggccatgaacctggaccaggtctccaaggacaaagcccttcagagcatggcgtccatgtcctctgcccagatcgtctctgccagtgtcctgcagaacaagttcagcccaccttcccctctgccccaggccgtcttctccacttcctcgcggttctggagcagcccccctctcctgggacagcagcctggaccctctcaggacatcaagccctttgcacagccagcctaccccatccagccgcccctgccgccgacgctcagcagttatgagcccctggccccgctcccctcagctgctgcctctgtgcctgtgtggcaggaccgtaccattgcctcctcccggctgcggctcctggagtattcagccttcatggaggtgcagcgagaccctgacacgtacagcaaacacctgtttgtgcacatcggccagacgaaccccgccttctcagacccacccctggaggcagtagatgtgcgccagatctatgacaaattccccgagaaaaagggaggattgaaggagctctatgagaaggggccccctaatgccttcttccttgtcaagttctgggccgacctcaacagcaccatccaggagggcccgggagccttctatggggtcagctctcagtacagctctgctgatagcatgaccatcagcgtctccaccaaggtgtgctcctttggcaaacaggtggtagagaaggtggagactgagtatgccaggctggagaacgggcgctttgtgtaccgtatccaccgctcgcccatgtgcgagtacatgatcaacttcatccacaagctgaagcacctgcccgagaagtacatgatgaacagcgtgctggagaacttcaccatcctgcaggtggtcacgagccgggactcccaggagaccctgcttgtcattgcttttgtcttcgaagtctccaccagtgagcacggggcccagcaccatgtctacaagctcgtcaaagactagggtgccctctgcgcctccttaaggatgcagggtgagcatctcctctccacacctgcctggcacccctgggggggtccaggattgaggattcatctacctgccaggcctcaggcccaggacccaggaggcctccccacctaccccagcacacacactccctgccactgttctgcgctttaattgtgggagaagagaggagaggagggctcagcggtggggcagcctgtccggggcgctgacccaccatcaccctgctctgcccagcctcgcgtgacctcagagaggtggggataggggacaccttcagcctccagcatgtgtggccactgtacccccacccacccttgggggagcatgatgggcaggtgagggcaggatggagaccaagggagtcagtgagcagaggccctgggagtgtccggttggggttggactgaggacagaggggcccacacttccttgcccctttgtgtcccaggcctggtgcccagactccttgcatggcttgtgtggtcctcagactccgcacagcgagcgtaggtctctgggtttcagatgaagtgcccaggctccaggaagttgagggacccacaggagaggtgggcagagctggagttctcatccagggctgcttgtccccagagcccaggtttatactacctccctggggcgggggctggccgcagggtaggggagaggctctgcagtgtggagtggagcctcatcgaggggcgctgggttaggggagcacctgtttcagactgggcatgaagaagggagcacagcagctactagaccccattagcacctcattagcccacaagccagccaggggccccaggaagatggggcaccccccagcaccctccagattgagagcaaggtagaggaaggagtcccagcctctgggcagaccagaggcccagagggagagagtagcagaaggcttttgatttttctcttgcctgaggcttgaatctgacaaacccttggtgggcactgctcccttaggttcttccccacctcaatctacctgcctagagtagcagctcccagacccagttctgggactgaaggttaacccttcacctgctgtcccttcttaacacccaggcccccagagccagctgggcctgtccagcagccacctgtgggtatttatgagtttcatatgaagtactgtgccccttcccttcctcatcccgaccctgcccgagcttcctgaaggtcctcactgtttgcatatcgctcaggccacctccaaaccccacctaggttttataatgtatattatatatttttttgtgtatttttaaaatccagctgtgatgggttatatcataaatgcagcttggggttggagcaggggccctcaaaggcccagctcctgctcaaaaaaaaaaaaaaaaaaaaattaaagttatttgtttgtgggtcagtcatgtaa

SEQ ID NO: 189917 - DNA, 2729 bp, Homo sapiens
  Payload ID: 17501
  Gene Symbol: TEAD3
  Gene Name: TEA domain family member 3
  ENST ID: ENST00000402886
  CDS Start-End: 155-1282
cctcgggcccggcggagcggcccggccggagcgcccccgcgagctcggaccaggctcagccgcccagtgggctcaggcccagagcccagagcaaccagcacaatagcgtccaacagctggaacgccagcagcagccccggggaggcccgggaggatgggcccgagggcctggacaaggggctggacaacgatgcggagggcgtgtggagcccggacatcgagcagagcttccaggaggccctggccatctacccgccctgcggccggcggaagatcatcctgtcagacgagggcaagatgtacggccatgaacctggaccaggtctccaaggacaaagcccttcagagcatggcgtccatgtcctctgcccagatcgtctctgccagtgtcctgcagaacaagttcagcccaccttcccctctgccccaggccgtcttctccacttcctcgcggttctggagcagcccccctctcctgggacagcagcctggaccctctcaggacatcaagccctttgcacagccagcctaccccatccagccgcccctgccgccgacgctcagcagttatgagcccctggccccgctcccctcagctgctgcctctgtgcctgtgtggcaggaccgtaccattgcctcctcccggctgcggctcctggagtattcagccttcatggaggtgcagcgagaccctgacacgtacagcaaacacctgtttgtgcacatcggccagacgaaccccgccttctcagacccacccctggaggcagtagatgtgcgccagatctatgacaaattccccgagaaaaagggaggattgaaggagctctatgagaaggggccccctaatgccttcttccttgtcaagttctgggccgacctcaacagcaccatccaggagggcccgggagccttctatggggtcagctctcagtacagctctgctgatagcatgaccatcagcgtctccaccaaggtgtgctcctttggcaaacaggtggtagagaaggtggagactgagtatgccaggctggagaacgggcgctttgtgtaccgtatccaccgctcgcccatgtgcgagtacatgatcaacttcatccacaagctgaagcacctgcccgagaagtacatgatgaacagcgtgctggagaacttcaccatcctgcaggtggtcacgagccgggactcccaggagaccctgcttgtcattgcttttgtcttcgaagtctccaccagtgagcacggggcccagcaccatgtctacaagctcgtcaaagactagggtgccctctgcgcctccttaaggatgcagggtgagcatctcctctccacacctgcctggcacccctgggggggtccaggattgaggattcatctacctgccaggcctcaggcccaggacccaggaggcctccccacctaccccagcacacacactccctgccactgttctgcgctttaattgtgggagaagagaggagaggagggctcagcggtggggcagcctgtccggggcgctgacccaccatcaccctgctctgcccagcctcgcgtgacctcagagaggtggggataggggacaccttcagcctccagcatgtgtggccactgtacccccacccacccttgggggagcatgatgggcaggtgagggcaggatggagaccaagggagtcagtgagcagaggccctgggagtgtccggttggggttggactgaggacagaggggcccacacttccttgcccctttgtgtcccaggcctggtgcccagactccttgcatggcttgtgtggtcctcagactccgcacagcgagcgtaggtctctgggtttcagatgaagtgcccaggctccaggaagttgagggacccacaggagaggtgggcagagctggagttctcatccagggctgcttgtccccagagcccaggtttatactacctccctggggcgggggctggccgcagggtaggggagaggctctgcagtgtggagtggagcctcatcgaggggcgctgggttaggggagcacctgtttcagactgggcatgaagaagggagcacagcagctactagaccccattagcacctcattagcccacaagccagccaggggccccaggaagatggggcaccccccagcaccctccagattgagagcaaggtagaggaaggagtcccagcctctgggcagaccagaggcccagagggagagagtagcagaaggcttttgatttttctcttgcctgaggcttgaatctgacaaacccttggtgggcactgctcccttaggttcttccccacctcaatctacctgcctagagtagcagctcccagacccagttctgggactgaaggttaacccttcacctgctgtcccttcttaacacccaggcccccagagccagctgggcctgtccagcagccacctgtgggtatttatgagtttcatatgaagtactgtgccccttcccttcctcatcccgaccctgcccgagcttcctgaaggtcctcactgtttgcatatcgctcaggccacctccaaaccccacctaggttttataatgtatattatatatttttttgtgtatttttaaaatccagctgtgatgggttatatcataaatgcagcttggggttggagcaggggccctcaaaggcccagctcctgctcaaaaaaaaaaaaaaaaaaaaattaaagttatttgtttgtgggtcagtcatgtaa

SEQ ID NO: 189918 - DNA, 657 bp, Homo sapiens
  Payload ID: 17501
  Gene Symbol: TEAD3
  Gene Name: TEA domain family member 3
  ENST ID: ENST00000433586
  CDS Start-End: 1-657
gtctctagccacttgcaagttctagccaggcggaaatctcgggagattcagtctaagctgaaggccatgaacctggaccaggtctccaaggacaaagcccttcagagcatggcgtccatgtcctctgcccagatcgtctctgccagtgtcctgcagaacaagttcagcccaccttcccctctgccccaggccgtcttctccacttcctcgcggttctggagcagcccccctctcctgggacagcagcctggaccctctcaggacatcaagccctttgcacagccagcctaccccatccagccgcccctgccgccgacgctcagcagttatgagcccctggccccgctcccctcagctgctgcctctgtgcctgtgtggcaggaccgtaccattgcctcctcccggctgcggctcctggagtattcagccttcatggaggtgcagcgagaccctgacacgtacagcaaacacctgtttgtgcacatcggccagacgaaccccgccttctcagacccacccctggaggcagtagatgtgcgccagatctatgacaaattccccgagaaaaagggaggattgaaggagctctatgagaaggggccccctaatgccttcttccttgtcaagttctgggccgacctcaacagcaccatccag

SEQ ID NO: 189919 - DNA, 1637 bp, Homo sapiens
  Payload ID: 17502
  Gene Symbol: TEAD4
  Gene Name: TEA domain family member 4
  ENST ID: ENST00000358409
  CDS Start-End: 275-1450
gtggccccgccgccactccctccggctccctccctcccgccgcggcgcgcatctcattccagccctcattccgcgcattccagcgtcctcctcgcacactcgaggccagggggcgggagggccgcagctccggcgccgccgcgtcccgccagaacgatcgccgcggccggaagagttggcgctcggggcggactccttggaactggcttagcgcacccatcccaccttcccgcaccctgggaccggtccaacgagcgctcctccaagcggagccttggagggcacggccggcaccattacctccaacgagtggagctctcccacctcccctgaggggagcaccgcctctgggggcagtcaggcactggacaagcccatcgacaatgacgcagagggcgtgtggagcccggatattgagcagagtttccaggaggccctcgccatctacccgccctgtggcaggcgcaaaatcatcctgtcggacgagggcaagatgtatggtcggaacgagctgattgcccgctacatcaagctccggacagggaagacccgcaccaggaagcaggtctccagccacatccaggtgctggctcgtcgcaaagctcgcgagatccaggccaagctaaagttttggcaaggagctttgccaggccaagccggaacgtcccatgatgtgaagcctttctctcagcaaacctatgctgtccagcctccgctgcctctgccagggtttgagtctcctgcagggcccgccccatcgccctctgcgcccccggcacccccatggcagggccgcagcgtggccagctccaagctctggatgttggagttctctgccttcctggagcagcagcaggacccggacacgtacaacaagcacctgttcgtgcacattggccagtccagcccaagctacagcgacccctacctcgaagccgtggacatccgccaaatctatgacaaattcccggagaaaaagggtggactcaaggatctcttcgaacggggaccctccaatgccttttttcttgtgaagttctgggcagacctcaacaccaacatcgaggatgaaggcagctccttctatggggtctccagccagtatgagagccccgagaacatgatcatcacctgctccacgaaggtctgctctttcggcaagcaggtggtggagaaagttgagacagagtatgctcgctatgagaatggacactactcttaccgcatccaccggtccccgctctgtgagtacatgatcaacttcatccacaagctcaagcacctccctgagaagtacatgatgaacagcgtgctggagaacttcaccatcctgcaggtggtcaccaacagagacacacaggagaccttgctgtgcattgcctatgtctttgaggtgtcagccagtgagcacggggctcagcaccacatctacaggctggtgaaagaatgagagactcggggagcagggaggggggaagagacgtgtgtgcaggaaacggggacgtggggaggggacctgcaggggcagccccctgaagtgccaagagagctgagaggagcagttgtgactctacccaggaacaaactgtgcctgaacctgaggtgcccaaccccaaataaacccaagatgctgtgta

SEQ ID NO: 189920 - DNA, 1690 bp, Homo sapiens
  Payload ID: 17502
  Gene Symbol: TEAD4
  Gene Name: TEA domain family member 4
  ENST ID: ENST00000359864
  CDS Start-End: 191-1495
gtcctcctcgcacactcgaggccagggggcgggagggccgcagctccggcgccgccgcgtcccgccagaacgatcgccgcggccggaagagttggcgctcggggcggactccttggaactggcttagcgcacccatcccaccttcccgcaccctgggaccggtccaacgagcgctcctccaagcggagccttggagggcacggccggcaccattacctccaacgagtggagctctcccacctcccctgaggggagcaccgcctctgggggcagtcaggcactggacaagcccatcgacaatgacgcagagggcgtgtggagcccggatattgagcagagtttccaggaggccctcgccatctacccgccctgtggcaggcgcaaaatcatcctgtcggacgagggcaagatgtatggtcggaacgagctgattgcccgctacatcaagctccggacagggaagacccgcaccaggaagcaggtctccagccacatccaggtgctggctcgtcgcaaagctcgcgagatccaggccaagctaaaggaccaggcagctaaggacaaggccctgcagagcatggctgccatgtcgtctgcacagatcatctccgccacggccttccacagtagcatggccctcgcccggggccccggccgcccagcagtctcagggttttggcaaggagctttgccaggccaagccggaacgtcccatgatgtgaagcctttctctcagcaaacctatgctgtccagcctccgctgcctctgccagggtttgagtctcctgcagggcccgccccatcgccctctgcgcccccggcacccccatggcagggccgcagcgtggccagctccaagctctggatgttggagttctctgccttcctggagcagcagcaggacccggacacgtacaacaagcacctgttcgtgcacattggccagtccagcccaagctacagcgacccctacctcgaagccgtggacatccgccaaatctatgacaaattcccggagaaaaagggtggactcaaggatctcttcgaacggggaccctccaatgccttttttcttgtgaagttctgggcagacctcaacaccaacatcgaggatgaaggcagctccttctatggggtctccagccagtatgagagccccgagaacatgatcatcacctgctccacgaaggtctgctctttcggcaagcaggtggtggagaaagttgagacagagtatgctcgctatgagaatggacactactcttaccgcatccaccggtccccgctctgtgagtacatgatcaacttcatccacaagctcaagcacctccctgagaagtacatgatgaacagcgtgctggagaacttcaccatcctgcaggtggtcaccaacagagacacacaggagaccttgctgtgcattgcctatgtctttgaggtgtcagccagtgagcacggggctcagcaccacatctacaggctggtgaaagaatgagagactcggggagcagggaggggggaagagacgtgtgtgcaggaaacggggacgtggggaggggacctgcaggggcagccccctgaagtgccaagagagctgagaggagcagttgtgactctacccaggaacaaactgtgcctgaacctgaggtgcccaaccccaaataaacccaagatgctgtgtattttcaga

SEQ ID NO: 189921 - DNA, 1396 bp, Homo sapiens
  Payload ID: 17502
  Gene Symbol: TEAD4
  Gene Name: TEA domain family member 4
  Uniprot ID: Q15561
  ENST ID: ENST00000397122
  CDS Start-End: 286-1203
tctgcgcgctgacgccctgtcgtccccgcagaacgatcgccgcggccggaagagttggcgctcggggcggactccttggaactggcttagcgcacccatcccaccttcccgcaccctgggaccggtcggaacgagctgattgcccgctacatcaagctccggacagggaagacccgcaccaggaagcaggtctccagccacatccaggtgctggctcgtcgcaaagctcgcgagatccaggccaagctaaaggaccaggcagctaaggacaaggccctgcagagcatggctgccatgtcgtctgcacagatcatctccgccacggccttccacagtagcatggccctcgcccggggccccggccgcccagcagtctcagggttttggcaaggagctttgccaggccaagccggaacgtcccatgatgtgaagcctttctctcagcaaacctatgctgtccagcctccgctgcctctgccagggtttgagtctcctgcagggcccgccccatcgccctctgcgcccccggcacccccatggcagggccgcagcgtggccagctccaagctctggatgttggagttctctgccttcctggagcagcagcaggacccggacacgtacaacaagcacctgttcgtgcacattggccagtccagcccaagctacagcgacccctacctcgaagccgtggacatccgccaaatctatgacaaattcccggagaaaaagggtggactcaaggatctcttcgaacggggaccctccaatgccttttttcttgtgaagttctgggcagacctcaacaccaacatcgaggatgaaggcagctccttctatggggtctccagccagtatgagagccccgagaacatgatcatcacctgctccacgaaggtctgctctttcggcaagcaggtggtggagaaagttgagacagagtatgctcgctatgagaatggacactactcttaccgcatccaccggtccccgctctgtgagtacatgatcaacttcatccacaagctcaagcacctccctgagaagtacatgatgaacagcgtgctggagaacttcaccatcctgcaggtggtcaccaacagagacacacaggagaccttgctgtgcattgcctatgtctttgaggtgtcagccagtgagcacggggctcagcaccacatctacaggctggtgaaagaatgagagactcggggagcagggaggggggaagagacgtgtgtgcaggaaacggggacgtggggaggggacctgcaggggcagccccctgaagtgccaagagagctgagaggagcagttgtgactctacccaggaacaaactgtgcctgaacctgaggtgcccaaccccaaataaacccaagatgctgtgtattttca

SEQ ID NO: 189922 - DNA, 641 bp, Homo sapiens
  Payload ID: 17502
  Gene Symbol: TEAD4
  Gene Name: TEA domain family member 4
  ENST ID: ENST00000443986
  CDS Start-End: 127-459
gcagaacgatcgccgcggccggaagagttggcgctcggggcggactccttggaactggcttagcgcacccatcccaccttcccgcaccctgggaccggtccaacgagcgctcctccaagcggagccttggagggcacggccggcaccattacctccaacgagtggagctctcccacctcccctgaggggagcaccgcctctgggggcagtcaggcactggacaagcccatcgacaatgacgcagagggcgtgtggagcccggatattgagcagagtttccaggaggccctcgccatctacccgccctgtggcaggcgcaaaatcatcctgtcggacgagggcaagatgtatggtctccagccacatccaggtgctggctcgtcgcaaagctcgcgagatccaggccaagctaaagttttggcaaggagctttgccaggccaagccggaacgtcccatgatgtgaagcctttctctcagcaaacctatgctgtccagcctccgctgcctctgccagggtttgagtctcctgcagggcccgccccatcgccctctgcgcccccggcacccccatggcagggccgcagcgtggccagctccaagctctggatgttggagttctctgccttcctggagcagcagc

SEQ ID NO: 189923 - DNA, 570 bp, Homo sapiens
  Payload ID: 17502
  Gene Symbol: TEAD4
  Gene Name: TEA domain family member 4
  ENST ID: ENST00000536826
  CDS Start-End: 354-570
ttccagcgtcctcctcgcacactcgaggccagggggcgggagggccgcagctccggcgccgccgcgtcccgccagaacgatcgccgcggccggaagagttggcgctcggggcggactccttggaactggcttagcgcacccatcccaccttcccgcaccctgggaccggtaaggctggggcgcggggacttggtaggactttgccggagggcaggagtctgcgcggtgcgtgcggagctccctcccgggacgagactgggaagagcgaggcacgtggaggcggcgcgactgaggctgctggaggcgaagcggctccaggggcgggtccaacgagcgctcctccaagcggagccttggagggcacggccggcaccattacctccaacgagtggagctctcccacctcccctgaggggagcaccgcctctgggggcagtcaggcactggacaagcccatcgacaatgacgcagagggcgtgtggagcccggatattgagcagagtttccaggaggccctcgccatctacccgccctgtggcaggcgcaaaatcatcctgtcggacgagggca

SEQ ID NO: 189924 - DNA, 578 bp, Homo sapiens
  Payload ID: 17502
  Gene Symbol: TEAD4
  Gene Name: TEA domain family member 4
  ENST ID: ENST00000540314
  CDS Start-End: 512-578
attccagcgtcctcctcgcacactcgaggccagggggcgggagggccgcagctccggcgccgccgcgtcccgccagaacgatcgccgcggccggaagagttggcgctcggggcggactccttggaactggcttagcgcacccatcccaccttcccgcaccctgggaccggtaaggctggggcgcggggacttggtaggactttgccggagggcaggagtctgcgcggtgcgtgcggagctccctcccgggacgagactgggaagagcgaggcacgtggaggcggcgcgactgaggctgctggaggcgaagcggctccaggggcgggtaaggggggtggacactcgggactttgggggaaagggaggccggtgtggaaaggaccggagaggcagaaccgagagcatcggcaacagaagagacccagcacccatgcctcttttctgctgggcccttttcgagcctggaagggagagacctggaggtccaacgagcgctcctccaagcggagccttggagggcacggccggcaccattacctccaacgagtggagctctcccacctcccctgaggggagca

SEQ ID NO: 189925 - DNA, 567 bp, Homo sapiens
  Payload ID: 17502
  Gene Symbol: TEAD4
  Gene Name: TEA domain family member 4
  ENST ID: ENST00000544666
  CDS Start-End: 1-567
agggaagacccgcaccaggaagcaggtctccagccacatccaggtgctggctcgtcgcaaagctcgcgagatccaggccaagctaaagacaggtgctgagctaggcacctgtggtagagaggaccaggcagctaaggacaaggccctgcagagcatggctgccatgtcgtctgcacagatcatctccgccacggccttccacagtagcatggccctcgcccggggccccggccgcccagcagtctcagggttttggcaaggagctttgccaggccaagccggaacgtcccatgatgtgaagcctttctctcagcaaacctatgctgtccagcctccgctgcctctgccagggtttgagtctcctgcagggcccgccccatcgccctctgcgcccccggcacccccatggcagggccgcagcgtggccagctccaagctctggatgttggagttctctgccttcctggagcagcagcaggacccggacacgtacaacaagcacctgttcgtgcacattggccagtccagcccaagctacagcgacccctacctcgaagccgtggacat

SEQ ID NO: 189926 - DNA, 801 bp, Homo sapiens
  Payload ID: 17502
  Gene Symbol: TEAD4
  Gene Name: TEA domain family member 4
  ENST ID: ENST00000543035
  CDS Start-End: 275-801
cctccctccgcgcgctccgctccgctccgctgggcgcaccggggccggtcggcgcggggtgggcttggccccgcggccccgccttcactgcgccgcccgtcggccccggccggagcccggctctgcgcgctgacgccctgtcgtccccgcagaacgatcgccgcggccggaagagttggcgctcggggcggactccttggaactggcttagcgcacccatcccaccttcccgcaccctgggaccggtccaacgagcgctcctccaagcggagccttggagggcacggccggcaccattacctccaacgagtggagctctcccacctcccctgaggggagcaccgcctctgggggcagtcaggcactggacaagcccatcgacaatgacgcagagggcgtgtggagcccggatattgagcagagtttccaggaggccctcgccatctacccgccctgtggcaggcgcaaaatcatcctgtcggacgagggcaagatgtatggtcggaacgagctgattgcccgctacatcaagctccggacagggaagacccgcaccaggaagcaggtctccagccacatccaggtgctggctcgtcgcaaagctcgcgagatccaggccaagctaaaggaccaggcagctaaggacaaggccctgcagagcatggctgccatgtcgtctgcacagatcatctccgccacggccttccacagtagcatggccctcgcccggggccccggccgcccagcagtctcagggttttggcaaggagctttgccaggccaagccggaacgtcccatga

SEQ ID NO: 189927 - DNA, 4992 bp, Homo sapiens
  Payload ID: 17503
  Gene Symbol: TSHZ1
  Gene Name: teashirt zinc finger homeobox 1
  Uniprot ID: Q6ZSZ6
  ENST ID: ENST00000322038
  CDS Start-End: 585-3683
aaaaactgaagcaggaaaagcagctcgatgtgtctgtctatcagttgagactgtctgaaagctctgcgatccgaatgtgtgttatatttcactgaaaagaggagagagcgagagtgcatctccctctctcccaggagtttgagggggggggggacagtccacgctcatctcgcccacccagtgaatgtctgctcttcaccccctttgcacacactctccgggttgttgttgccttttttttttcttggaggggggggtgctttttgtgtatttttcaaatttttttctgttggaagatcaagaccggccaaaaatccatgatcaaaatgtgtttgcattagatttcgcattggaagaagcggcgatcctggcggccaagccccccgggtggaagcgcggggcaccaagtggcgctccggcggggtgacactgtttgatctgtgactgtttggaaggtggagcagcgcctgacatctccccccggcgcatcttatgttcctgaggaagaattgaaggcagcagaaatagatgaagagcacgtggaggatgacgggctgtctttggacattcaggaaagtgagtacatgtgcaatgaagagacggagatcaaagaggcgcagagctaccagaactccccagtcagctctgcgactaaccaggacgccggctacgggtcgcccttcagtgagagcagcgaccagctagcccatttcaaaggctcttcctctcgagaagagaaggaggatccgcagtgtcccgacagcgtctcgtacccccaggacagcctggcacagatcaaagctgtgtatgcaaacttgttctccgagtcctgctggtccagcttagctctggatttaaagaagtcgggttccaccaccagcaccaacgatgccagccagaaggagagctccgcccccacccccacaccccccacctgccccgtcagcaccactggccccaccacgagcacgcccagcaccagctgcagctccagcaccagccacagcagtaccaccagtaccagcagcagctccgggtacgactggcaccaggctgcactggccaagacgctgcagcagacgtcctcgtatgggctgcttcctgagcccagcctgttcagcaccgtgcagctctaccgccagaacaacaagctctacggctccgtcttcacgggcgccagcaagttccggtgcaaagactgcagtgccgcgtacgacacgctggtggaactgacggtgcacatgaacgagacaggccactaccgtgacgacaacagggacaaggactccgagaagaccaagaggtggtccaagcccaggaagcgctccctgatggagatggaggggaaggaggatgcccagaaggtgctgaagtgcatgtactgtggacactcctttgagtccttgcaggacctcagcgtccacatgatcaaaaccaagcattaccagaaagtgcctctgaaggagccagtgccagccatcaccaaactggtcccctccaccaaaaagcgggcgcttcaggacctggcgcccccctgctcccctgagccagcaggaatggccgcagaggtggccctgagtgagtcagccaaggatcagaaagcagcgaacccgtacgtcacgcccaataaccgctatggctaccagaatggcgccagctacacctggcagtttgaggcccgcaaggcgcagatcctcaagtgcatggagtgtggcagctcccacgacacgctgcagcagctcaccgcccacatgatggtcaccgggcacttcctgaaagtgaccacctcggcttctaagaagggcaagcagttggtgctggaccctgtggtggaagagaagatccagtccatcccactaccgcccaccacccacacgcggctgccggcctccagcatcaaaaagcagcccgactctcccgcggggtccacgacttctgaagaaaagaaagagccagagaaggagaagccgcctgtggctggcgacgcggagaagatcaaggaggagagtgaggacagcttggagaaatttgagcccagcaccctgtacccgtacctgcgtgaggaggacctggacgacagccccaagggagggctggacattctcaagtccctggagaataccgtctccacggccattagcaaagctcagaatggtgcgccctcatggggtggctaccccagcatccatgcagcctaccagctcccgggcaccgtgaagccactgccggcggccgtgcagagcgtgcaggtgcagccgtcctatgctggcggcgtgaagtcgctgtcttccgccgagcacaacgccctcctgcactccccagggagcctcacgcccccaccgcacaagagcaacgtgtctgccatggaggagctggtggagaaggtcacgggcaaggtcaacatcaagaaggaggagagaccccctgagaaggagaagagctccctggccaaggctgcgtcccccatagcaaaagagaataaagatttcccgaaaacggaggaagtcagcggcaaaccacagaagaagggccctgaggccgagactgggaaggccaaaaaggagggaccgctggacgttcacaccccaaatggcacagagcctctcaaagcaaaggtcaccaacggctgtaacaacctggggatcatcatggaccactcaccggagccttccttcatcaacccgctgagcgctttgcagtccatcatgaacacccacctgggcaaggtgtccaagcccgtgagtccctcgctggacccgctggcgatgctgtacaagatcagcaacagcatgctggacaagccggtgtaccccgccacccctgtgaagcaggccgatgccatcgaccgctactattatgaaaacagcgaccagcccattgacttaaccaagtccaagaacaagccgctggtgtccagcgtggctgattcggtggcatcacctctgcgggagagcgcactcatggacatctccgacatggtgaaaaacctcacaggccgcctgacgcccaagtcctccacgccctccacagtttcagagaagtccgatgctgatggcagcagctttgaggaggcgttggacgagctgtcaccggtccacaagaggaagggccggcagtccaactggaacccgcagcaccttctcatcctgcaggcccagttcgcctcgagcttgcgggagaccacagagggcaagtacatcatgtcggacttgggcccgcaggagagggtgcacatctcgaagtttactgggctctccatgaccaccatcagccactggctggccaatgtgaagtaccagttgaggaggacagggggaacgaaattcctaaagaacctggacacagggcatcctgttttcttttgcaacgattgtgcctctcagttcagaactgcttctacatacataagtcatttggagacacacttgggcttcagcctgaaggatctctccaagctgccactcaatcagattcaagaacagcagaatgtttcgaaagtcctcaccaacaaaactctgggcccactgggggccaccgaggaagacttgggctccacattccaatgtaagctctgcaaccggacttttgcgagcaagcacgcagtcaaactgcaccttagtaagacccacggcaagtctcccgaggaccacctgatctatgtgactgagttggagaaacagtagcgtccaggtatgcaagagaccgcggaacattgcactaaacgtcgtcgagctgcactaggcctggcctgagcctctgaaatcagtctttcctttgttgctggcccgcctctctggaccttggttttcttacacatattttgtatatttatatgctctctgtccgatctgtgcatgttatttttctttttccgtgagtcaaagtctgacctttattttcaacatctgttcttggtgttaagctatcttttgtaggaaatagtggggcacactactcagagacattatttagcagtaaagaaagacacaaataacaatgataaaaagacatcctaaaatggtgaagttgccatgacaataaaggtcatagaacctggtagtgtcaaatttaaccctttgaggactgtaattgcatttctgtgcctttcacttgaaaaaaaaaaaagaagaaaaaaaggcttaaaggcatttcattcagatcaaaagctgtgtcagacacaaaacttatttaataattaaaaaatgagcttttatatgcagaactggtttgtgaggaaacatgcatgcagctgtgggaagatagaaagctgtctaggactcacggggttcggaagccacacctctacatgtctaaaacaaaaaacaacaacaacagataccccactcgccactatgcccaaaccctctggatgctgaaaaatgccactttcggcaaaaaaaaaagtatgcaagctattatttaaaaatgtgtaaaaatgctatttcttttttcctgtaaaatattgcagtttatagttatttacaaatgtaagctttggtacaagctgacctttctatagcgtgctgcattggtaaatgaaaaaaaatggggcaaacgttggagtcctttccttgtaaattgccagcatcagcttaaaaactcctgtatgttacatatcgtaccattttaatctcttcaactttctttgtaccttctggctgtatgctttctcttttaactttttatattgtcattttatattaaatttctgtgtatataatgtaaaaccacaatttttgaataaaatttagttcctgcagcttgatttaaatagaggacttttactggcacctgcatctctccagatgcatgtactcagagggactgtcagacaaaaataaatacataaaaacaaagcaagcaatgcactattaattatacattttgatgttctatcattaatattgtacagtacattttggttcacacaattaaatccactgttttctcagatgtaaaataaacccacatgcagttcttgatttacacgga

SEQ ID NO: 189928 - DNA, 551 bp, Homo sapiens
  Payload ID: 17503
  Gene Symbol: TSHZ1
  Gene Name: teashirt zinc finger homeobox 1
  ENST ID: ENST00000560661
  CDS Start-End: 316-551
gaccaggccggctttctccagtgcggttgggccggaaccccgggatggtaaaaaagaaaaatgcatggaggagttgaactccacattggtatttttagaagttggatgcgggaaatagccagtgccacctgaagctgtggaaacaaacaggagcttggactttgcaggcatacctctttttaaagtgaagacattttcaggaacccctggatttttaaggcttatgttcctgaggaagaattgaaggcagcagaaatagatgaagagcacgtggaggatgacgggctgtctttggacattcaggaaagtgagtacatgtgcaatgaagagacggagatcaaagaggcgcagagctaccagaactccccagtcagctctgcgactaaccaggacgccggctacgggtcgcccttcagtgagagcagcgaccagctagcccatttcaaaggctcttcctctcgagaagagaaggaggatccgcagtgtcccgacagcgtctcgtacccccaggacagcctggcacagatcaaagctgtgtatgcaaacttgtt

SEQ ID NO: 189929 - DNA, 1022 bp, Homo sapiens
  Payload ID: 17503
  Gene Symbol: TSHZ1
  Gene Name: teashirt zinc finger homeobox 1
  ENST ID: ENST00000560918
  CDS Start-End: 193-1022
agcccgcgttagccatctacatactgaatcggatgtgcacttccaaatttgagatgtaggcatttctgcctcaacttgctagctgcgattttaaaagcttatgttcctgaggaagaattgaaggcagcagaaatagatgaagagcacgtggaggatgacgggctgtctttggacattcaggaaagtgagtacatgtgcaatgaagagacggagatcaaagaggcgcagagctaccagaactccccagtcagctctgcgactaaccaggacgccggctacgggtcgcccttcagtgagagcagcgaccagctagcccatttcaaaggctcttcctctcgagaagagaaggaggatccgcagtgtcccgacagcgtctcgtacccccaggacagcctggcacagatcaaagctgtgtatgcaaacttgttctccgagtcctgctggtccagcttagctctggatttaaagaagtcgggttccaccaccagcaccaacgatgccagccagaaggagagctccgcccccacccccacaccccccacctgccccgtcagcaccactggccccaccacgagcacgcccagcaccagctgcagctccagcaccagccacagcagtaccaccagtaccagcagcagctccgggtacgactggcaccaggctgcactggccaagacgctgcagcagacgtcctcgtatgggctgcttcctgagcccagcctgttcagcaccgtgcagctctaccgccagaacaacaagctctacggctccgtcttcacgggcgccagcaagttccggtgcaaagactgcagtgccgcgtacgacacgctggtggaactgacggtgcacatgaacgagacaggccactaccgtgacgacaacagggacaaggactccgagaagaccaagaggtggtccaagcccaggaagcgctccctgatggagatggaggggaaggaggatgcccagaaggtgctgaagtgcatgtactgtggacactcctttgagtccttgcaggacct

SEQ ID NO: 189930 - DNA, 3582 bp, Homo sapiens
  Payload ID: 17503
  Gene Symbol: TSHZ1
  Gene Name: teashirt zinc finger homeobox 1
  Uniprot ID: Q6ZSZ6
  ENST ID: ENST00000580243
  CDS Start-End: 349-3582
gcatggagcgcgggccgcgggccggcccgccgagcgcccgctgctgcgcccgcggcccgcgccggggatgactccgggctcggcgcccaggccccgcgcgctccgcccgcagcccggcgccgggaagcgggccgcgcggccgccgccgccgcctcctgagcggccccgggcgcggcggtccatgcgagcggctccccgcggtccgcggcgcgcccggagcccggagcccgcggggacgaggccaaagttgggcgcgccgcggagttgcgcccgcgcccggggccccgcgtccccgcgccccgcgaactccggcggcggctgaggcgacggctgcggcggccgagcagcatgccgaggaggaagcagcaggccccccggcgctcggcagcttatgttcctgaggaagaattgaaggcagcagaaatagatgaagagcacgtggaggatgacgggctgtctttggacattcaggaaagtgagtacatgtgcaatgaagagacggagatcaaagaggcgcagagctaccagaactccccagtcagctctgcgactaaccaggacgccggctacgggtcgcccttcagtgagagcagcgaccagctagcccatttcaaaggctcttcctctcgagaagagaaggaggatccgcagtgtcccgacagcgtctcgtacccccaggacagcctggcacagatcaaagctgtgtatgcaaacttgttctccgagtcctgctggtccagcttagctctggatttaaagaagtcgggttccaccaccagcaccaacgatgccagccagaaggagagctccgcccccacccccacaccccccacctgccccgtcagcaccactggccccaccacgagcacgcccagcaccagctgcagctccagcaccagccacagcagtaccaccagtaccagcagcagctccgggtacgactggcaccaggctgcactggccaagacgctgcagcagacgtcctcgtatgggctgcttcctgagcccagcctgttcagcaccgtgcagctctaccgccagaacaacaagctctacggctccgtcttcacgggcgccagcaagttccggtgcaaagactgcagtgccgcgtacgacacgctggtggaactgacggtgcacatgaacgagacaggccactaccgtgacgacaacagggacaaggactccgagaagaccaagaggtggtccaagcccaggaagcgctccctgatggagatggaggggaaggaggatgcccagaaggtgctgaagtgcatgtactgtggacactcctttgagtccttgcaggacctcagcgtccacatgatcaaaaccaagcattaccagaaagtgcctctgaaggagccagtgccagccatcaccaaactggtcccctccaccaaaaagcgggcgcttcaggacctggcgcccccctgctcccctgagccagcaggaatggccgcagaggtggccctgagtgagtcagccaaggatcagaaagcagcgaacccgtacgtcacgcccaataaccgctatggctaccagaatggcgccagctacacctggcagtttgaggcccgcaaggcgcagatcctcaagtgcatggagtgtggcagctcccacgacacgctgcagcagctcaccgcccacatgatggtcaccgggcacttcctgaaagtgaccacctcggcttctaagaagggcaagcagttggtgctggaccctgtggtggaagagaagatccagtccatcccactaccgcccaccacccacacgcggctgccggcctccagcatcaaaaagcagcccgactctcccgcggggtccacgacttctgaagaaaagaaagagccagagaaggagaagccgcctgtggctggcgacgcggagaagatcaaggaggagagtgaggacagcttggagaaatttgagcccagcaccctgtacccgtacctgcgtgaggaggacctggacgacagccccaagggagggctggacattctcaagtccctggagaataccgtctccacggccattagcaaagctcagaatggtgcgccctcatggggtggctaccccagcatccatgcagcctaccagctcccgggcaccgtgaagccactgccggcggccgtgcagagcgtgcaggtgcagccgtcctatgctggcggcgtgaagtcgctgtcttccgccgagcacaacgccctcctgcactccccagggagcctcacgcccccaccgcacaagagcaacgtgtctgccatggaggagctggtggagaaggtcacgggcaaggtcaacatcaagaaggaggagagaccccctgagaaggagaagagctccctggccaaggctgcgtcccccatagcaaaagagaataaagatttcccgaaaacggaggaagtcagcggcaaaccacagaagaagggccctgaggccgagactgggaaggccaaaaaggagggaccgctggacgttcacaccccaaatggcacagagcctctcaaagcaaaggtcaccaacggctgtaacaacctggggatcatcatggaccactcaccggagccttccttcatcaacccgctgagcgctttgcagtccatcatgaacacccacctgggcaaggtgtccaagcccgtgagtccctcgctggacccgctggcgatgctgtacaagatcagcaacagcatgctggacaagccggtgtaccccgccacccctgtgaagcaggccgatgccatcgaccgctactattatgaaaacagcgaccagcccattgacttaaccaagtccaagaacaagccgctggtgtccagcgtggctgattcggtggcatcacctctgcgggagagcgcactcatggacatctccgacatggtgaaaaacctcacaggccgcctgacgcccaagtcctccacgccctccacagtttcagagaagtccgatgctgatggcagcagctttgaggaggcgttggacgagctgtcaccggtccacaagaggaagggccggcagtccaactggaacccgcagcaccttctcatcctgcaggcccagttcgcctcgagcttgcgggagaccacagagggcaagtacatcatgtcggacttgggcccgcaggagagggtgcacatctcgaagtttactgggctctccatgaccaccatcagccactggctggccaatgtgaagtaccagttgaggaggacagggggaacgaaattcctaaagaacctggacacagggcatcctgttttcttttgcaacgattgtgcctctcagttcagaactgcttctacatacataagtcatttggagacacacttgggcttcagcctgaaggatctctccaagctgccactcaatcagattcaagaacagcagaatgtttcgaaagtcctcaccaacaaaactctgggcccactgggggccaccgaggaagacttgggctccacattccaatgtaagctctgcaaccggacttttgcgagcaagcacgcagtcaaactgcaccttagtaagacccacggcaagtctcccgaggaccacctgatctatgtgactgagttggagaaacagtag

SEQ ID NO: 189931 - DNA, 3093 bp, Homo sapiens
  Payload ID: 17504
  Gene Symbol: TSHZ2
  Gene Name: teashirt zinc finger homeobox 2
  Uniprot ID: Q9NRE2
  ENST ID: ENST00000329613
  CDS Start-End: 1-3093
atgatggctgctgcgttgctccattatacaggctacgcccaggaggaacagctgaaagaagaggaggaaataaaagaagaggaggaggaggaggacagcggttcagtagctcaactgcagggtggcaatgacacagggacggacgaggagctagaaacgggcccagagcaaaaaggctgcttcagctaccagaactctccaggaagtcatttgtccaatcaggatgccgagaacgagtctctgctgagtgacgccagtgatcaggtgtcggacatcaagagtgtctgcggcagagatgcctcagacaagaaagcacacactcacgtcaggcttccaaacgaagcacacaattgcatggataaaatgaccgctgtctacgccaacatcctgtcggattcctactggtcaggcctgggccttggcttcaagctgtccaatagtgagaggaggaactgtgacacccgaaacggcagcaacaagagtgattttgattggcaccaagacgctctgtccaaaagcctgcagcagaacttgccttctcggtccgtctcgaaacccagcctgttcagctcggtgcagttgtaccgacagagcagcaagatgtgcgggactgtgttcacaggggccagcagattccgatgccgacagtgcagcgcggcctatgacaccctagtcgagctgactgtgcacatgaatgaaacgggccactatcaagatgacaaccgcaaaaaggacaagctcagacccacgagctattcaaagcccaggaaaagggctttccaggatatggacaaagaggatgctcaaaaggttctgaaatgtatgttttgtggcgactcctttgattccctccaagatttgagcgtccacatgattaaaacaaaacattaccaaaaagtgcctttgaaggagccagtcccaaccatttcctcgaaaatggtcaccccggctaagaaacgcgtttttgatgtcaatcggccgtgttcccccgattcaaccacaggatcttttgcagattctttttcttctcagaagaacgccaacttgcagttgtcctccaacaaccgctatggctaccaaaatggagccagctacacctggcagtttgaggcctgcaagtcccagatcttaaagtgcatggagtgtgggagctcccatgacaccttgcagcagctcaccacccacatgatggtcacaggtcactttctcaaggtcaccagctctgcctccaagaaagggaagcagctggtattagacccgttagcagtggagaaaatgcagtcgttgtctgaggccccaaacagtgattctctggctcccaagccatccagtaactcagcatcagattgtacagcctctacaactgagttaaagaaagagagtaaaaaagaaaggccagaggaaaccagcaaggatgagaaagtcgtgaaaagcgaggactatgaagatcctctacaaaaacctttagaccctacaatcaaatatcaatacctaagggaggaagacttggaagatggctcaaagggtggaggggacattttgaaatctttggaaaatactgtcaccacagccatcaacaaagcccaaaacggggcccccagctggagtgcctaccccagcatccacgcagcctaccagctgtctgagggcaccaagccgcctttgcctatgggatcccaggtactgcagatccggcctaatctcaccaacaagctgaggcccattgcaccaaagtggaaagtgatgccactggtttctatgcccacacacctggccccttacactcaagtcaagaaagagtcagaagacaaagatgaagcggtgaaggagtgtgggaaagaaagtccccacgaagaggcctcatctttcagccacagtgagggcgattctttccgcaaaagtgaaacacctccagaagccaaaaagaccgagctgggtcccctgaaggaggaggagaagctgatgaaagagggcagcgagaaggagaaaccccagcccctggagcccacatctgctctgagcaatgggtgcgccctcgccaaccacgccccggccctgccatgcatcaacccactcagcgccctgcagtccgtcctgaacaatcacttgggcaaagccacggagcccttgcgctcaccttcctgctccagcccaagttcaagcacaatttccatgttccacaagtcgaatctcaatgtcatggacaagccggtcttgagtcctgcctccacaaggtcagccagcgtgtccaggcgctacctgtttgagaacagcgatcagcccattgacctgaccaagtccaaaagcaagaaagccgagtcctcgcaagcacaatcttgtatgtccccacctcagaagcacgctctgtctgacatcgccgacatggtcaaagtcctccccaaagccaccaccccaaagccagcctcctcctccagggtcccccccatgaagctggaaatggatgtcaggcgctttgaggatgtctccagtgaagtctcaactttgcataaaagaaaaggccggcagtccaactggaatcctcagcatcttctgattctacaagcccagtttgcctcgagcctcttccagacatcagagggcaaatacctgctgtctgatctgggcccacaagagcgtatgcaaatctctaagtttacgggactctcaatgaccactatcagtcactggctggccaacgtcaagtaccagcttaggaaaacgggcgggacaaaatttctgaaaaacatggacaaaggccaccccatcttttattgcagtgactgtgcctcccagttcagaaccccttctacctacatcagtcacttagaatctcacctgggtttccaaatgaaggacatgacccgcttgtcagtggaccagcaaagcaaggtggagcaagagatctcccgggtatcgtcggctcagaggtctccagaaacaatagctgccgaagaggacacagactctaaattcaagtgtaagttgtgctgtcggacatttgtgagcaaacatgcggtaaaactccacctaagcaaaacgcacagcaagtcacccgaacaccattcacagtttgtaacagacgtggatgaagaa

SEQ ID NO: 189932 - DNA, 12187 bp, Homo sapiens
  Payload ID: 17504
  Gene Symbol: TSHZ2
  Gene Name: teashirt zinc finger homeobox 2
  Uniprot ID: Q9NRE2
  ENST ID: ENST00000371497
  CDS Start-End: 888-3992
gtgtgtgtgtgcgagggtgtgtgtgtgtgtttgtgtgtgtgtgcatatgtggggggtgtgagtgtgtgtgtgcgaggaagcgggggtgcgtgcgcgtgtgagtgcgtgtgtgagtgtctgtgtgtgtgtctgtgtgtgtgtgtgagtgagtgaattccagattttctgtctttccaaaacccgctcctgtcctctcgcatatcactcacagacggggatctgacagcagccacaaacctacagtgagtgatcgctctccccccggcacgaatccgccatagagatcggcgaggaggaggaggaggaggaggaagaaaagaaggaggaggtggaggaggaggtggaggaggaggaggaggagggaaagaggagaaggaagaagaagaaaaagaagaaacccactaccttcccaggattgccttttttttttccttatctttacgcgcgagtgtgcctgtggcgcgtgtgcgcccctcgtcccttccatccgaacccgggcttggatgtttaataaagaaatcaagtgtctcaacagtcaccaaaaaaaaaaaaaaccgcaaaaacaaaaccaaaaaaattccaaaagcaaaaacaaaaaagagagaggaaaaaaaattcaaaataaacaaacaaacaaacaaggcagaaccaacctctacttcaaagcagccggcacaagccacccgtgtctgccacccagagaggggggtctctggcccgtggtggaggagttgcaggggggatcgtcagggggacagaggccgagtgacgtcctaggagccaccgggcaagaggcggaggagacccagagaggccagagagacagcgggccccagcgcgcggctcggggctggggcgccagaagtgggactggagcgaagtagaggatgccgaggagaaaacagcaggcacccaagcgggcggcaggctacgcccaggaggaacagctgaaagaagaggaggaaataaaagaagaggaggaggaggaggacagcggttcagtagctcaactgcagggtggcaatgacacagggacggacgaggagctagaaacgggcccagagcaaaaaggctgcttcagctaccagaactctccaggaagtcatttgtccaatcaggatgccgagaacgagtctctgctgagtgacgccagtgatcaggtgtcggacatcaagagtgtctgcggcagagatgcctcagacaagaaagcacacactcacgtcaggcttccaaacgaagcacacaattgcatggataaaatgaccgctgtctacgccaacatcctgtcggattcctactggtcaggcctgggccttggcttcaagctgtccaatagtgagaggaggaactgtgacacccgaaacggcagcaacaagagtgattttgattggcaccaagacgctctgtccaaaagcctgcagcagaacttgccttctcggtccgtctcgaaacccagcctgttcagctcggtgcagttgtaccgacagagcagcaagatgtgcgggactgtgttcacaggggccagcagattccgatgccgacagtgcagcgcggcctatgacaccctagtcgagctgactgtgcacatgaatgaaacgggccactatcaagatgacaaccgcaaaaaggacaagctcagacccacgagctattcaaagcccaggaaaagggctttccaggatatggacaaagaggatgctcaaaaggttctgaaatgtatgttttgtggcgactcctttgattccctccaagatttgagcgtccacatgattaaaacaaaacattaccaaaaagtgcctttgaaggagccagtcccaaccatttcctcgaaaatggtcaccccggctaagaaacgcgtttttgatgtcaatcggccgtgttcccccgattcaaccacaggatcttttgcagattctttttcttctcagaagaacgccaacttgcagttgtcctccaacaaccgctatggctaccaaaatggagccagctacacctggcagtttgaggcctgcaagtcccagatcttaaagtgcatggagtgtgggagctcccatgacaccttgcagcagctcaccacccacatgatggtcacaggtcactttctcaaggtcaccagctctgcctccaagaaagggaagcagctggtattagacccgttagcagtggagaaaatgcagtcgttgtctgaggccccaaacagtgattctctggctcccaagccatccagtaactcagcatcagattgtacagcctctacaactgagttaaagaaagagagtaaaaaagaaaggccagaggaaaccagcaaggatgagaaagtcgtgaaaagcgaggactatgaagatcctctacaaaaacctttagaccctacaatcaaatatcaatacctaagggaggaagacttggaagatggctcaaagggtggaggggacattttgaaatctttggaaaatactgtcaccacagccatcaacaaagcccaaaacggggcccccagctggagtgcctaccccagcatccacgcagcctaccagctgtctgagggcaccaagccgcctttgcctatgggatcccaggtactgcagatccggcctaatctcaccaacaagctgaggcccattgcaccaaagtggaaagtgatgccactggtttctatgcccacacacctggccccttacactcaagtcaagaaagagtcagaagacaaagatgaagcggtgaaggagtgtgggaaagaaagtccccacgaagaggcctcatctttcagccacagtgagggcgattctttccgcaaaagtgaaacacctccagaagccaaaaagaccgagctgggtcccctgaaggaggaggagaagctgatgaaagagggcagcgagaaggagaaaccccagcccctggagcccacatctgctctgagcaatgggtgcgccctcgccaaccacgccccggccctgccatgcatcaacccactcagcgccctgcagtccgtcctgaacaatcacttgggcaaagccacggagcccttgcgctcaccttcctgctccagcccaagttcaagcacaatttccatgttccacaagtcgaatctcaatgtcatggacaagccggtcttgagtcctgcctccacaaggtcagccagcgtgtccaggcgctacctgtttgagaacagcgatcagcccattgacctgaccaagtccaaaagcaagaaagccgagtcctcgcaagcacaatcttgtatgtccccacctcagaagcacgctctgtctgacatcgccgacatggtcaaagtcctccccaaagccaccaccccaaagccagcctcctcctccagggtcccccccatgaagctggaaatggatgtcaggcgctttgaggatgtctccagtgaagtctcaactttgcataaaagaaaaggccggcagtccaactggaatcctcagcatcttctgattctacaagcccagtttgcctcgagcctcttccagacatcagagggcaaatacctgctgtctgatctgggcccacaagagcgtatgcaaatctctaagtttacgggactctcaatgaccactatcagtcactggctggccaacgtcaagtaccagcttaggaaaacgggcgggacaaaatttctgaaaaacatggacaaaggccaccccatcttttattgcagtgactgtgcctcccagttcagaaccccttctacctacatcagtcacttagaatctcacctgggtttccaaatgaaggacatgacccgcttgtcagtggaccagcaaagcaaggtggagcaagagatctcccgggtatcgtcggctcagaggtctccagaaacaatagctgccgaagaggacacagactctaaattcaagtgtaagttgtgctgtcggacatttgtgagcaaacatgcggtaaaactccacctaagcaaaacgcacagcaagtcacccgaacaccattcacagtttgtaacagacgtggatgaagaatagctctgcaggacgaatgccttagtttccactttccagcctggatcccctcacactgaacccttcttcgttgcaccatcctgcttctgacattgaactcattgaactcctcctgacaccctggctctgagaagactgccaaaaaaaaaaaaaaaaaaaaatcaccccagccatttctcttcatcctcactaacaatttggtaatgaagtattgatttccacttctctgcttatgggcggtattagattttcattgataaattgcaatggggctgtctcgtctccacagtacccttttcactgtcacaagaaaacaaagtgccaccgaagaaaagtaatgactgagagcattgatgtacttattttgtcagtttgtaacaggaaagtgggggggagtctaagtcttcatagtctaatgtccaagtgggttgcactagatgtagacacttggaggcttacttttcatggtaatgtccatttcctatttataacccctctgggaacgtttgtctaaaggaaatgtttctgttcagtgtaacaattacagttgcacctggattgcccagtcctgcccctgcactaggggaccattaatcactgcaaagtagaagaattattaagttaaaccagagtttgagccaagaaaacccctgaacaatgttcatcttctgtgaaacttgctcaaatagttaagcttaaccatgttgctgccaaagacttttcctatgcagtggtggggcaccttgatcatcatcattatcttgattggctgaaaaaaaaatagttttaagcacacaccactgtctatgagaactgcaaattgggagaataggtgaaatgcagaatctgagagaacgcgagaagatgagatcattacagggtggaaagttctgcagcagccttttctggtaatccctttctgcagaacctgatgtttatgggctctaaaacgcagcttagctttagaagcaacagaaagcatgaaatagggtgtccattttaaatgtgttcctgcaacttttttcattaaaactttgagggcccaattttaatttgtggaatattcccgttaataatgagatctaattaagacatccattaaaagcccgttaaagttaatttaacgtaaaaattccaatagaactgtattagattttctccattaaattaacgttatggatttttaacggatgtcttaattatacgttattattaacgggaatactgtattacacagattaaaatcaggtcctaagtcaacttggaagagctaagagcatgttttaatattaaaagtcttgcatacctagtgcacagtttggagacgcaaggatagatctgtttactctagttgaacattttctatacaattgaaagcaacctataatagataaatccatcattgcatttaaacaatgaatttccttattctcaaaggacaaatacgtctggattatgtggtaaattgctactcagctatggtgaaatatttatactattctaggcacaacactaggaactaggtgattctgaaacaaaaggaatattttctgttgttgctttaattaccaaggttatttttttttaatctcaacactgacaaaatgaaaccaaatatctcttcctcaccatttctcaaggaggctgcctgttggaattgttttggaaattttgacatgatccctaaattcaacattgggattaaaaaaaaaaaaaaacttcttatttacctcctagggaaagtgttgcccttatgccacatataatagcaaattgctttttttatggcatgcataacctagatgggaaaaaatatggcgcttcggggaaggagggaaaaagtaaatgaagttccaggaatgtcattctgaagtaatgaggcatggacagaaaatatacccctcacatcatcggattgagatggcagtcgaaatagcttcattgaagtgtcagcactcatccatcaatcaatcacccacaaggaaaaatagcaacagtacaacggggtggcttttatgggatttactcatgggcatagggaatagcggctcaaatgtagttctgacatgaaaagcaaggtgctgatattattttttatgatgggaggatcataaagtgaattgagaacagtgaggtctgtctttgcttaacctattcaaccagaaatgaatggagctcgactggaaaggaacagtcttcagatgggttaagattgaagggtggactggactctactgagcaccgtccttcaacaaggaaattctattaaaggaaaatcaatgcattagtattggggttctcgtagctgttaaaaattgtctgctccaatccagggttattaggccaaagttacataattcagatctcactgcaaccatccaaaagtggattctcgagcccttgctccaatggggggaggagatcaatacaattcccaattccatggaaattgtttcccttctaaggaagaaaaaataaatcatctgcttcaacatataatcgatatggttttgttagcgtaatttctatggtgggtggggtgggaggtgagagaaaaaaatattgataaatttggtaagacaggtgaattgccgcctggcaaccgtgcatgtcactgccgagggatggctgctaaggttcaccttagaaaacaagatctgggctggcactggggcatacatcaccactcagcatattcctagaggccaggcctgtcttcactcagccagccctctgaggcttctagaaacttctttctggaggaaaaaaactaaataacataaactcaggagaatgtctttacccaccttcataccactgctttctttttgctgaataaaacacagttctgataagtaagaactttagaattggaaaggaggctgacatgcaaatataatgcaaattaccctcaagtatcgccattcttccaccacctcttggtaccagtgagagcgagagattgccttttcttccccatccctccttccagctaagaccaccaaccagctgcaaattgagatgtccatttaaaaatttatatgtcaatatttaaatgttacatatttggccctattttgtagttcagcaaatcctccaaatacacagcatgttacaaggcactggtggcacagggcacaacaggaaatgatatttatttagcaaattcatttaacaaatattattgggcacctgttatgtgagacactgtcctaggcactgtgggataacaacagcaaacacttcacacaacagcctggccttcctgtgttttacaacagctcctaaagatagctgatatcaagacatttgagggacacagttcatgtagaatcaaaatattagtatttcagaataaggattttttttctgaaaagcatacagagaggaaacagcttaaaaataggtcaagacctaaaaacagaatataatcacggaataaactggataacccagacagtccccacagaatttctttcaggtcacagatttcttaaaactcacccccaaaatgtgcctgcttggttgtttgaatcttgcataattaatgtcacaggcgcaagccgctgaacttagttgagatgcagaaaacaaacaaatgcaatgacatatctgagaagcatttatgtaactccggttaagtggtgaggaggggtgtgtgaagacagtgtgcatgcatgagtgtgtattcatatatatgtgtatacatatgaatttcactgttattttccagggtctatggacaatgtggcagtaagagtctatgatgttctgaaacttttcacagtaaatccaaagattacagaccttacaaggtgcttgcattctgttgcttttccatctgtcacttctcaggttatttgactgtgttcaaaccttcttttctttttcattgagtttcattttttaagcttgttaaatgcttttgtttaaaaaaaaaaaaaaaaccccaaatgtcatttttcacattatcctctcttctctgcaacaaggatagtaagatgtagatgaatgcaaaaataataacaacaataaggaaatatattaaagctttaaaatatgcacatatgtagttctaaagagcaataacggtagtatctatttcgaacatgcattaggcaaaaaagaaatcaaaactgaaattttcgtgtatttttccccttgtaagatgttcaaatgctaacttcattttctcctttcctctatgtggcactttctcaaaatatctatgaaatacttttagacaaagattgagctggagaaagagatacaaatttccatccccccagacagagagacatatttccattgtaggaaggcattaaacattttgaaacttgtgaatcatctttagaatttctactggggaattttacttcttcatccaaagtaaaagccacttatctcctttggttcccagtgacagattcagaggcatacgcagatatacaattttcaggctctagttaatcttcttccaatagttacgaacaatgggctaacaggcgtgggtgtttctccaaaaattattcatgcacaaggcagcccaaagcttcagggaaaactagaaatgtgttatggattagaataggactgttttaaaatgctagtaccaggtggaacgctatttctgcaacaggactctgtccatttcctttggaacaatatattccaagtaaaatggctcttccaaggaatgacacctttacttgacacccttcggcatacaaatgattttaccaatagccatgattattattaaggccttttaaaatacaggctgtttgaaaaaagacagattaaatattcacagcctttgtatcatggttatttgcttaaaacagcttttagaagtacaagtaataactttttgataagaaaccccaggagaaactttttggtaagaaacctcaaaaaatttgaacaaaggcattacaaaaaaaaaaaaaaaactaaccactccattcaactctctcagaaaataaatttcaatgtgttcaatgaattgtcttgaacctgaaacctgcatttagatatcagtcccctgccaatagctaatattaacagaatttgaacaatcatacaattatgtctcaaatgtgaagactttgtacagtaatattttcactttctaaatgacccatataacattcaggaattatagatgtgtatgtatattttttaagtacagaaagttcagccagtcttcagagaagtaaaagtgatgtctattgtgcattgaagtaaatattacaaacattccagtttcgcaatacaatacttgagctttcgaacacctcagacactagaatgtgtaatgcgagtcaaaaaagctgacatacaaaacaattcccatttggctcagggttcctaaatgtcacaatatcttgggtaaaatatactttttgatttcctgatgatgtccttctaatcccttctgactttgattcctaacagccaggcactgttgacatgaatcattaacttccaaacccctttaaaatcaagaagctaggtgatcatacagtcatttcaatggccaaccagttcttgctctacagagcttttacacctttttgggaaacctgatatcaaacacatttatgttatatatttgctcccttgcattaattctagatttttttttaatttcttttagaaagggcaggggggaagtgggtcagagcaaggttcaagaatcacattcatccttgctctaaagtgtttacttgccagcaaagaaaggcaaacacatttttatattcagaaagcagaccggtcattttcaaagaaaaatgactgcaaccatgcctgtagaatgtttctgtgcaagcgcactaattttctatcacctgcatgctgtatataatacatttgcctgtatactaggaagaaaaaccaggctgttttccctgagtacaatgcagcttggatggctgggagcgtaagccttccgtgcatttttatagtgtacatatttgtatatactaactatatcgccatgtatgaacacagattttgttatatttgcttgtttctgtttcctaccaaactggcccacaatggggattcttttgtatagaaaaaatatgcttgtaattttttcctggtcattctctttcaatagcttatgaaagaattagatctgagtttacaaagaaactataagaaccaagtttgtctgtctgcatgagtcccgtccaattgctggatctagggaggaaccaacttcctaattcagagttttccttttaaaggcatgctttacccccatgggaaaactgcacactcatccatgtagaattattctctttgtattttatctaatagtgcctgaaaatttttttaatgtcttcttagaagaagaattcataattgtcaaaatttgaaacattagcttaattttgtttttatgacctcaagattcttctccttatttattcggttgctgttgtaatggggccccaggccattcctgacatcggcgtgttcttcttctgcattaaggatgtttttgaaattacagagattattgagccaacaggctgttttaatcaaaaccatgtttcacttctttttgatgattataaattgtccttgcaatgaaaaaaaaaaaagaacttttctgctaggaagattataccaccctgtggccaaacagattcatcacagataggcatctatgcccatttctctgggatctggaaaattcttcccttggctgaccccaatttcttttactccccattatcctgaatattagctttcaatgcagtcactatttgacatttccaaaggctttgccgcattgtcactgcccaaagacaaacaaccactggaaatgatggctttcctgcttgaaacgaagggggccaggtgcagtggctcaagcctgtaacccctgcactttggaaggctgaggcaggcggatcacttgaggtcaggagtttcagaccaacctggccaacatggcaaaacctcgtctctactaaaaatacaaaaaacattagcagggcatggtggtgcgtgcctgtagtcccagctacttgggaggctgaggcaagagaattgcttgagcccgggaggcgaaggttgcagtgagctgagatggtgccactgcactccagcctgggcaacagagcaagactgtgtctcaaaaaaaaaaaaaagaatggattttcagaaaaagtgctccctttcctgtcctgtggtgccaccatcctgtcctccttcgtaatcatgaacaatctgatcttgaactcccacataacttaaatcaggcaaaaagaaacattcacagcgtccccttgctgaataaaaatgactttgtttggaggcacttaagatgtatgcctgtgtgtggtgccgcagcattgaaattatctgtagaaggggaattttttttaaaaatacaattttatcactagaaataaattccgatggtggaaacgaagaaaacccttaaattatatcacaaaagccattattttttgcatccaaagagtttttttttttaaggaaaatcattctactttgagaactgtaattaaagccctaaataacagacactactttgttgagctattgtgaaaaaaaaacaacacattcgccaaggttatatggagcccctgatttccatcaaaaaggtttctataagtatattatttacatttttatacatgataactcttgcctttgtgttgaaaaaaaaaaagtctcttttttttcccccactcagcagttattggaaatagactgttcccatctgaaaccgtatcgtaatttgcatcaggaaacccaactgctgacattgaggacctgggtgtgttcaattatgattttgctggaggctgtccctcattttaatgctgcagctattgaaccaccttcctgaaacctagctgatacggaatagcagagacatgcctctcaacaccattagctttgcaaatggcttcatttcagtcaacgtcgacttctgctttggccaattgaaaaatgaaaattaaaggagagaagaaaaaaaacacagatgcacttaaaacatgaaaagaattatttatatgataaaaatatatttagcttttcaaagcacaagactgaatagaagtgctctttttatgctttctggagatgttactgttaaatgtctttctacatcaggcttaataaatctgtaatgacatttgatggattga

SEQ ID NO: 189933 - DNA, 980 bp, Homo sapiens
  Payload ID: 17504
  Gene Symbol: TSHZ2
  Gene Name: teashirt zinc finger homeobox 2
  ENST ID: ENST00000605656
  CDS Start-End: 1-585
agaaaaggccggcagtccaactggaatcctcagcatcttctgattctacaagcccagtttgcctcgagcctcttccagacatcagagggcaaatacctgctgtctgatctgggcccacaagagcgtatgcaaatctctaagtttacgggactctcaatgaccactatcagtcactggctggccaacgtcaagtaccagcttaggaaaacgggcgggacaaaatttctgaaaaacatggacaaaggccaccccatcttttattgcagtgactgtgcctcccagttcagaaccccttctacctacatcagtcacttagaatctcacctgggtttccaaatgaaggacatgacccgcttgtcagtggaccagcaaagcaaggtggagcaagagatctcccgggtatcgtcggctcagaggtctccagaaacaatagctgccgaagaggacacagactctaaattcaagtgtaagttgtgctgtcggacatttgtgagcaaacatgcggtaaaactccacctaagcaaaacgcacagcaagtcacccgaacaccattcacagtttgtaacagacgtggatgaagaatagctctgcaggacgaatgccttagtttccactttccagcctggatcccctcacactgaacccttcttcgttgcaccatcctgcttctgacattgaactcattgaactcctcctgacaccctggctctgagaagactgccaaaaaaaaaaaaaaaaaaaaatcaccccagccatttctcttcatcctcactaacaatttgggtctatggacaatgtggcagtaagagtctatgatgttctgaaacttttcacagtaaatccaaagattacagaccttacaaggtgcttgcattctgttgcttttccatctgtcacttctcaggttatttgactgtgttcaaaccttcttttctttttcattgagtttcattttttaagcttgttaaatgcttttgttt

SEQ ID NO: 189934 - DNA, 3803 bp, Homo sapiens
  Payload ID: 17504
  Gene Symbol: TSHZ2
  Gene Name: teashirt zinc finger homeobox 2
  Uniprot ID: Q9NRE2
  ENST ID: ENST00000603338
  CDS Start-End: 364-3459
atttatttttctagaacacacccgacatgtaggctctattgcaatacatctgaaaacacaaaatctgtttgctccaaaattggtgatagcctctgacttaagatgatggtggccaggcgaggtggttcaagcctgtgattccagcactttgggaggccgaggcaggcagatcagatcatgaggtcaggagttcaagaccagcctggccaacatggtgaaacctcaggaggctgaggcaggagaattccttgaactgggacccaggaggcagaggttgcagtgagctgagatcacgccactgcactccagctggggatacagagcaagactccatctcaaaaaaagaaaaaaaagaaagaaaagatgatggctgctgcgttgctccattatacaggctacgcccaggaggaacagctgaaagaagaggaggaaataaaagaagaggaggaggaggaggacagcggttcagtagctcaactgcagggtggcaatgacacagggacggacgaggagctagaaacgggcccagagcaaaaaggctgcttcagctaccagaactctccaggaagtcatttgtccaatcaggatgccgagaacgagtctctgctgagtgacgccagtgatcaggtgtcggacatcaagagtgtctgcggcagagatgcctcagacaagaaagcacacactcacgtcaggcttccaaacgaagcacacaattgcatggataaaatgaccgctgtctacgccaacatcctgtcggattcctactggtcaggcctgggccttggcttcaagctgtccaatagtgagaggaggaactgtgacacccgaaacggcagcaacaagagtgattttgattggcaccaagacgctctgtccaaaagcctgcagcagaacttgccttctcggtccgtctcgaaacccagcctgttcagctcggtgcagttgtaccgacagagcagcaagatgtgcgggactgtgttcacaggggccagcagattccgatgccgacagtgcagcgcggcctatgacaccctagtcgagctgactgtgcacatgaatgaaacgggccactatcaagatgacaaccgcaaaaaggacaagctcagacccacgagctattcaaagcccaggaaaagggctttccaggatatggacaaagaggatgctcaaaaggttctgaaatgtatgttttgtggcgactcctttgattccctccaagatttgagcgtccacatgattaaaacaaaacattaccaaaaagtgcctttgaaggagccagtcccaaccatttcctcgaaaatggtcaccccggctaagaaacgcgtttttgatgtcaatcggccgtgttcccccgattcaaccacaggatcttttgcagattctttttcttctcagaagaacgccaacttgcagttgtcctccaacaaccgctatggctaccaaaatggagccagctacacctggcagtttgaggcctgcaagtcccagatcttaaagtgcatggagtgtgggagctcccatgacaccttgcagcagctcaccacccacatgatggtcacaggtcactttctcaaggtcaccagctctgcctccaagaaagggaagcagctggtattagacccgttagcagtggagaaaatgcagtcgttgtctgaggccccaaacagtgattctctggctcccaagccatccagtaactcagcatcagattgtacagcctctacaactgagttaaagaaagagagtaaaaaagaaaggccagaggaaaccagcaaggatgagaaagtcgtgaaaagcgaggactatgaagatcctctacaaaaacctttagaccctacaatcaaatatcaatacctaagggaggaagacttggaagatggctcaaagggtggaggggacattttgaaatctttggaaaatactgtcaccacagccatcaacaaagcccaaaacggggcccccagctggagtgcctaccccagcatccacgcagcctaccagctgtctgagggcaccaagccgcctttgcctatgggatcccaggtactgcagatccggcctaatctcaccaacaagctgaggcccattgcaccaaagtggaaagtgatgccactggtttctatgcccacacacctggccccttacactcaagtcaagaaagagtcagaagacaaagatgaagcggtgaaggagtgtgggaaagaaagtccccacgaagaggcctcatctttcagccacagtgagggcgattctttccgcaaaagtgaaacacctccagaagccaaaaagaccgagctgggtcccctgaaggaggaggagaagctgatgaaagagggcagcgagaaggagaaaccccagcccctggagcccacatctgctctgagcaatgggtgcgccctcgccaaccacgccccggccctgccatgcatcaacccactcagcgccctgcagtccgtcctgaacaatcacttgggcaaagccacggagcccttgcgctcaccttcctgctccagcccaagttcaagcacaatttccatgttccacaagtcgaatctcaatgtcatggacaagccggtcttgagtcctgcctccacaaggtcagccagcgtgtccaggcgctacctgtttgagaacagcgatcagcccattgacctgaccaagtccaaaagcaagaaagccgagtcctcgcaagcacaatcttgtatgtccccacctcagaagcacgctctgtctgacatcgccgacatggtcaaagtcctccccaaagccaccaccccaaagccagcctcctcctccagggtcccccccatgaagctggaaatggatgtcaggcgctttgaggatgtctccagtgaagtctcaactttgcataaaagaaaaggccggcagtccaactggaatcctcagcatcttctgattctacaagcccagtttgcctcgagcctcttccagacatcagagggcaaatacctgctgtctgatctgggcccacaagagcgtatgcaaatctctaagtttacgggactctcaatgaccactatcagtcactggctggccaacgtcaagtaccagcttaggaaaacgggcgggacaaaatttctgaaaaacatggacaaaggccaccccatcttttattgcagtgactgtgcctcccagttcagaaccccttctacctacatcagtcacttagaatctcacctgggtttccaaatgaaggacatgacccgcttgtcagtggaccagcaaagcaaggtggagcaagagatctcccgggtatcgtcggctcagaggtctccagaaacaatagctgccgaagaggacacagactctaaattcaagtgtaagttgtgctgtcggacatttgtgagcaaacatgcggtaaaactccacctaagcaaaacgcacagcaagtcacccgaacaccattcacagtttgtaacagacgtggatgaagaatagctctgcaggacgaatgccttagtttccactttccagcctggatcccctcacactgaacccttcttcgttgcaccatcctgcttctgacattgaactcattgaactcctcctgacaccctggctctgagaagactgccaaaaaaaaaaaaaaaaaaaaatcaccccagccatttctcttcatcctcactaacaatttggtaatgaagtattgatttccacttctctgcttatgggcggtattagattttcattgataaattgcaatggggctgtctcgtctccacagtacccttttcactgtcacaagaaaacaaagtgccaccgaagaaaagtaatgactgaga

SEQ ID NO: 189935 - DNA, 670 bp, Homo sapiens
  Payload ID: 17504
  Gene Symbol: TSHZ2
  Gene Name: teashirt zinc finger homeobox 2
  ENST ID: ENST00000626626
  CDS Start-End: 23-247
cggggaaggagggaaaaagtaaatgaagttccaggaatgtcattctgaagtaatgaggcatggacagaaaatatacccctcacatcatcggattgagatggcagtcgaaatagcttcattgaagtgtcagcactcatccatcaatcaatcacccacaaggaaaaatagcaacagtacaacggggtggcttttatgggatttactcatgggcatagggaatagcggctcaaatgtagttctgacatgaaaagcaaggtgctgatattattttttatgatgggaggatcataaagtgaattgagaacagtgaggtctgtctttgcttaacctattcaaccagaaatgaatggagctcgactggaaaggaacagtcttcagatgggttaagattgaagggtggactggactctactgagcaccgtccttcaacaaggaaattctattaaaggaaaatcaatgcattagtattggggttctcgtagctgttaaaaattgtctgctccaatccagggttattaggccaaagttacataattcagatctcactgcaaccatccaaaagtggattctcgagcccttgctccaatggggggaggagatcaatacaattcccaattccatggaaattgtttcccttctaaggaagaaaaaataaatcatctgcttcaac

SEQ ID NO: 189936 - DNA, 5176 bp, Homo sapiens
  Payload ID: 17505
  Gene Symbol: TSHZ3
  Gene Name: teashirt zinc finger homeobox 3
  Uniprot ID: Q63HK5
  ENST ID: ENST00000240587
  CDS Start-End: 329-3574
cttcccattccgccggcagcgcggtcctcctcctcctcctccacctcctcctcctctgcctcctcctcccccccgtgctcctccctccccgagcctccctcgcccgccctccttcttccctccgcacgttcggggttcgcggcggagcgcggcgcgggggggacgcggagagcctgggcgcagcagcatcctgcgggcggccgctctccgggggggaggctgagagcaggcccgcctcgcccccccgcgggcccgccgccccctccctccctgtcctcagcccggcagcggcggcggcggcggcagtggcagtcgccggagaagcatcatgccgaggaggaagcagcaggcgccccggcgcgcagcagcctatgtttccgaagagttaaaggctgctgccctggtggacgaaggtttagacccagaggagcatacggcagatggagagccctcggccaagtacatgtgcccggagaaggagctcgccagggcctgccccagctaccagaactccccggccgccgagttttcctgccatgaaatggacagcgagtcacacatcagtgagaccagtgaccgaatggctgactttgaaagcggctccatcaagaacgaagaggagaccaaggaggtcacggtcccactggaagacacgactgtgtcggatagcctggagcagatgaaggccgtgtacaacaacttcctctccaactcctactggtccaacctcaacctcaacctgcaccagccctcctcggagaagaacaacggcagcagcagcagcagcagtagcagcagcagcagctgtggcagcgggagcttcgactggcaccagagcgccatggctaagacgctgcagcaggtgtcacagagccgcatgctcccggagcccagcctcttcagcaccgtgcagctgtaccggcagagcagcaagctctatggctccatcttcacgggggccagcaagttccgctgtaaggactgcagcgctgcctacgacaccctggtggagttgacggtgcacatgaacgagacggggcattaccgcgacgacaaccatgagaccgataacaacaaccccaagcgctggtccaagcctcgcaaacgctccttgctggaaatggaagggaaggaagacgcccagaaggtgctgaagtgcatgtactgtggccactcctttgagtccctgcaggatttgagtgtccatatgatcaaaacaaaacactaccaaaaagtgcctctgaaggaacccgtcactcctgtcgccgccaaaatcatccctgccactcggaagaaagcttccctggagctggagctccccagctccccagattccacaggtggaacccccaaagccaccatctcagacaccaacgatgcacttcagaagaactccaacccttacatcacgccaaataatcggtacggccaccagaatggggccagctatgcatggcactttgaggcccggaagtcgcagatcctgaagtgcatggagtgtgggagctcgcatgacaccctgcaggagctcactgcccacatgatggtcactggccacttcatcaaggtcaccaactctgctatgaaaaaggggaagcccattgtggagacgcctgtcacacctaccatcacaaccctgctggatgagaaggtccagtccgtgcccctggcagccaccaccttcacgtccccctccaatacacctgccagcatctccccaaaactgaatgtggaggtcaagaaggaagtcgacaaggagaaagcggtcactgacgagaaacctaagcaaaaagacaagcctggcgaagaagaggagaagtgtgacatctcttccaaataccattacttgactgaaaatgacttagaagagagtcccaagggggggcttgatatcctcaaatccttggaaaacacagtgacatccgcaatcaacaaggcccagaacggcactcctagctgggggggctatcccagcatccatgccgcctaccaacttcccaacatgatgaagttgtccctgggctcgtcggggaagagcacgcccctgaaacccatgtttggcaacagtgagattgtctccccgacgaaaaaccagaccctggtctctccacccagcagccagacgtcccccatgcccaagacaaactttcatgccatggaggagctggtgaaaaaggtcactgagaaagttgccaaagtggaggagaagatgaaggagccggatgggaagctttccccgcccaagcgggccactccctccccatgtagcagcgaagtcggggaacccatcaagatggaggcatccagcgatgggggcttccgcagccaggagaacagccccagccccccgcgggatgggtgcaaggatgggagccccctcgctgagccggtggagaatggcaaggagctggtgaagcccctagccagcagtttgagtggcagcacggccatcatcaccgaccacccgcctgaacagccttttgttaaccctttgagcgccctgcagtcagtcatgaacattcacctgggcaaggccgccaagccctccctgcctgccctggaccccatgagcatgcttttcaagatgagcaacagcctggcggagaaggctgctgtggccaccccgccgcccctgcagtccaagaaggcagaccacctcgaccgctatttctaccacgtcaacaacgaccagcccatagacttgacaaaagggaagagtgacaaaggctgctccttgggttcagtgcttctgtcacccacgtccacagccccggcaacctcctcatccacggtgacaacggcaaagacatctgccgtcgtatcattcatgtcaaactcgccgctacgcgagaatgccttgtcagatatatccgatatgctgaagaacttgacagagagccacacgtcaaaatcctccactccttccagcatctccgagaagtctgacattgacggggccactctggaggaggctgaggagtcgacgcccgcccagaagaggaagggccgccagtcaaactggaacccccagcacctcctgatcctccaggcccagtttgccgccagcctccggcagacctcagaagggaagtacatcatgtcagacctgagcccccaggagcggatgcatatctccaggttcaccgggctgtccatgaccaccatcagccactggctggccaacgtgaaataccagcttcgaaggacaggtggaacaaagttcctcaaaaacttggacactggccaccccgtcttcttttgtaacgattgtgcgtcccaaatcaggactccttccacgtacatcagtcacctagagtcacacttaggcttccggctacgggacttatccaaactgtccaccgaacagattaacagtcagatagcacaaaccaagtcaccgtcagaaaaaatggtgacgtcctcccccgaggaagacctggggacttcctatcagtgcaaactttgcaatcggacctttgccagcaagcacgctgttaaacttcaccttagcaaaacacacgggaaatctccggaagaccaccttctgtatgtctctgagttagagaagcagtagcatttgcttttgatagaaaggactgcagtttgctttgagggaaactgtggaaggcaccttcaggccccctctgacttgttgttcttggcacatgttcttattttaactgcagagaatcactctgggctggactgttttgtataactgtacagtgtttaatagaggtgcataatcagctgttgttactggtaaaatatgaaggttaaaatgcagtggtaagtgtttggaactttgtgtaaacgggatttagttgtgagcatcctcccgatgcttcaagctgcatgcattaacagacagtttaattaagcatttataacggaatcaggcacaccttttccacgagactcgagtgtgctggcatttctcaccctttcatctttagccctctgagtactttgaagcacttttgcattaatttggttaaaaaataaaataaaataataataatgtatgaagctctgttttttaaactccttaccagcttagttataatgaataatatgaacctccatttatgcaggtctgcaggggtataacacgccttgaaatttaaaagaatattattttcacattgaaacatagatgtatatattgtatagatttcagactctcttatgaaaaaaaatgtgattgtggttaaatgacctttttcttgcatttatagcaacagtgttttatgcacctgctatgctctgggcataagctgtgcctatgtatagtgtatatttctttttttcttttttttaaggtctatgggttttgttttttacatgcaaacattgtaaattatacagaagataccacagatagcatttataaagtatacagaaacattatctgaaagcaaagtatgatagtttgttttgctatacagtacatctatattgatagaggttcatgtttaaattatacatatttattagcatcatattgtcatttgttttgagcagtctgaataaacgagaccgggaaagacatccctggcaggcatcagaactattttgcacatgatttttaaaggtatttattagaaatcaaagaacactcaaaataaactcagtgctcaaagggttaagtctatttgaaaaggttaaaaaaaagaacaaaaaaaaaaaaagaacttgtactgtatttcctaaacattgataaagcctttaaaatgtttgtactgtaatactttgcttaaaagtcatgaggcattctgtgatccaacctctttcacttatttataagccctcttggttgctattccatattgtaggatgcctttctatttcaattggtaactttctgttttgttcttcctaattattctcccaagatcccacactgcagctttatctttaggcttatgaaaggtaacccgtggttaccggctctccaagtgattctgttcttctccatttttggcagttaatttgcagaagtaactgacagctgacaccatatgagaacctttgtataaaatattggcatgtaaacagcacagacaccgtaacacactctgtgccctgtttggttgttgacaatgaagcaccattatgtgactcttcatataacccttttttctacggcagcattaaaattgtctttttgctataa

SEQ ID NO: 189937 - DNA, 441 bp, Homo sapiens
  Payload ID: 17505
  Gene Symbol: TSHZ3
  Gene Name: teashirt zinc finger homeobox 3
  ENST ID: ENST00000558569
  CDS Start-End: 37-138
ggcggcggcggcagtggcagtcgccggagaagcatcatgccgaggaggaagcagcaggcgccccggcgcgcagcagacaagagcatcaattgggtggaggttctcagcacgtggtgggtggagaacgtgctgccctagtctcttcacactacccctgtgtacctgtggagcctaaaacacctgggaaggaagcaaaccccagagctccgaaacctccatttccaaaaaggatcgagagccagtctcctagaaatggagcccttagtggtggtccacgctggagacgatgacaaacaattggacccttgtgtccccaagctgtgggctccctggcgatgacaccggagctgtctctattttgcctgtcgggggaatgttccagcgcattttcccttattatgacttgattaaggacacaataaacccttgccatgattttta

SEQ ID NO: 189938 - DNA, 3687 bp, Homo sapiens
  Payload ID: 17506
  Gene Symbol: TEC
  Gene Name: tec protein tyrosine kinase
  Uniprot ID: P42680
  ENST ID: ENST00000381501
  CDS Start-End: 159-2054
gggcggggcggggcgctttgctctggactctggggcgctaggctccggactccgcggcgcagactgcacctcgcagtctccccaggtccgcccagcagccgcgcttcagccagaatactgggatcttcagtggcaggaggagtaatcagaagacggagatgaattttaacactattttggaggagattcttattaaaaggtcacagcagaaaaagaagacatcgcccttaaactacaaagagagactttttgtacttacaaagtccatgctaacctactatgagggtcgagcagagaagaaatacagaaaggggtttattgatgtttcaaaaatcaagtgtgtggaaatagtgaagaatgatgatggtgtcattccctgtcaaaataagtatccatttcaggttgttcatgatgctaacacactttacatttttgcacctagtccacaaagcagggacctgtgggtgaagaagttaaaagaagaaataaagaacaacaataatattatgattaaatatcatcctaaattctggacagatggaagttatcagtgttgtagacaaactgaaaaattagcacccggatgtgaaaaatacaatctttttgagagcagtataagaaaagcactacctccagcaccagaaacaaagaagcgaaggcctcccccaccaattccactagaagaagaagataatagtgaagaaatcgttgtagccatgtatgatttccaagcagcagaaggacatgatctcagattagagagaggccaagagtatctcattttagaaaagaatgatgttcattggtggagagcaagagataaatatgggaatgaaggatatatcccaagtaattacgtaacgggaaagaaatcaaacaacttagatcaatatgaatggtattgcagaaatatgaatagaagcaaggcagagcaactcctccgcagtgaagataaagaaggtggttttatggtaagggattccagtcaaccaggcttgtacacagtctccctttataccaagtttggaggagaaggttcatcgggttttaggcattatcatataaaggaaacaacaacatctccaaagaagtattacctagctgaaaaacatgcttttggctccattcctgagattattgaatatcataagcacaatgcagcaggacttgtcaccaggcttcggtacccagttagtgtgaaagggaagaatgcacccaccactgcaggattcagctatgagaaatgggagattaacccttcagaactgacctttatgagggaattgggaagtggactgtttggagtggtgaggcttggcaaatggcgagcccagtacaaagtcgcaatcaaagctattcgggaaggtgcaatgtgcgaggaggactttatagaagaagctaaagtgatgatgaaactgacacacccgaagttagtgcagctttatggtgtgtgcacccagcagaaaccaatatacattgttactgagttcatggaaaggggctgccttctgaatttcctccgacagagacaaggtcatttcagtagagacgtactgctgagcatgtgtcaggatgtgtgtgaagggatggagtatctggagagaaacagcttcatccacagagatctggctgccagaaattgtctagtaagtgaggcgggagttgtaaaagtatctgattttggaatggccaggtatgttctggatgatcagtacacaagttcttctggtgctaagtttcctgtgaagtggtgtccacctgaagtgtttaattacagccgcttcagcagcaaatcagatgtctggtcatttggtgttttaatgtgggaagtattcacggaaggcagaatgccttttgaaaaatacaccaattatgaagtggtaaccatggttactcgaggccaccgactctaccagccgaagttggcgtccaactatgtgtatgaggtgatgctgagatgttggcaggagaaaccagagggaaggccttctttcgaagatctgctgcgcacaatagatgaactagttgaatgtgaagaaacttttggaagataagtgatgtgtgaccagtggctcccagattcccaagcacaaggaaggatgggcattttgtggcttttaatttattgagcacttggacatgtagatcattttacttatacagtggaaacacataaataatttgcttctagaccagcctctgtctagacttgcttctagacagaatctcccagagtgtggaaatgttgccttagaaatggtgattaaaatcactcatttctattcattcctcaggcacttgagtgacagttgtttaccaggcactgtgtgtagccccagggtttggccattcaggggtgcacacatgggaccatgttagctgatgccagttgaaggccagggtatttgggaaggggaagggtattagagtcatgaccaagcaacccttctttttccctttgacttctacagaaatctgggcctgagacattgtctacaattgggttctagatacatcaggaacccatcttggataaataaatacctatcttttgttttgaaaacatctcagttttcaagactgctcttagtattacatgaacaatatttgtatgctgtatatattgtaaatatatataatatataaagttatatatttatgagaaacacgaattgtcttttaattgaaacttttaatcctgtagtataggagttcaccttcttaggactagagactgtgccttatagctgttaattcatttccccctgaacatcaaatatgcctgaagagaagaaagtctagattcttctatgagtaacgccccctcctcactcaggtaaatgtgtctggggatgcctgtccagcttaaccacgtgcatttggcctatgtaatcctgcccatggtggccgcagctaatcagaatcagatggaaaattaaaccgggtaatctacttctaagccttaagaatattccctgggacacagacactataattggaagtgctgagctctggggcagaaggatcaggtgaccttcgcaacaaagtttgcccccacctcacataggacccggaagcagcctgagctgtggcggaggatccaggaagctacggagagaagcagccagcatggtgttccgtgcctcccggacgtttttcaggaggcctggttggacttgggttcctggatggtgggattgttgtacagcctctcaggagaccctgctgtcaagactgtgtgtgtggatttctcacccttagaagctctactaagacatcaacggaattagggccttcctttttgccttgtgagcgccaaggaaaagaaactatctcggtcacgtgagcgccagcgaaaagaaactgtatcagtcatccagagaccgtttattgcccaacacgttattcttgctgttggtggggtaactagccgaggaagacacagcgccttcccttcaggagttgcgtctcctctgcaggccacgatggtctgctctggagcattgggtgaacacacaggctggctgctctgggcagcgccttcactctgaccctggagaaccatttcatttcatcctggtcagtctagagtctgtgcaccaggcagtccatccactgaaggctgtgtttattcttttcctgtgcccctcataatggaagaaagtaaactgcttatcccgagcctta

SEQ ID NO: 189939 - DNA, 681 bp, Homo sapiens
  Payload ID: 17506
  Gene Symbol: TEC
  Gene Name: tec protein tyrosine kinase
  ENST ID: ENST00000515146
  CDS Start-End: 113-268
aggacttgtcaccaggcttcggtacccagttagtgtgaaagggaagaatgcacccaccactgcaggattcagctatgagaaatgggagattaacccttcagaactgacctttatgagggaattgggaagtggactgtttggagtggtgaggcttggcaaatggcgagcccagtacaaagtcgcaatcaaagctattcgggaaggtgcaatgtgcgaggaggactttatagaagaagctaaagtgatgatgctgccagaaattgtctagtaagtgaggcgggagttgtaaaagtatctgattttggaatggccaggtatgttctggatgatcagtacacaagttcttctggtgctaagtttcctgtgaagtggtgtccacctgaagtgtttaattacagccgcttcagcagcaaatcagatgtctggtcatttggtgttttaatgtgggaagtattcacggaaggcagaatgccttttgaaaaatacaccaattatgaagtggtaaccatggttactcgaggccaccgactctaccagccgaagttggcgtccaactatgtgtatgaggtgatgctgagatgttggcaggagaaaccagagggaaggccttctttcgaagatctgctgcgcacaatagatgaactagttgaatgtgaagaaacttttggaagataagtgatg

SEQ ID NO: 189940 - DNA, 2446 bp, Homo sapiens
  Payload ID: 17506
  Gene Symbol: TEC
  Gene Name: tec protein tyrosine kinase
  ENST ID: ENST00000505452
  CDS Start-End: 46-348
aatactgggatcttcagtggcaggaggagtaatcagaagacggagatgaattttaacactattttggaggagattcttattaaaaggtcacagcagaaaaagaagacatcgcccttaaactacaaagagagactttttgtacttacaaagtccatgctaacctactatgagggtcgagcagagaagaaatacagaaaggggtttattgatgtttcaaaaatcaagtgtgtggaaatagtgaagaatgatgatggtgtcattccctgtcaaaataagtatccatttcagtccacaaagcagggacctgtgggtgaagaagttaaaagaagaaataaagaacaacaataatattatgattaaatatcatcctaaattctggacagatggaagttatcagtgttgtagacaaactgaaaaattagcacccggatgtgaaaaatacaatctttttgagagcagtataagaaaagcactacctccagcaccagaaacaaagaagcgaaggcctcccccaccaattccactagaagaagaagataatagtgaagaaatcgttgtagccatgtatgatttccaagcagcagaaggacatgatctcagattagagagaggccaagagtatctcattttagaaaagaatgatgttcattggtggagagcaagagataaatatggatggtattgcagaaatatgaatagaagcaaggcagagcaactcctccgcagtgaagataaagaaggtggttttatggtaagggattccagtcaaccaggcttgtacacagtctccctttataccaagtttggaggagaaggttcatcgggttttaggcattatcatataaaggaaacaacaacatctccaaagaagtattacctagctgaaaaacatgcttttggctccattcctgagattattgaatatcataagcacaatgcagcaggacttgtcaccaggcttcggtacccagttagtgtgaaagggaagaatgcacccaccactgcaggattcagctatgagaaatgggagattaacccttcagaactgacctttatgagggaattgggaagtggactgtttggagtggtgaggcttggcaaatggcgagcccagtacaaagtcgcaatcaaagctattcgggaaggtgcaatgtgcgaggaggactttatagaagaagctaaagtgatgatgaaactgacacacccgaagttagtgcagctttatggtgtgtgcacccagcagaaaccaatatacattgttactgagttcatggaaaggggctgccttctgaatttcctccgacagagacaaggtcatttcagtagagacgtactgctgagcatgtgtcaggatgtgtgtgaagggatggagtatctggagagaaacagcttcatccacagagatctggctgccagaaattgtctagtaagtgaggcgggagttgtaaaagtatctgattttggaatggccaggtatgttctggatgatcagtacacaagttcttctggtgctaagtttcctgtgaagtggtgtccacctgaagtgtttaattacagccgcttcagcagcaaatcagatgtctggtcatttggtgttttaatgtgggaagtattcacggaaggcagaatgccttttgaaaaatacaccaattatgaagtggtaaccatggttactcgaggccaccgactctaccagccgaagttggcgtccaactatgtgtatgaggtgatgctgagatgttggcaggagaaaccagagggaaggccttctttcgaagatctgctgcgcacaatagatgaactagttgaatgtgaagaaacttttggaagataagtgatgtgtgaccagtggctcccagattcccaagcacaaggaaggatgggcattttgtggcttttaatttattgagcacttggacatgtagatcattttacttatacagtggaaacacataaataatttgcttctagaccagcctctgtctagacttgcttctagacagaatctcccagagtgtggaaatgttgccttagaaatggtgattaaaatcactcatttctattcattcctcaggcacttgagtgacagttgtttaccaggcactgtgtgtagccccagggtttggccattcaggggtgcacacatgggaccatgttagctgatgccagttgaaggccagggtatttgggaaggggaagggtattagagtcatgaccaagcaacccttctttttccctttgacttctacagaaatctgggcctgagacattgtctacaattgggttctagatacatcaggaacccatcttggataaataaatacctatcttttgttttgaaaacatctcagttttcaagactgctcttagtattacatgaacaatatttgtatgctgtatatattgtaaatatatataatatataaagttatatatttatgagaaa

SEQ ID NO: 189941 - DNA, 1539 bp, Homo sapiens
  Payload ID: 17507
  Gene Symbol: TCTN1
  Gene Name: tectonic family member 1
  ENST ID: ENST00000377654
  CDS Start-End: 1-1452
atgatcacagctcactgcagcctcgacctcctaggctcagttgctgttctctgtgtctgtgacttatccccagcacagtgtgacatcaactgctgctgtgatcccgactgcagctccgtggatttcagtgtcttttctgcctgctcagttccagttgtcacgggcgacagccagttttgtagtcaaaaagcagtcatctattcattgaattttacagcaaacccacctcaaagagtatttgaacttgttgaccagattaatccatctattttctgcattcatattacaaactataaacctgcattatcctttattaatccagaagtacctgatgaaaacaattttgatacattgatgaaaacatctgatggttttacattgaatgctgaatcatatgtttccttcacaaccaaactggatattcctactgctgctaaatatgagtatggggttcctctgcagacttcagattcgtttctgagatttccttcgtccctgacatcatctctgtgcactgataataaccctgcagcgtttctggtgaaccaggctgttaagtgcaccagaaaaataaatttagaacagtgtgaagaaattgaagccctcagcatggctttttacagcagcccggaaattctgagggtacctgattcaagaaaaaaggtccctatcactgttcagtccatcgtcattcagtctctaaataaaacgctcacccgacgggaggacactgatgtgctgcagccgactctcgtcaacgctggacactttagcctttgcgtgaatgttgttcttgaggtaaagtacagcctcacatacacagatgcaggtgaagtcaccaaagctgatctctcattcgttctggggacagttagcagcgtagtggtcccactgcagcaaaagtttgaaattcattttcttcaggaaaatacccagccagtccctctcagtggaaaccctggttatgtcgtggggctcccattagctgctggattccagcctcataagactggagctctcccgtgtcagctcgtagcacagaaggtgaagagcctgctgtggggccagggcttcccagattacgtggccccttttggaaattcccaggcccaggacatgctggactgggtgcccatccacttcatcacccagtcattcaacaggaagcattttgttttgcaggattcctgccagctcccaggggctttggttatagaagtgaagtggactaaatacggatccctgctgaatccacaggccaaaatagtcaatgtaactgcaaatctaatttcatcctcctttcctgaggccaactcaggaaatgaaaggacgattcttatttccactgcggttacttttgtggatgtgtctgcacctgcagaggcaggcttcagagctccaccagccatcaatgccaggctgccctttaacttcttcttcccgtttgtttgacaatgctcagatgcatcagttccttaatatacacgtgaaatttgaaaactgtacattcggtgagattaaattttatatacaactagc

SEQ ID NO: 189942 - DNA, 1879 bp, Homo sapiens
  Payload ID: 17507
  Gene Symbol: TCTN1
  Gene Name: tectonic family member 1
  Uniprot ID: Q2MV58
  ENST ID: ENST00000397655
  CDS Start-End: 71-1792
gcgcctggctgtcgcggttgccgggcaacgcgctgtccatgtcgcgggcctcgctgggactccctgggagatgaggccgcgaggtctcccgccgctcctggtggtgctcctgggctgctgggcctccgtgagcgcccagaccgatgccaccccggcggtgacgacagagggcctcaactccaccgaggcagccctggccaccttcggaactttcccgtcgaccaggccccccgggactcccagggctccagggccctcctccggccccaggcctaccccagtcacggacgttgctgttctctgtgtctgtgacttatccccagcacagtgtgacatcaactgctgctgtgatcccgactgcagctccgtggatttcagtgtcttttctgcctgctcagttccagttgtcacgggcgacagccagttttgtagtcaaaaagcagtcatctattcattgaattttacagcaaacccacctcaaagagtatttgaacttgttgaccagattaatccatctattttctgcattcatattacaaactataaacctgcattatcctttattaatccagaagtacctgatgaaaacaattttgatacattgatgaaaacatctgatggttttacattgaatgctgaatcatatgtttccttcacaaccaaactggatattcctactgctgctaaatatgagtatggggttcctctgcagacttcagattcgtttctgagatttccttcgtccctgacatcatctctgtgcactgataataaccctgcaggccaggcgtactggttcacacctgtaatcccagcactctgggaggccgaggcgagaggatcacttgaggtacctgattcaagaaaaaaggtccctatcactgttcagtccatcgtcattcagtctctaaataaaacgctcacccgacgggaggacactgatgtgctgcagccgactctcgtcaacgctggacactttagcctttgcgtgaatgttgttcttgaggtaaagtacagcctcacatacacagatgcaggtgaagtcaccaaagctgatctctcattcgttctggggacagttagcagcgtagtggtcccactgcagcaaaagtttgaaattcattttcttcaggaaaatacccagccagtccctctcagtggaaaccctggttatgtcgtggggctcccattagctgctggattccagcctcataaggggtctgggattattcagaccacaaatagatatggacagcttactattcttcatagcacaactgagcaagactgcttagcactggagggggtccggaccccagtattatttggttacactatgcaatctggctgtaaactaagactgactggagctctcccgtgtcagctcgtagcacagaaggtgaagagcctgctgtggggccagggcttcccagattacgtggccccttttggaaattcccaggcccaggacatgctggactgggtgcccatccacttcatcacccagtcattcaacaggaaggattcctgccagctcccaggggctttggttatagaagtgaagtggactaaatacggatccctgctgaatccacaggccaaaatagtcaatgtaactgcaaatctaatttcatcctcctttcctgaggccaactcaggaaatgaaaggacgattcttatttccactgcggttacttttgtggatgtgtctgcacctgcagaggcaggcttcagagctccaccagccatcaatgccaggctgccctttaacttcttcttcccgtttgtttgacaatgctcagatgcatcagttccttaatatacacgtgaaatttgaaaactgtacattcggtgagattaaattttatatacaactagc

SEQ ID NO: 189943 - DNA, 2098 bp, Homo sapiens
  Payload ID: 17507
  Gene Symbol: TCTN1
  Gene Name: tectonic family member 1
  ENST ID: ENST00000397656
  CDS Start-End: 78-617
atgccccgcgcctggctgtcgcggttgccgggcaacgcgctgtccatgtcgcgggcctcgctgggactccctgggagatgaggccgcgaggtctcccgccgctcctggtggtgctcctgggctgctgggcctccgtgagcgcccagaccgatgccaccccggcggtgacgacagagggcctcaactccaccgaggcagccctggccaccttcggaactttcccgtcgaccaggccccccgggactcccagggctccagggccctcctccggccccaggcctaccccagtcacggacgttgctgttctctgtgtctgtgacttatccccagcacagtgtgacatcaactgctgctgtgatcccgactgcagctccgtggatttcagtgtcttttctgcctgctcagttccagttgtcacgggcgacagccagttttgtagtcaaaaagcagtcatctattcattgaattttacagcaaacccacctcaaagagtatttgaacttgttgaccagattaatccatctattttctgcattcatattacaaactcacattttactccaggactttcacggtggctgtgtgagagtagaagtcggattctttcattcccatagccatccggagagagcttctccttacaggttgatacagcaaactcatcagtccaggggctagagaaatagacggattattattggcttctgttgtgctgtttacttataaacctgcattatcctttattaatccagaagtacctgatgaaaacaattttgatacattgatgaaaacatctgatggttttacattgaatgctgaatcatatgtttccttcacaaccaaactggatattcctactgctgctaaatatgagtatggggttcctctgcagacttcagattcgtttctgagatttccttcgtccctgacatcatctctgtgcactgataataaccctgcagcgtttctggtgaaccaggctgttaagtgcaccagaaaaataaatttagaacagtgtgaagaaattgaagccctcagcatggctttttacagcagcccggaaattctgagggtacctgattcaagaaaaaaggtccctatcactgttcagtccatcgtcattcagtctctaaataaaacgctcacccgacgggaggacactgatgtgctgcagccgactctcgtcaacgctggacactttagcctttgcgtgaatgttgttcttgaggtaaagtacagcctcacatacacagatgcaggtgaagtcaccaaagctgatctctcattcgttctggggacagttagcagcgtagtggtcccactgcagcaaaagtttgaaattcattttcttcaggaaaatacccagccagtccctctcagtggaaaccctggttatgtcgtggggctcccattagctgctggattccagcctcataaggggtctgggattattcagaccacaaatagatatggacagcttactattcttcatagcacaactgagcaagactgcttagcactggagggggtccggaccccagtattatttggttacactatgcaatctggctgtaaactaagactgactggagctctcccgtgtcagctcgtagcacagaaggtgaagagcctgctgtggggccagggcttcccagattacgtggccccttttggaaattcccaggcccaggacatgctggactgggtgcccatccacttcatcacccagtcattcaacaggaaggattcctgccagctcccaggggctttggttatagaagtgaagtggactaaatacggatccctgctgaatccacaggccaaaatagtcaatgtaactgcaaatctaatttcatcctcctttcctgaggccaactcaggaaatgaaaggacgattcttatttccactgcggttacttttgtggatgtgtctgcacctgcagaggcaggcttcagagctccaccagccatcaatgccaggctgccctttaacttcttcttcccgtttgtttgacaatgctcagatgcatcagttccttaatatacacgtgaaatttgaaaactgtacattcggtgagattaaattttatatacaact

SEQ ID NO: 189944 - DNA, 1885 bp, Homo sapiens
  Payload ID: 17507
  Gene Symbol: TCTN1
  Gene Name: tectonic family member 1
  Uniprot ID: Q2MV58
  ENST ID: ENST00000397659
  CDS Start-End: 20-1798
cgctgggactccctgggagatgaggccgcgaggtctcccgccgctcctggtggtgctcctgggctgctgggcctccgtgagcgcccagaccgatgccaccccggcggtgacgacagagggcctcaactccaccgaggcagccctggccaccttcggaactttcccgtcgaccaggccccccgggactcccagggctccagggccctcctccggccccaggcctaccccagtcacggacgttgctgttctctgtgtctgtgacttatccccagcacagtgtgacatcaactgctgctgtgatcccgactgcagctccgtggatttcagtgtcttttctgcctgctcagttccagttgtcacgggcgacagccagttttgtagtcaaaaagcagtcatctattcattgaattttacagcaaacccacctcaaagagtatttgaacttgttgaccagattaatccatctattttctgcattcatattacaaactataaacctgcattatcctttattaatccagaagtacctgatgaaaacaattttgatacattgatgaaaacatctgatggttttacattgaatgctgaatcatatgtttccttcacaaccaaactggatattcctactgctgctaaatatgagtatggggttcctctgcagacttcagattcgtttctgagatttccttcgtccctgacatcatctctgtgcactgataataaccctgcagcgtttctggtgaaccaggctgttaagtgcaccagaaaaataaatttagaacagtgtgaagaaattgaagccctcagcatggctttttacagcagcccggaaattctgagggtacctgattcaagaaaaaaggtccctatcactgttcagtccatcgtcattcagtctctaaataaaacgctcacccgacgggaggacactgatgtgctgcagccgactctcgtcaacgctggacactttagcctttgcgtgaatgttgttcttgaggtaaagtacagcctcacatacacagatgcaggtgaagtcaccaaagctgatctctcattcgttctggggacagttagcagcgtagtggtcccactgcagcaaaagtttgaaattcattttcttcaggaaaatacccagccagtccctctcagtggaaaccctggttatgtcgtggggctcccattagctgctggattccagcctcataaggggtctgggattattcagaccacaaatagatatggacagcttactattcttcatagcacaactgagcaagactgcttagcactggagggggtccggaccccagtattatttggttacactatgcaatctggctgtaaactaagactgactggagctctcccgtgtcagctcgtagcacagaaggtgaagagcctgctgtggggccagggcttcccagattacgtggccccttttggaaattcccaggcccaggacatgctggactgggtgcccatccacttcatcacccagtcattcaacaggaagcattttgttttgcaggattcctgccagctcccaggggctttggttatagaagtgaagtggactaaatacggatccctgctgaatccacaggccaaaatagtcaatgtaactgcaaatctaatttcatcctcctttcctgaggccaactcaggaaatgaaaggacgattcttatttccactgcggttacttttgtggatgtgtctgcacctgcagaggcaggcttcagagctccaccagccatcaatgccaggctgccctttaacttcttcttcccgtttgtttgacaatgctcagatgcatcagttccttaatatacacgtgaaatttgaaaactgtacattcggtgagattaaattttatatacaactagc

SEQ ID NO: 189945 - DNA, 1996 bp, Homo sapiens
  Payload ID: 17507
  Gene Symbol: TCTN1
  Gene Name: tectonic family member 1
  ENST ID: ENST00000464809
  CDS Start-End: 19-321
gctgggactccctgggagatgaggccgcgaggtctcccgccgctcctggtggtgctcctgggctgctgggcctccgtgagcgcccagaccgatgccaccccggcggtgacgacagagggcctcaactccaccgaggcagccctggccaccttcggaactttcccgtcgaccaggccccccgggactcccagggctccagggccctcctccggccccaggcctaccccagtcacggacggtgggtaccatgtgccagctcctggagtccacagtgatccaacctcaaggggacagccccgttgctgttctctgtgtctgtgacttatccccagcacagtgtgacatcaactgctgctgtgatcccgactgcagctccgtggatttcagtgtcttttctgcctgctcagttccagttgtcacgggcgacagccagttttgtagtcaaaaagcagtcatctattcattgaattttacagcaaacccacctcaaagagtatttgaacttgttgaccagattaatccatctattttctgcattcatattacaaactgcagatgctctgtgtgatttgtaatctgaagtgataactggccagtgactgtcaggttctctgtcgtaacaccagcccagtgaacatgccagcctgcttccttctctctcttctgtacacagcacattttactccaggactttcacggtggctgtgtgagagtagaagtcggattctttcattcccatagccatccggagagagcttctccttacaggttgatacagcaaactcatcagtccaggggctagagaaatagacggattattattggcttctgttgtgctgtttacttataaacctgcattatcctttattaatccagaagtacctgatgaaaacaattttgatacattgatgaaaacatctgatggttttacattgaatgctgaatcatatgtttccttcacaaccaaactggatattcctactgctgctaaatatgagtatggggttcctctgcagacttcagattcgtttctgagatttccttcgtccctgacatcatctctgtgcactgataataaccctgcagcgtttctggtgaaccaggctgttaagtgcaccagaaaaataaatttagaacagtgtgaagaaattgaagccctcagcatggctttttacagcagcccggaaattctgagggtacctgattcaagaaaaaaggtccctatcactgttcagtccatcgtcattcagtctctaaataaaacgctcacccgacgggaggacactgatgtgctgcagccgactctcgtcaacgctggacactttagcctttgcgtgaatgttgttcttgaggtaaagtacagcctcacatacacagatgcaggtgaagtcaccaaagctgatctctcattcgttctggggacagttagcagcgtagtggtcccactgcagcaaaagtttgaaattcattttcttcagactgactggagctctcccgtgtcagctcgtagcacagaaggtgaagagcctgctgtggggccagggcttcccagattacgtggccccttttggaaattcccaggcccaggacatgctggactgggtgcccatccacttcatcacccagtcattcaacaggaaggattcctgccagctcccaggggctttggttatagaagtgaagtggactaaatacggatccctgctgaatccacaggccaaaatagtcaatgtaactgcaaatctaatttcatcctcctttcctgaggccaactcaggaaatgaaaggacgattcttatttccactgcggttacttttgtggatgtgtctgcacctgcagaggcaggcttcagagctccaccagccatcaatgccaggctgccctttaacttcttcttcccgtttgtttgacaatgctcagatgcatcagttccttaatatacacgtgaaatttgaaaactgtacattcggtgagattaaattttatatacaacta

SEQ ID NO: 189946 - DNA, 1874 bp, Homo sapiens
  Payload ID: 17507
  Gene Symbol: TCTN1
  Gene Name: tectonic family member 1
  ENST ID: ENST00000490514
  CDS Start-End: 82-333
cgtgatgccccgcgcctggctgtcgcggttgccgggcaacgcgctgtccatgtcgcgggcctcgctgggactccctgggagatgaggccgcgaggtctcccgccgctcctggtggtgctcctgggctgctgggcctccgtgagcgcccagaccgatgccaccccggcggtgacgacagagggcctcaactccaccgaggcagccctggccaccttcggaactttcccgtcgaccaggccccccgggactcccagggctccagggccctcctccggccccaggcctaccccagtcacggacgggtctcactctgtcactcaggctggagtatagtggcatgatcacagctcactgcagcctcgacctcctaggctcagttgctgttctctgtgtctgtgacttatccccagcacagtgtgacatcaactgctgctgtgatcccgactgcagctccgtggatttcagtgtcttttctgcctgctcagttccagttgtcacgggcgacagccagttttgtagtcaaaaagcagtcatctattcattgaattttacagcaaacccacctcaaagagtatttgaacttgttgaccagattaatccatctattttctgcattcatattacaaactataaacctgcattatcctttattaatccagaagtacctgatgaaaacaattttgatacattgatgaaaacatctgatggttttacattgaatgctgaatcatatgtttccttcacaaccaaactggatattcctactgctgctaaatatgagtatggggttcctctgcagacttcagattcgtttctgagatttccttcgtccctgacatcatctctgtgcactgataataaccctgcagcgtttctggtgaaccaggctgttaagtgcaccagaaaaataaatttagaacagtgtgaagaaattgaagccctcagcatggctttttacagcagcccggaaattctgagggtacctgattcaagaaaaaaggtccctatcactgttcagtccatcgtcattcagtctctaaataaaacgctcacccgacgggaggacactgatgtgctgcagccgactctcgtcaacgctggacactttagcctttgcgtgaatgttgttcttgaggtaaagtacagcctcacatacacagatgcaggtgaagtcaccaaagctgatctctcattcgttctggggacagttagcagcgtagtggtcccactgcagcaaaagtttgaaattcattttcttcaggaaaatacccagccagtccctctcagtggaaaccctggttatgtcgtggggctcccattagctgctggattccagcctcataagggtggagctctcccgtgtcagctcgtagcacagaaggtgaagagcctgctgtggggccagggcttcccagattacgtggccccttttggaaattcccaggcccaggacatgctggactgggtgcccatccacttcatcacccagtcattcaacaggaagcattttgttttgcaggattcctgccagctcccaggggctttggttatagaagtgaagtggactaaatacggatccctgctgaatccacaggccaaaatagtcaatgtaactgcaaatctaatttcatcctcctttcctgaggccaactcaggaaatgaaaggacgattcttatttccactgcggttacttttgtggatgtgtctgcacctgcagaggcaggcttcagagctccaccagccatcaatgccaggctgccctttaacttcttcttcccgtttgtttgacaatgctcagatgcatcagttccttaatatacacgtgaaatttgaaaactgtacattcggtgagattaaattttatatacaacta

SEQ ID NO: 189947 - DNA, 1988 bp, Homo sapiens
  Payload ID: 17507
  Gene Symbol: TCTN1
  Gene Name: tectonic family member 1
  ENST ID: ENST00000495659
  CDS Start-End: 77-379
tgccccgcgcctggctgtcgcggttgccgggcaacgcgctgtccatgtcgcgggcctcgctgggactccctgggagatgaggccgcgaggtctcccgccgctcctggtggtgctcctgggctgctgggcctccgtgagcgcccagaccgatgccaccccggcggtgacgacagagggcctcaactccaccgaggcagccctggccaccttcggaactttcccgtcgaccaggccccccgggactcccagggctccagggccctcctccggccccaggcctaccccagtcacggacggtgggtaccatgtgccagctcctggagtccacagtgatccaacctcaaggggacagccccgttgctgttctctgtgtctgtgacttatccccagcacagtgtgacatcaactgctgctgtgatcccgactgcagctccgtggatttcagtgtcttttctgcctgctcagttccagttgtcacgggcgacagccagttttgtagtcaaaaagcagtcatctattcattgaattttacagcaaacccacctcaaagagtatttgaacttgttgaccagattaatccatctattttctgcattcatattacaaactataaacctgcattatcctttattaatccagaagtacctgatgaaaacaattttgatacattgatgaaaacatctgatggttttacattgaatgctgaatcatatgtttccttcacaaccaaactggatattcctactgctgctaaatatgagtatggggttcctctgcagacttcagattcgtttctgagatttccttcgtccctgacatcatctctgtgcactgataataaccctgcagcgtttctggtgaaccaggctgttaagtgcaccagaaaaataaatttagaacagtgtgaagaaattgaagccctcagcatggctttttacagcagcccggaaattctgagggtacctgattcaagaaaaaaggtccctatcactgttcagtccatcgtcattcagtctctaaataaaacgctcacccgacgggaggacactgatgtgctgcagccgactctcgtcaacgctggacactttagcctttgcgtgaatgttgttcttgaggtaaagtacagcctcacatacacagatgcaggtgaagtcaccaaagctgatctctcattcgttctggggacagttagcagcgtagtggtcccactgcagcaaaagtttgaaattcattttcttcaggaaaatacccagccagtccctctcagtggaaaccctggttatgtcgtggggctcccattagctgctggattccagcctcataaggggtctgggattattcagaccacaaatagatatggacagcttactattcttcatagcacaactgagcaagactgcttagcactggagggggtccggaccccagtattatttggttacactatgcaatctggctgtaaactaagactgactggagctctcccgtgtcagctcgtagcacagaaggtgaagagcctgctgtggggccagggcttcccagattacgtggccccttttggaaattcccaggcccaggacatgctggactgggtgcccatccacttcatcacccagtcattcaacaggaaggattcctgccagctcccaggggctttggttatagaagtgaagtggactaaatacggatccctgctgaatccacaggccaaaatagtcaatgtaactgcaaatctaatttcatcctcctttcctgaggccaactcaggaaatgaaaggacgattcttatttccactgcggttacttttgtggatgtgtctgcacctgcagaggcaggcttcagagctccaccagccatcaatgccaggctgccctttaacttcttcttcccgtttgtttgacaatgctcagatgcatcagttccttaatatacacgtgaaatttgaaaactgtacattcggtgagattaaattttatatacaactagc

SEQ ID NO: 189948 - DNA, 1891 bp, Homo sapiens
  Payload ID: 17507
  Gene Symbol: TCTN1
  Gene Name: tectonic family member 1
  ENST ID: ENST00000480648
  CDS Start-End: 16-807
gggactccctgggagatgaggccgcgaggtctcccgccgctcctggtggtgctcctgggctgctgggcctccgtgagcgcccagaccgatgccaccccggcggtgacgacagagggcctcaactccaccgaggcagccctggccaccttcggaactttcccgtcgaccaggccccccgggactcccagggctccagggccctcctccggccccaggcctaccccagtcacggacgttgctgttctctgtgtctgtgacttatccccagcacagtgtgacatcaactgctgctgtgatcccgactgcagctccgtggatttcagtgtcttttctgcctgctcagttccagttgtcacgggcgacagccagttttgtagtcaaaaagcagtcatctattcattgaattttacagcaaacccacctcaaagagtatttgaacttgttgaccagattaatccatctattttctgcattcatattacaaactataaacctgcattatcctttattaatccagaagtacctgatgaaaacaattttgatacattgatgaaaacatctgatggttttacattgaatgctgaatcatatgtttccttcacaaccaaactggatattcctactgctgctaaatatgagtatggggttcctctgcagacttcagattcgtttctgagatttccttcgtccctgacatcatctctgtgcactgataataaccctgcaggccaggcgtactggttcacacctgtaatcccagcactctgggaggccgaggcgagaggatcacttgagcgtttctggtgaaccaggctgttaagtgcaccagaaaaataaatttagaacagtgtgaagaaattgaagccctcagcatggctttttacagcagcccggaaattctgagggtacctgattcaagaaaaaaggtccctatcactgttcagtccatcgtcattcagtctctaaataaaacgctcacccgacgggaggacactgatgtgctgcagccgactctcgtcaacgctggacactttagcctttgcgtgaatgttgttcttgaggtaaagtacagcctcacatacacagatgcaggtgaagtcaccaaagctgatctctcattcgttctggggacagttagcagcgtagtggtcccactgcagcaaaagtttgaaattcattttcttcaggaaaatacccagccagtccctctcagtggaaaccctggttatgtcgtggggctcccattagctgctggattccagcctcataaggggtctgggattattcagaccacaaatagatatggacagcttactattcttcatagcacaactgagcaagactgcttagcactggagggggtccggaccccagtattatttggttacactatgcaatctggctgtaaactaagactgactggagctctcccgtgtcagctcgtagcacagaaggtgaagagcctgctgtggggccagggcttcccagattacgtggccccttttggaaattcccaggcccaggacatgctggactgggtgcccatccacttcatcacccagtcattcaacaggaaggattcctgccagctcccaggggctttggttatagaagtgaagtggactaaatacggatccctgctgaatccacaggccaaaatagtcaatgtaactgcaaatctaatttcatcctcctttcctgaggccaactcaggaaatgaaaggacgattcttatttccactgcggttacttttgtggatgtgtctgcacctgcagaggcaggcttcagagctccaccagccatcaatgccaggctgccctttaacttcttcttcccgtttgtttgacaatgctcagatgcatcagttccttaatatacacgtgaaatttg

SEQ ID NO: 189949 - DNA, 370 bp, Homo sapiens
  Payload ID: 17507
  Gene Symbol: TCTN1
  Gene Name: tectonic family member 1
  ENST ID: ENST00000547461
  CDS Start-End: 1-285
gacactgatgtgctgcagccgactctcgtcaacgctggacactttagcctttgcgtgaatgttgttcttgagactgactggagctctcccgtgtcagctcgtagcacagaaggtgaagagcctgctgtggggccagggcttcccagattacgtggccccttttggaaattcccaggcccaggacatgctggactgggtgcccatccacttcatcacccagtcattcaacaggaaggattcctgccagctcccaggggctttggttatagaagtgaagtggactaaatacggatccctgctgaatccacaggccaaaatagtcaatgtaactgcaaatctaatttcatcctcctttcctgaggccaactca

SEQ ID NO: 189950 - DNA, 2309 bp, Homo sapiens
  Payload ID: 17507
  Gene Symbol: TCTN1
  Gene Name: tectonic family member 1
  Uniprot ID: Q2MV58
  ENST ID: ENST00000551590
  CDS Start-End: 157-1920
atccgccccctgcctcatccaggcttcgccccagtcagtctccggcagcttctcgcggcttcgcaagccccttcccgtgatgccccgcgcctggctgtcgcggttgccgggcaacgcgctgtccatgtcgcgggcctcgctgggactccctgggagatgaggccgcgaggtctcccgccgctcctggtggtgctcctgggctgctgggcctccgtgagcgcccagaccgatgccaccccggcggtgacgacagagggcctcaactccaccgaggcagccctggccaccttcggaactttcccgtcgaccaggccccccgggactcccagggctccagggccctcctccggccccaggcctaccccagtcacggacgttgctgttctctgtgtctgtgacttatccccagcacagtgtgacatcaactgctgctgtgatcccgactgcagctccgtggatttcagtgtcttttctgcctgctcagttccagttgtcacgggcgacagccagttttgtagtcaaaaagcagtcatctattcattgaattttacagcaaacccacctcaaagagtatttgaacttgttgaccagattaatccatctattttctgcattcatattacaaactataaacctgcattatcctttattaatccagaagtacctgatgaaaacaattttgatacattgatgaaaacatctgatggttttacattgaatgctgaatcatatgtttccttcacaaccaaactggatattcctactgctgctaaatatgagtatggggttcctctgcagacttcagattcgtttctgagatttccttcgtccctgacatcatctctgtgcactgataataaccctgcagcgtttctggtgaaccaggctgttaagtgcaccagaaaaataaatttagaacagtgtgaagaaattgaagccctcagcatggctttttacagcagcccggaaattctgagggtacctgattcaagaaaaaaggtccctatcactgttcagtccatcgtcattcagtctctaaataaaacgctcacccgacgggaggacactgatgtgctgcagccgactctcgtcaacgctggacactttagcctttgcgtgaatgttgttcttgaggtaaagtacagcctcacatacacagatgcaggtgaagtcaccaaagctgatctctcattcgttctggggacagttagcagcgtagtggtcccactgcagcaaaagtttgaaattcattttcttcaggaaaatacccagccagtccctctcagtggaaaccctggttatgtcgtggggctcccattagctgctggattccagcctcataaggggtctgggattattcagaccacaaatagatatggacagcttactattcttcatagcacaactgagcaagactgcttagcactggagggggtccggaccccagtattatttggttacactatgcaatctggctgtaaactaagactgactggagctctcccgtgtcagctcgtagcacagaaggtgaagagcctgctgtggggccagggcttcccagattacgtggccccttttggaaattcccaggcccaggacatgctggactgggtgcccatccacttcatcacccagtcattcaacaggaaggattcctgccagctcccaggggctttggttatagaagtgaagtggactaaatacggatccctgctgaatccacaggccaaaatagtcaatgtaactgcaaatctaatttcatcctcctttcctgaggccaactcaggaaatgaaaggacgattcttatttccactgcggttacttttgtggatgtgtctgcacctgcagaggcaggcttcagagctccaccagccatcaatgccaggctgccctttaacttcttcttcccgtttgtttgacaatgctcagatgcatcagttccttaatatacacgtgaaatttgaaaactgtacattcggtgagattaaattttatatacaactagcaattgtccagctttgttgctcattttcaattaaggctaaagtgttcaacatgagaaaatgtgatacatttgatacagtgtggggtgggagtggatgggcagctcttggtggtactggaccttccacaaggctgtgtccacccagaatccatgctggcaggagggaggcagaggtatcaaaccaaacctctcaccaagcggcccaggaggggcagctgttcctctcgtgacagcacaggcccatgagacagtgtcttctttttgaggggagctggtccgggtctagttcacttcaccaagaag

SEQ ID NO: 189951 - DNA, 458 bp, Homo sapiens
  Payload ID: 17507
  Gene Symbol: TCTN1
  Gene Name: tectonic family member 1
  ENST ID: ENST00000549123
  CDS Start-End: 241-458
atgcaggtgaagtcaccaaagctgatctctcattcgttctggggacagttagcagcgtagtggtcccactgcagcaaaagtttgaaattcattttcttcaggattcctgccagctcccaggggctttggttatagaagtgaagtggactaaatacggatccctgctgaatccacaggccaaaatagtcaatgtaactgcaaatctaatttcatcctcctttcctgaggccaactcaggaaatgaaaggacgattcttatttccactgcggttacttttgtggatgtgtctgcacctgcagaggcaggcttcagagctccaccagccatcaatgccaggctgccctttaacttcttcttcccgtttgtttgacaatgctcagatgcatcagttccttaatatacacgtgaaatttgaaaactgtacattcggtgagattaaattttatatacaactagc

SEQ ID NO: 189952 - DNA, 926 bp, Homo sapiens
  Payload ID: 17507
  Gene Symbol: TCTN1
  Gene Name: tectonic family member 1
  ENST ID: ENST00000546643
  CDS Start-End: 60-326
tcgcggttgccgggcaacgcgctgtccatgtcgcgggcctcgctgggactccctgggagatgaggccgcgaggtctcccgccgctcctggtggtgctcctgggctgctgggcctccgtgagcgcccagaccgatgccaccccggcggtgacgacagagggcctcaactccaccgaggcagccctggccaccttcggaactttcccgtcgaccaggccccccgggactcccagggctccagggccctcctccggccccaggcctaccccagtcacggacggggcgacagccagttttgtagtcaaaaagcagtcatctattcattgaattttacagcaaacccacctcaaagagtatttgaacttgttgaccagattaatccatctattttctgcattcatattacaaactataaacctgcattatcctttattaatccagaagtacctgatgaaaacaattttgatacattgatgaaaacatctgatggttttacattgaatgctgaatcatatgtttccttcacaaccaaactggatattcctactgctgctaaatatgaggtgagcctgaacttgattgattcttttcatcccatcacaaatatctttccttgtaagttaattttcaaggttaccaggaaaactgggttccttgagacagagttgatattatagactaaaaaacttaatgttcatgcctacaaatcaaagatcatgaaaattaaaactgaatatttgaagatggattaaagacttaaatgtaagacctaaaaccatacaaaccctagaagaaaacccaggcaataccattcaggacatagacatgggcaaagacatcatgagtaaaacaaccaaaagcaatggcaacaaaagccaaaattgacaaatgggatctaattaaactaaagagcttctgcacagcaaa

SEQ ID NO: 189953 - DNA, 2149 bp, Homo sapiens
  Payload ID: 17507
  Gene Symbol: TCTN1
  Gene Name: tectonic family member 1
  ENST ID: ENST00000550703
  CDS Start-End: 157-894
atccgccccctgcctcatccaggcttcgccccagtcagtctccggcagcttctcgcggcttcgcaagccccttcccgtgatgccccgcgcctggctgtcgcggttgccgggcaacgcgctgtccatgtcgcgggcctcgctgggactccctgggagatgaggccgcgaggtctcccgccgctcctggtggtgctcctgggctgctgggcctccgtgagcgcccagaccgatgccaccccggcggtgacgacagagggcctcaactccaccgaggcagccctggccaccttcggaactttcccgtcgaccaggccccccgggactcccagggctccagggccctcctccggccccaggcctaccccagtcacggacgttgctgttctctgtgtctgtgacttatccccagcacagtgtgacatcaactgctgctgtgatcccgactgcagctccgtggatttcagtgtcttttctgcctgctcagttccagttgtcacgggcgacagccagttttgtagtcaaaaagcagtcatctattcattgaattttacagcaaacccacctcaaagagtatttgaacttgttgaccagattaatccatctattttctgcattcatattacaaactataaacctgcattatcctttattaatccagaagtacctgatgaaaacaattttgatacattgatgaaaacatctgatggttttacattgaatgctgaatcatatgtttccttcacaaccaaactggatattcctactgctgctaaatatgaggtgagcctgaacttgattgattcttttcatcccatcacaaatatctttccttgtaagttaattttcaaggttaccaggaaaactgggttccttgagacagagttgatattatagactaaaaaacttaatgttcatgcctacaaatcaaagatcatgaaaattaaaactgaatatttgaagatggattaaagacttaaatgtaagacctaaaaccatacaaaccctagaagaaaacccaggcaataccattcaggacatagacatgggcaaagacatcatgagtaaaacaaccaaaagcaatggcaacaaaagccaaaattgacaaatgggatctaattaaactaaagagcttctgcacagcaaaagaaactatcatcagagtgaacgtgtgacctacagaatgggaaaaaatttttgcaatctatccatatgacaaagggctaatatccagaatctacaaggaacttaaataaatttacaagaaaaaaacaaccccatcaaaaagtgggtgaaggatatgaatagacacttttcaaaagaagacatttaagtggccaacgaacctatgaaaaaaggctcatcatcactggtcattagagaaatgcaaatcaaaactgcaatcagataccatctcacgccagttagaatgacgattattaagaagtcaggaaacaacaggtgctggagaggatatggagaaataggaacgcttttacactgttgggtgggagtgtaaattatttcaaccattgtggaagacagtgcggcgattcctcaaggatctagaacctaaaataccatttgacccagcaattccattactgagtatatacccaaaggattataaatcattctataaagacacacgcacacgtatgtttattgcagcactattcacaatagcaaagacttggaaccaacccaaatgtccatcagtgatagactgggtgaagaaaatgtggcacatacacaacatggaatgctaagcagccataaaaaaggatgagttcatgtcctttgtaggaaaccatcattctcagcaaactaacatggaacagaaaaccaaacatcgcatgttctcactcataagtgggagttgaacaatgagaacacatggacacagggaggggaacatcacacacaggggcctgtcagagggtggtgggctaggggaggggatagcattaggagaaacacctaatgtagatgatgggttgatgagtgcagtaaaccaccatggcacgtgtatacctacgtaacaaacctgcatgttctgcacccgttatcccagaacttaaaatataataataaaaataaaactgaatatttgaattctgaatagaggatttaaggttgtttattctgtgat

SEQ ID NO: 189954 - DNA, 718 bp, Homo sapiens
  Payload ID: 17507
  Gene Symbol: TCTN1
  Gene Name: tectonic family member 1
  ENST ID: ENST00000471804
  CDS Start-End: 58-546
gcggttgccgggcaacgcgctgtccatgtcgcgggcctcgctgggactccctgggagatgaggccgcgaggtctcccgccgctcctggtggtgctcctgggctgctgggcctccgtgagcgcccagaccgatgccaccccggcggtgacgacagagggcctcaactccaccgaggcagccctggccaccttcggaactttcccgtcgaccaggccccccgggactcccagggctccagggccctcctccggccccaggcctaccccagtcacggacgttgctgttctctgtgtctgtgacttatccccagcacagtgtgacatcaactgctgctgtgatcccgactgcagctccgtggatttcagtgtcttttctgcctgctcagttccagttgtcacgggcgacagccagttttgtagtcaaaaagcagtcatctattcattgaattttacagcaaacccacctcaaagagtatttgaacttgttgaccagattaatccatctattttctgcattcatattacaaactgcagatgctctgtgtgatttgtaatctgaagtgataactggccagtgactgtcaggttctctgtcgtaacaccagcccagtgaacatgccagcctgcttccttctctctcttctgtacacagcacattttactccaggactttcacggtggctgtgtgagagtagaagtcggattctttcattcccata

SEQ ID NO: 189955 - DNA, 1919 bp, Homo sapiens
  Payload ID: 17507
  Gene Symbol: TCTN1
  Gene Name: tectonic family member 1
  ENST ID: ENST00000478122
  CDS Start-End: 58-360
gcggttgccgggcaacgcgctgtccatgtcgcgggcctcgctgggactccctgggagatgaggccgcgaggtctcccgccgctcctggtggtgctcctgggctgctgggcctccgtgagcgcccagaccgatgccaccccggcggtgacgacagagggcctcaactccaccgaggcagccctggccaccttcggaactttcccgtcgaccaggccccccgggactcccagggctccagggccctcctccggccccaggcctaccccagtcacggacggtgggtaccatgtgccagctcctggagtccacagtgatccaacctcaaggggacagccccgttgctgttctctgtgtctgtgacttatccccagcacagtgtgacatcaactgctgctgtgatcccgactgcagctccgtggatttcagtgtcttttctgcctgctcagttccagttgtcacgggcgacagccagttttgtagtcaaaaagcagtcatctattcattgaattttacagcaaacccacctcaaagagtatttgaacttgttgaccagattaatccatctattttctgcattcatattacaaactataaacctgcattatcctttattaatccagaagtacctgatgaaaacaattttgatacattgatgaaaacatctgatggttttacattgaatgctgaatcatatgtttccttcacaaccaaactggatattcctactgctgctaaatatgaggtgagcctgaacttgattgattcttttcatcccatcacaaatatctttccttgtaagttaattttcaaggttaccaggaaaactgggttccttgagacagagttgatattatagactaaaaaacttaatgttcatgcctacaaatcaaagatcatgaaaattaaaactgaatatttgaagatggattaaagacttaaatgtaagacctaaaaccatacaaaccctagaagaaaacccaggcaataccattcaggacatagacatgggcaaagacatcatgagtaaaacaaccaaaagcaatggcaacaaaagccaaaattgacaaatgggatctaattaaactaaagagcttctgcacagcaaaagaaactatcatcagagtgaacgtgtgacctacagaatgggaaaaaatttttgcaatctatccatatgacaaagggctaatatccagaatctacaaggaacttaaataaatttacaagaaaaaaacaaccccatcaaaaagtgggtgaaggatatgaatagacacttttcaaaagaagacatttaagtggccaacgaacctatgaaaaaaggctcatcatcactggtcattagagaaatgcaaatcaaaactgcaatcagataccatctcacgccagttagaatgacgattattaagaagtcaggaaacaacaggtgctggagaggatatggagaaataggaacgcttttacactgttgggtgggagtgtaaattatttcaaccattgtggaagacagtgcggcgattcctcaaggatctagaacctaaaataccatttgacccagcaattccattactgagtatatacccaaaggattataaatcattctataaagacacacgcacacgtatgtttattgcagcactattcacaatagcaaagacttggaaccaacccaaatgtccatcagtgatagactgggtgaagaaaatgtggcacatacacaacatggaatgctaagcagccataaaaaaggatgagttcatgtcctttgtaggaaaccatcattctcagcaaactaacatggaacagaaaaccaaacatcgcatgttctcactcataagtgggagttgaacaatgagaacacatggacacagggaggggaacatcacacacaggggcctgtcagagggtggtgggctaggggaggg

SEQ ID NO: 189956 - DNA, 589 bp, Homo sapiens
  Payload ID: 17507
  Gene Symbol: TCTN1
  Gene Name: tectonic family member 1
  ENST ID: ENST00000481720
  CDS Start-End: 71-391
gcgcctggctgtcgcggttgccgggcaacgcgctgtccatgtcgcgggcctcgctgggactccctgggagatgaggccgcgaggtctcccgccgctcctggtggtgctcctgggctgctgggcctccgtgagcgcccagaccgatgccaccccggcggtgacgacagagggcctcaactccaccgaggcagccctggccaccttcggaactttcccgtcgaccaggccccccgggactcccagggctccagggccctcctccggccccaggcctaccccagtcacggacggacacgcaacttgtagatatcggagcaggaggctgactgtgagtggagaactggatggaaaattgcaggtggcttcaggcagtgttggtggagaagagtgataacccttcatcttgaatctgggctctgttcattagtaccctgctctacaagccagttgctgttctctgtgtctgtgacttatccccagcacagtgtgacatcaactgctgctgtgatcccgactgcagctccgtggatttcagtgtcttttctgcctgctcagttccagttgtcacgggcgacagccagttttgtag

SEQ ID NO: 189957 - DNA, 593 bp, Homo sapiens
  Payload ID: 17507
  Gene Symbol: TCTN1
  Gene Name: tectonic family member 1
  ENST ID: ENST00000552318
  CDS Start-End: 121-387
agtctccggcagcttctcgcggcttcgcaagccccttcccgtgatgccccgcgcctggctgtcgcggttgccgggcaacgcgctgtccatgtcgcgggcctcgctgggactccctgggagatgaggccgcgaggtctcccgccgctcctggtggtgctcctgggctgctgggcctccgtgagcgcccagaccgatgccaccccggcggtgacgacagagggcctcaactccaccgaggcagccctggccaccttcggaactttcccgtcgaccaggccccccgggactcccagggctccagggccctcctccggccccaggcctaccccagtcacggacggggcgacagccagttttgtagtcaaaaagcagtcatctattcattgaattttacagcaaacccacctcaaagagtatttgaacttgttgaccagattaatccatctattttctgcattcatattacaaactaagtacctgatgaaaacaattttgatacattgatgaaaacatctgatggttttacattgaatgctgaatcatatgtttccttcacaaccaaactggatattcctactgctgctaaatatgag

SEQ ID NO: 189958 - DNA, 573 bp, Homo sapiens
  Payload ID: 17507
  Gene Symbol: TCTN1
  Gene Name: tectonic family member 1
  ENST ID: ENST00000498072
  CDS Start-End: 82-309
cgtgatgccccgcgcctggctgtcgcggttgccgggcaacgcgctgtccatgtcgcgggcctcgctgggactccctgggagatgaggccgcgaggtctcccgccgctcctggtggtgctcctgggctgctgggcctccgtgagcgcccagaccgatgccaccccggcggtgacgacagagggcctcaactccaccgaggcagccctggccaccttcggaactttcccgtcgaccaggccccccgggactcccagggctccagggccctcctccggccccaggcctaccccagtcacggacggtggataaattatttgcctaattttaggacacgcaacttgtagatatcggagcaggaggctgactgtgagtggagaactggatggaaaattgcaggtggcttcaggcagtgttggtggagaagagtgataacccttcatcttgaatctgggctctgttcattagtaccctgctctacaagccagttgctgttctctgtgtctgtgacttatccccagcacagtgtgacatcaactgctgctgtgatcccgactgcagctccgtggatttcag

SEQ ID NO: 189959 - DNA, 1965 bp, Homo sapiens
  Payload ID: 17507
  Gene Symbol: TCTN1
  Gene Name: tectonic family member 1
  ENST ID: ENST00000614115
  CDS Start-End: 157-1878
atccgccccctgcctcatccaggcttcgccccagtcagtctccggcagcttctcgcggcttcgcaagccccttcccgtgatgccccgcgcctggctgtcgcggttgccgggcaacgcgctgtccatgtcgcgggcctcgctgggactccctgggagatgaggccgcgaggtctcccgccgctcctggtggtgctcctgggctgctgggcctccgtgagcgcccagaccgatgccaccccggcggtgacgacagagggcctcaactccaccgaggcagccctggccaccttcggaactttcccgtcgaccaggccccccgggactcccagggctccagggccctcctccggccccaggcctaccccagtcacggacgttgctgttctctgtgtctgtgacttatccccagcacagtgtgacatcaactgctgctgtgatcccgactgcagctccgtggatttcagtgtcttttctgcctgctcagttccagttgtcacgggcgacagccagttttgtagtcaaaaagcagtcatctattcattgaattttacagcaaacccacctcaaagagtatttgaacttgttgaccagattaatccatctattttctgcattcatattacaaactataaacctgcattatcctttattaatccagaagtacctgatgaaaacaattttgatacattgatgaaaacatctgatggttttacattgaatgctgaatcatatgtttccttcacaaccaaactggatattcctactgctgctaaatatgagtatggggttcctctgcagacttcagattcgtttctgagatttccttcgtccctgacatcatctctgtgcactgataataaccctgcaggccaggcgtactggttcacacctgtaatcccagcactctgggaggccgaggcgagaggatcacttgaggtacctgattcaagaaaaaaggtccctatcactgttcagtccatcgtcattcagtctctaaataaaacgctcacccgacgggaggacactgatgtgctgcagccgactctcgtcaacgctggacactttagcctttgcgtgaatgttgttcttgaggtaaagtacagcctcacatacacagatgcaggtgaagtcaccaaagctgatctctcattcgttctggggacagttagcagcgtagtggtcccactgcagcaaaagtttgaaattcattttcttcaggaaaatacccagccagtccctctcagtggaaaccctggttatgtcgtggggctcccattagctgctggattccagcctcataagatgtctgggattattcagaccacaaatagatatggacagcttactattcttcatagcacaactgagcaagactgcttagcactggagggggtccggaccccagtattatttggttacactatgcaatctggctgtaaactaagactgactggagctctcccgtgtcagctcgtagcacagaaggtgaagagcctgctgtggggccagggcttcccagattacgtggccccttttggaaattcccaggcccaggacatgctggactgggtgcccatccacttcatcacccagtcattcaacaggaaggattcctgccagctcccaggggctttggttatagaagtgaagtggactaaatacggatccctgctgaatccacaggccaaaatagtcaatgtaactgcaaatctaatttcatcctcctttcctgaggccaactcaggaaatgaaaggacgattcttatttccactgcggttacttttgtggatgtgtctgcacctgcagaggcaggcttcagagctccaccagccatcaatgccaggctgccctttaacttcttcttcccgtttgtttgacaatgctcagatgcatcagttccttaatatacacgtgaaatttgaaaactgtacattcggtgagattaaattttatatacaactagc

SEQ ID NO: 189960 - DNA, 2912 bp, Homo sapiens
  Payload ID: 17508
  Gene Symbol: TCTN2
  Gene Name: tectonic family member 2
  Uniprot ID: Q96GX1
  ENST ID: ENST00000303372
  CDS Start-End: 129-2222
atagctccgggcgttcgcttgcaagatggcggcggcggggcagtggctgctgcgttttcgtgtctgagtccttcctgggttctaatgagggcgcggttctgctgtgcccggcccgcgaggtctaaggcatgggcttccagcctccggccgctcttcttttgaggcttttccttctgcagggcatcctgaggcttctgtggggggacctggctttcatccctccttttatccgaatgtccggccctgcggtcagcgcgtccctggtcggagacaccgagggtgtgaccgtgtccctggcagtgctgcaggacgaggcgggaatattgccaattccgacgtgtggagtgctgaacaatgagacggaagactggagcgtgactgtgatccccggtgcgaaggtgttggaagtgacagtgaggtggaagagaggtctggactggtgttcctccaatgagacagattccttctcagagtccccctgtatcctccagacccttctggtttcagcatctcataattcatcctgttcagcacatctactcattcaagtggaaatttatgccaactcttctctgacccataatgcctcagagaacgtgactgtcattcctaaccaggtgtatcagccccttggcccttgtccttgtaatttaacagctggagcctgtgatgttcgctgctgctgtgaccaggaatgctcatcaaatttaacaacgctgttcagacggtcctgcttcaccggcgtgtttggaggagacgtcaatcctccttttgatcagctctgctctgctgggacgacgacacgtggtgtccccgattggtttccctttctgtgtgtgcagtccccccttgccaacacacccttccttggttacttctatcatggtgctgtttcccccaaacaggactcttcctttgaagtatatgtggatactgacgcaaaagactttgcagactttggttacaaacaaggagatcccattatgactgtaaagaaggcatattttactattccgcaggtgtccctggctgggcagtgtatgcagaacgccccagtggcatttcttcacaattttgatgttaaatgcgttactaatttggaactataccaagaacgagatggtattatcaatgcgaagataaagaatgttgccttaggaggcatagttacaccaaaagtgatctatgaggaagcaactgacctagacaaattcatcaccaatacagaaactcctttaaataacggatcaacccctagaattgtgaatgtggaagaacattatattttcaaatggaataataataccatcagtgaaataaatgttaaaatttttagggcagagattaatgcccaccagaaagggataatgacacagagatttgtagtaaaatttttaagctataatagtggtaatgaagaagaattatctggaaatccaggttaccaacttggcaagcctgtccgagctctaaatatcaacaggatgaataatgtcacgactttacatctttggcaatcggctggaaggggtctgtgtacatcagcaactttcaaacccattttatttggagaaaatgtactctctggatgcctgttagaagtcgggattaatgaaaattgtactcagctcagggagaatgctgttgaaagacttgattcattaatacaagcgactcacgttgcaatgagaggcaactccgattacgctgatcttagtgatggctggctcgaaataatacgtgtagatgcccctgatccaggtgcagacccgctggctagcagtgtgaacggcatgtgcctggatattcctgctcacctgagcatccgcatcctcatctcggatgctggcgcggtggaagggattactcagcaggagatactcggtgtagagacaaggttctcctcagtgaactggcagtaccagtgtgggcttacctgtgagcacaaggccgaccttctccctatcagtgcatccgtccagtttattaaaattcctgcacagttaccccaccccctgacaagattccagatcaattatacagagtatgactgcaacagaaatgaggtgtgttggccgcagcttctatatccatggactcagtattatcaaggggagctgcattctcagtgtgttgctaagggcttactgttgctgttgttcctcacattggccttgttcctcagcaacccctggaccagaatatgcaaagcctatagttagacaaccacctggcttttatttttttgagatggagttttgctcttgttgcccaggctgaagtgatctcggctcaccacaacctcctcctcttgggttcaagcgattctcctgcctcagcctccggagaactgggattacaggcatgcaccaccacgcccggctaattttgtatttttagtagagacagggttccaccgtattggccaggctgctctcgaactcctgacctcatgatccgcccatcttggcctcccaaagtgctgagattacaggcatgagccaccgcacccggcctttttttttttttttttttttttgaggcggggtctctgtcacccaggctggagtgcagtgcacaatctcggctcactgcaatctctgcctcccaagcaatcctcccacctcagcctctggtgtagctgggaccacagatgctccaccatgcctggctgtatttttggtaaagacggggtttcgccttgttgcccagggtggtctgtaactcctgagctcagatgatctgcccacctcggcctcccaaagtgctgggatcacagacgtgagccactgcgtccggtccatctgacttctcaaagactttagaccttgacttcagtgatttgttgtagtcttgtatgcttctctataaaattttaataaatgaaatgtcttatttttgtagaaaatttt

SEQ ID NO: 189961 - DNA, 2513 bp, Homo sapiens
  Payload ID: 17508
  Gene Symbol: TCTN2
  Gene Name: tectonic family member 2
  Uniprot ID: Q96GX1
  ENST ID: ENST00000426174
  CDS Start-End: 129-2219
atagctccgggcgttcgcttgcaagatggcggcggcggggcagtggctgctgcgttttcgtgtctgagtccttcctgggttctaatgagggcgcggttctgctgtgcccggcccgcgaggtctaaggcatgggcttccagcctccggccgctcttcttttgaggcttttccttctgcagggcatcctgaggcttctgtggggggacctggctttcatccctccttttatccgaatgtccggccctgcggtcagcgcgtccctggtcggagacaccgagggtgtgaccgtgtccctggcagtgctgcaggacgaggcgggaatattgccaattccgacgtgtggagtgctgaacaatgagacggaagactggagcgtgactgtgatccccggtgcggtgttggaagtgacagtgaggtggaagagaggtctggactggtgttcctccaatgagacagattccttctcagagtccccctgtatcctccagacccttctggtttcagcatctcataattcatcctgttcagcacatctactcattcaagtggaaatttatgccaactcttctctgacccataatgcctcagagaacgtgactgtcattcctaaccaggtgtatcagccccttggcccttgtccttgtaatttaacagctggagcctgtgatgttcgctgctgctgtgaccaggaatgctcatcaaatttaacaacgctgttcagacggtcctgcttcaccggcgtgtttggaggagacgtcaatcctccttttgatcagctctgctctgctgggacgacgacacgtggtgtccccgattggtttccctttctgtgtgtgcagtccccccttgccaacacacccttccttggttacttctatcatggtgctgtttcccccaaacaggactcttcctttgaagtatatgtggatactgacgcaaaagactttgcagactttggttacaaacaaggagatcccattatgactgtaaagaaggcatattttactattccgcaggtgtccctggctgggcagtgtatgcagaacgccccagtggcatttcttcacaattttgatgttaaatgcgttactaatttggaactataccaagaacgagatggtattatcaatgcgaagataaagaatgttgccttaggaggcatagttacaccaaaagtgatctatgaggaagcaactgacctagacaaattcatcaccaatacagaaactcctttaaataacggatcaacccctagaattgtgaatgtggaagaacattatattttcaaatggaataataataccatcagtgaaataaatgttaaaatttttagggcagagattaatgcccaccagaaagggataatgacacagagatttgtagtaaaatttttaagctataatagtggtaatgaagaagaattatctggaaatccaggttaccaacttggcaagcctgtccgagctctaaatatcaacaggatgaataatgtcacgactttacatctttggcaatcggctggaaggggtctgtgtacatcagcaactttcaaacccattttatttggagaaaatgtactctctggatgcctgttagaagtcgggattaatgaaaattgtactcagctcagggagaatgctgttgaaagacttgattcattaatacaagcgactcacgttgcaatgagaggcaactccgattacgctgatcttagtgatggctggctcgaaataatacgtgtagatgcccctgatccaggtgcagacccgctggctagcagtgtgaacggcatgtgcctggatattcctgctcacctgagcatccgcatcctcatctcggatgctggcgcggtggaagggattactcagcaggagatactcggtgtagagacaaggttctcctcagtgaactggcagtaccagtgtgggcttacctgtgagcacaaggccgaccttctccctatcagtgcatccgtccagtttattaaaattcctgcacagttaccccaccccctgacaagattccagatcaattatacagagtatgactgcaacagaaatgaggtgtgttggccgcagcttctatatccatggactcagtattatcaaggggagctgcattctcagtgtgttgctaagggcttactgttgctgttgttcctcacattggccttgttcctcagcaacccctggaccagaatatgcaaagcctatagttagacaaccacctggcttttatttttttgagatggagttttgctcttgttgcccaggctgaagtgatctcggctcaccacaacctcctcctcttgggttcaagcgattctcctgcctcagcctccggagaactgggattacaggcatgcaccaccacgcccggctaattttgtatttttagtagagacagggttccaccgtattggccaggctgctctcgaactcctgacctcatgatccgcccatcttggcctcccaaagtgctgagattacaggcatgagccaccgcacccggcc

SEQ ID NO: 189962 - DNA, 556 bp, Homo sapiens
  Payload ID: 17508
  Gene Symbol: TCTN2
  Gene Name: tectonic family member 2
  ENST ID: ENST00000541523
  CDS Start-End: 129-311
atagctccgggcgttcgcttgcaagatggcggcggcggggcagtggctgctgcgttttcgtgtctgagtccttcctgggttctaatgagggcgcggttctgctgtgcccggcccgcgaggtctaaggcatgggcttccagcctccggccgctcttcttttgaggcttttccttctgcagggcatcctgaggcttctgtggggggacctgggtgtgtacggcgcggcagtgacctcgctttcatccctccttttatccgaatgtccggccctgcggtcagcgcgtccctggtcggagacaccgagggtgtgaccgtgtccctggcagtgctgcaggacgaggcgggaatattgccaattccgacgtgtggagtgctgaacaatgagacggaagactggagcgtgactgtgatccccggtgcgaaggtgttggaagtgacagtgaggtggaagagaggtctggactggtgttcctccaatgagacagattccttctcagagtccccctgtatcctccagacccttctggtttcagcatctcataattcatcctgttca

SEQ ID NO: 189963 - DNA, 2734 bp, Homo sapiens
  Payload ID: 17509
  Gene Symbol: TCTN3
  Gene Name: tectonic family member 3
  ENST ID: ENST00000265993
  CDS Start-End: 191-2068
ggttgccaggcaacggaggcacggcccggcccgcgttaaggaggagggcgcagaccgaaggacactgaaagagctgtaacaaccccactttcgattggttgaagagctctcagccttctcatgagccaatgagaagaggcacgcggatggcgtcagacgctatgcgactcctcccacccacgctctggcaatgcgattggagaccgcggaggcctacgtcggacccggaggccctgaatgccccatgcgcaccccacagctcgcgctcctgcaagtgttctttctggtgttccccgatggcgtccggcctcagccctcttcctccccatcaggggcagtgcccacgtctttggagctgcagcgagggacggatggcggaaccctccagtccccttcagaggcgactgcaactcgcccggccgtgcctggactccctacagtggtccctactctcgtgactccctcggcccctgggaataggactgtggacctcttcccagtcttaccgatctgtgtctgtgacttgactcctggagcctgcgatataaattgctgctgcgacagggactgctatcttctccatccgaggacagttttctccttctgccttccaggcagcgtaaggtcttcaagctgggtttgtgtagacaactctgttatcttcaggagtaattccccgtttccttcaagagttttcatggattctaatggaatcaggcagttttgtgtccatgtgaacaactcaaacttaaactatttccagaagcttcaaaaggtcaatgcaaccaacttccaggccctggctgcagagtttggaggcgaatcattcacttcaacattccaaactcaatcaccaccatctttttacagggctggggaccccattcttacttacttccccaagtggtctgtaataagcttgctgagacaacctgcaggagttggagctgggggactctgtgctgaaagcaatcctgcaggtttcctagagagtaaaagtacaacttgcactcgttttttcaagaacctggctagtagctgtaccttggattcagccctcaatgctgcctcttactataacttcacagtcttaaaggttccaagaagcatgactgatccacagaatatggagttccaggttcctgtaatacttacctcacaggctaatgctcctctgttggctggaaacacttgtcagaatgtagtttctcaggtcacctatgagatagagaccaatgggacttttggaatccagaaagtttctgtcagtttgggacaaaccaacctgactgttgagccaggcgcttccttacagcaacacttcatccttcgcttcagggcttttcaacagagcacagctgcttctctcaccagtcctagaagtgggaatcctggctatatagttgggaagccactcttggctctgactgatgatataagttactcaatgaccctcttacagagccagggtaatggaagttgctctgttaaaagacatgaagtgcagtttggagtgaatgcaatatctggatgcaagctcaggttgaagaaggcagactgcagccacttgcagcaggagatttatcagactcttcatggaaggcccagaccagagtatgttgccatctttggtaatgctgacccagcccagaaaggagggtggaccaggatcctcaacaggcactgcagcatttcagctataaactgtacttcctgctgtctcataccagtttccctggagatccaggtattgtgggcatatgtaggtctcctgtccaacccgcaagctcatgtatcaggagttcgattcctataccagtgccagtctatacaggattctcagcaagttacagaagtatctttgacaactcttgtgaactttgtggacattacccagaagccacagcctccaaggggccaacccaaaatggactggaaatggccattcgacttctttcccttcaaagtggcattcagcagaggagtattctctcaaaaatgctcagtctctcccatccttatcctgtgcctcttactacttggagttctcaacctagagactatgtgaagaaaagaaaataatcagatttcagttttccctatgagaaactctgaggcagccacttatcttggctaaatagaacctcacctgctcatgaccagagagcatttaggataatagaggacctaactgaaggaatccttgtatatgaaaggagttattttagaaaagcaataaaaatattttattcatcatagctctctgctttgggctctgcaggccaccagatacacatgaggcccctacttctcaagctgggaaggccaagagccttccttcagcctttctggttatgttacacctagctgaatgtttacaaggtctggatccatcagccctcaggcacagttgggccaagcagaaagagagaaacacttctgctgtcaccttgaatgaactcaggaatagcttccctctggactgtagaggagctaactgtttggaacagaaaactgctggctgttgattttgtctggttcctttgccaacatctgggcacaccctttgcccagacacgagtggggaaagcagttctttctcctcagtttccaaagtaaatggggaatcccagctttcttttctactagcaaatgaccctaccatttatttctgcctttttcttccgttcattgtgaggaaaaataaaactggttgagagctttgttgtactaa

SEQ ID NO: 189964 - DNA, 1464 bp, Homo sapiens
  Payload ID: 17509
  Gene Symbol: TCTN3
  Gene Name: tectonic family member 3
  Uniprot ID: Q6NUS6
  ENST ID: ENST00000371209
  CDS Start-End: 1-1332
atgcgcaccccacagctcgcgctcctgcaagtgttctttctggtgttccccgatggcgtccggcctcagccctcttcctccccatcaggggcagtgcccacgtctttggagctgcagcgagggacggatggcggaaccctccagtccccttcagaggcgactgcaactcgcccggccgtgcctggactccctacagtggtccctactctcgtgactccctcggcccctgggaataggactgtggacctcttcccagtcttaccgatctgtgtctgtgacttgactcctggagcctgcgatataaattgctgctgcgacagggactgctatcttctccatccgaggacagttttctccttctgccttccaggcagcgtaaggtcttcaagctgggtttgtgtagacaactctgttatcttcaggagtaattccccgtttccttcaagagttttcatggattctaatggaatcaggcagttttgtgtccatgtgaacaactcaaacttaaactatttccagaagcttcaaaaggtcaatgcaaccaacttccaggccctggctgcagagtttggaggcgaatcattcacttcaacattccaaactcaatcaccaccatctttttacagggctggggaccccattcttacttacttccccaagtggtctgtaataagcttgctgagacaacctgcaggagttggagctgggggactctgtgctgaaagcaatcctgcaggtttcctagagagtaaaagtacaacttgcactcgttttttcaagaacctggctagtagctgtaccttggattcagccctcaatgctgcctcttactataacttcacagtcttaaaggttccaagaagcatgactgatccacagaatatggagttccaggttcctgtaatacttacctcacaggctaatgctcctctgttggctggaaacacttgtcagaatgtagtttctcaggtcacctatgagatagagaccaatgggacttttggaatccagaaagtttctgtcagtttgggacaaaccaacctgactgttgagccaggcgcttccttacagcaacacttcatccttcgcttcagggcttttcaacagagcacagctgcttctctcaccagtcctagaagtgggaatcctggctatatagttgggaagccactcttggctctgactgatgatataagttactcagtatcctttttagagctgggtggcctgttgcagcctaatgagaaaagctgcaaaggctttcaaacttatgttagactagccaaaggtgaggaattttttgttcattataatgaggtacttatatactaatatatggttaatcatttttggaatctagttgtctctctgtggttttctgaggaaaaaaatcacaaatttgtgactcgaacattatgatagtaatacaaaataaatagcattaaaggagaatgagaacataaa

SEQ ID NO: 189965 - DNA, 2514 bp, Homo sapiens
  Payload ID: 17509
  Gene Symbol: TCTN3
  Gene Name: tectonic family member 3
  Uniprot ID: Q6NUS6
  ENST ID: ENST00000371217
  CDS Start-End: 25-1848
ggacccggaggccctgaatgccccatgcgcaccccacagctcgcgctcctgcaagtgttctttctggtgttccccgatggcgtccggcctcagccctcttcctccccatcaggggcagtgcccacgtctttggagctgcagcgagggacggatggcggaaccctccagtccccttcagaggcgactgcaactcgcccggccgtgcctggactccctacagtggtccctactctcgtgactccctcggcccctgggaataggactgtggacctcttcccagtcttaccgatctgtgtctgtgacttgactcctggagcctgcgatataaattgctgctgcgacagggactgctatcttctccatccgaggacagttttctccttctgccttccaggcagcgtaaggtcttcaagctgggtttgtgtagacaactctgttatcttcaggagtaattccccgtttccttcaagagttttcatggattctaatggaatcaggcagttttgtgtccatgtgaacaactcaaacttaaactatttccagaagcttcaaaaggtcaatgcaaccaacttccaggccctggctgcagagtttggaggcgaatcattcacttcaacattccaaactcaatcaccaccatctttttacagggctggggaccccattcttacttacttccccaagtggtctgtaataagcttgctgagacaacctgcaggagttggagctgggggactctgtgctgaaagcaatcctgcaggtttcctagagagtaaaagtacaacttgcactcgttttttcaagaacctggctagtagctgtaccttggattcagccctcaatgctgcctcttactataacttcacagtcttaaaggttccaagaagcatgactgatccacagaatatggagttccaggttcctgtaatacttacctcacaggctaatgctcctctgttggctggaaacacttgtcagaatgtagtttctcaggtcacctatgagatagagaccaatgggacttttggaatccagaaagtttctgtcagtttgggacaaaccaacctgactgttgagccaggcgcttccttacagcaacacttcatccttcgcttcagggcttttcaacagagcacagctgcttctctcaccagtcctagaagtgggaatcctggctatatagttgggaagccactcttggctctgactgatgatataagttactcaatgaccctcttacagagccagggtaatggaagttgctctgttaaaagacatgaagtgcagtttggagtgaatgcaatatctggatgcaagctcaggttgaagaaggcagactgcagccacttgcagcaggagatttatcagactcttcatggaaggcccagaccagagtatgttgccatctttggtaatgctgacccagcccagaaaggagggtggaccaggatcctcaacaggcactgcagcatttcagctataaactgtacttcctgctgtctcataccagtttccctggagatccaggtattgtgggcatatgtaggtctcctgtccaacccgcaagctcatgtatcaggagttcgattcctataccagtgccagtctatacaggattctcagcaagttacagaagtatctttgacaactcttgtgaactttgtggacattacccagaagccacagcctccaaggggccaacccaaaatggactggaaatggccattcgacttctttcccttcaaagtggcattcagcagaggagtattctctcaaaaatgctcagtctctcccatccttatcctgtgcctcttactacttggagttctcaacctagagactatgtgaagaaaagaaaataatcagatttcagttttccctatgagaaactctgaggcagccacttatcttggctaaatagaacctcacctgctcatgaccagagagcatttaggataatagaggacctaactgaaggaatccttgtatatgaaaggagttattttagaaaagcaataaaaatattttattcatcatagctctctgctttgggctctgcaggccaccagatacacatgaggcccctacttctcaagctgggaaggccaagagccttccttcagcctttctggttatgttacacctagctgaatgtttacaaggtctggatccatcagccctcaggcacagttgggccaagcagaaagagagaaacacttctgctgtcaccttgaatgaactcaggaatagcttccctctggactgtagaggagctaactgtttggaacagaaaactgctggctgttgattttgtctggttcctttgccaacatctgggcacaccctttgcccagacacgagtggggaaagcagttctttctcctcagtttccaaagtaaatggggaatcccagctttcttttctactagcaaatgaccctaccatttatttctgcctttttcttccgttcattgtgaggaaaaataaaactggttgagagctttgttgtactaa

SEQ ID NO: 189966 - DNA, 1778 bp, Homo sapiens
  Payload ID: 17509
  Gene Symbol: TCTN3
  Gene Name: tectonic family member 3
  Uniprot ID: Q6NUS6
  ENST ID: ENST00000430368
  CDS Start-End: 28-1407
gtcggacccggaggccctgaatgccccatgcgcaccccacagctcgcgctcctgcaagtgttctttctggtgttccccgatggcgtccggcctcagccctcttcctccccatcaggggcagtgcccacgtctttggagctgcagcgagggacggatggcggaaccctccagtccccttcagaggcgactgcaactcgcccggccgtgcctggactccctacagtggtccctactctcgtgactccctcggcccctgggaataggactgtggacctcttcccagtcttaccgatctgtgtctgtgacttgactcctggagcctgcgatataaattgctgctgcgacagggactgctatcttctccatccgaggacagttttctccttctgccttccaggcagcgtaaggtcttcaagctgggtttgtgtagacaactctgttatcttcaggagtaattccccgtttccttcaagagttttcatggattctaatggaatcaggcagttttgtgtccatgtgaacaactgtttcctagagagtaaaagtacaacttgcactcgttttttcaagaacctggctagtagctgtaccttggattcagccctcaatgctgcctcttactataacttcacagtcttaaaggttccaagaagcatgactgatccacagaatatggaggcttttcaacagagcacagctgcttctctcaccagtcctagaagtgggaatcctggctatatagttgggaagccactcttggctctgactgatgatataagttactcaatgaccctcttacagagccagggtaatggaagttgctctgttaaaagacatgaagtgcagtttggagtgaatgcaatatctggatgcaagctcaggttgaagaaggcagactgcagccacttgcagcaggagatttatcagactcttcatggaaggcccagaccagagtatgttgccatctttggtaatgctgacccagcccagaaaggagggtggaccaggatcctcaacaggcactgcagcatttcagctataaactgtacttcctgctgtctcataccagtttccctggagatccaggtattgtgggcatatgtaggtctcctgtccaacccgcaagctcatgtatcaggagttcgattcctataccagtgccagtctatacaggattctcagcaagttacagaagtatctttgacaactcttgtgaactttgtggacattacccagaagccacagcctccaaggggccaacccaaaatggactggaaatggccattcgacttctttcccttcaaagtggcattcagcagaggagtattctctcaaaaatgctcagtctctcccatccttatcctgtgcctcttactacttggagttctcaacctagagactatgtgaagaaaagaaaataatcagatttcagttttccctatgagaaactctgaggcagccacttatcttggctaaatagaacctcacctgctcatgaccagagagcatttaggataatagaggacctaactgaaggaatccttgtatatgaaaggagttattttagaaaagcaataaaaatattttattcatcatagctctctgctttgggctctgcaggccaccagatacacatgaggcccctacttctcaagctgggaaggccaagagccttccttcagcctttctggttatgttacacctagctgaatgtttacaaggtctggatccatcagccctcaggcacagttgggccaagcagaaagagagaaacactt

SEQ ID NO: 189967 - DNA, 2739 bp, Homo sapiens
  Payload ID: 17509
  Gene Symbol: TCTN3
  Gene Name: tectonic family member 3
  Uniprot ID: Q6NUS6
  ENST ID: ENST00000614499
  CDS Start-End: 245-2068
ggttgccaggcaacggaggcacggcccggcccgcgttaaggaggagggcgcagaccgaaggacactgaaagagctgtaacaaccccactttcgattggttgaagagctctcagccttctcatgagccaatgagaagaggcacgcggatggcgtcagacgctatgcgactcctcccacccacgctctggcaatgcgattggagaccgcggaggcctacgtcggacccggaggccctgaatgccccatgcgcaccccacagctcgcgctcctgcaagtgttctttctggtgttccccgatggcgtccggcctcagccctcttcctccccatcaggggcagtgcccacgtctttggagctgcagcgagggacggatggcggaaccctccagtccccttcagaggcgactgcaactcgcccggccgtgcctggactccctacagtggtccctactctcgtgactccctcggcccctgggaataggactgtggacctcttcccagtcttaccgatctgtgtctgtgacttgactcctggagcctgcgatataaattgctgctgcgacagggactgctatcttctccatccgaggacagttttctccttctgccttccaggcagcgtaaggtcttcaagctgggtttgtgtagacaactctgttatcttcaggagtaattccccgtttccttcaagagttttcatggattctaatggaatcaggcagttttgtgtccatgtgaacaactcaaacttaaactatttccagaagcttcaaaaggtcaatgcaaccaacttccaggccctggctgcagagtttggaggcgaatcattcacttcaacattccaaactcaatcaccaccatctttttacagggctggggaccccattcttacttacttccccaagtggtctgtaataagcttgctgagacaacctgcaggagttggagctgggggactctgtgctgaaagcaatcctgcaggtttcctagagagtaaaagtacaacttgcactcgttttttcaagaacctggctagtagctgtaccttggattcagccctcaatgctgcctcttactataacttcacagtcttaaaggttccaagaagcatgactgatccacagaatatggagttccaggttcctgtaatacttacctcacaggctaatgctcctctgttggctggaaacacttgtcagaatgtagtttctcaggtcacctatgagatagagaccaatgggacttttggaatccagaaagtttctgtcagtttgggacaaaccaacctgactgttgagccaggcgcttccttacagcaacacttcatccttcgcttcagggcttttcaacagagcacagctgcttctctcaccagtcctagaagtgggaatcctggctatatagttgggaagccactcttggctctgactgatgatataagttactcaatgaccctcttacagagccagggtaatggaagttgctctgttaaaagacatgaagtgcagtttggagtgaatgcaatatctggatgcaagctcaggttgaagaaggcagactgcagccacttgcagcaggagatttatcagactcttcatggaaggcccagaccagagtatgttgccatctttggtaatgctgacccagcccagaaaggagggtggaccaggatcctcaacaggcactgcagcatttcagctataaactgtacttcctgctgtctcataccagtttccctggagatccaggtattgtgggcatatgtaggtctcctgtccaacccgcaagctcatgtatcaggagttcgattcctataccagtgccagtctatacaggattctcagcaagttacagaagtatctttgacaactcttgtgaactttgtggacattacccagaagccacagcctccaaggggccaacccaaaatggactggaaatggccattcgacttctttcccttcaaagtggcattcagcagaggagtattctctcaaaaatgctcagtctctcccatccttatcctgtgcctcttactacttggagttctcaacctagagactatgtgaagaaaagaaaataatcagatttcagttttccctatgagaaactctgaggcagccacttatcttggctaaatagaacctcacctgctcatgaccagagagcatttaggataatagaggacctaactgaaggaatccttgtatatgaaaggagttattttagaaaagcaataaaaatattttattcatcatagctctctgctttgggctctgcaggccaccagatacacatgaggcccctacttctcaagctgggaaggccaagagccttccttcagcctttctggttatgttacacctagctgaatgtttacaaggtctggatccatcagccctcaggcacagttgggccaagcagaaagagagaaacacttctgctgtcaccttgaatgaactcaggaatagcttccctctggactgtagaggagctaactgtttggaacagaaaactgctggctgttgattttgtctggttcctttgccaacatctgggcacaccctttgcccagacacgagtggggaaagcagttctttctcctcagtttccaaagtaaatggggaatcccagctttcttttctactagcaaatgaccctaccatttatttctgcctttttcttccgttcattgtgaggaaaaataaaactggttgagagctttgttgtactaattcca

SEQ ID NO: 189968 - DNA, 655 bp, Homo sapiens
  Payload ID: 17510
  Gene Symbol: TECPR1
  Gene Name: tectonin beta-propeller repeat containing 1
  ENST ID: ENST00000420697
  CDS Start-End: 367-655
agagtggcgccccagctgcagcggcggccagggccgtgggaaagaatggggcgatgaagggctgggcacgccgccttccccaccacccccaggctgtttgctcgcggggagggaggaaggagggaccgcacttgtcatctcgcctgcacacctggaaggtgccgcccccgtcccctgccctggaacgcccacaggctagcgaagttgcctggtgcaggaccctgatgtcgcttttgaacagcccctgcacctggcagccagcgagctactgtagtaggcattgccgactgtttgcataccggatgggagtgacagtgtaatagaaaaacaagcaagaaaccttttaggttacctccagccgctgccatgcccaactcagtgctgtgggcggtggacctcttcgggagagtgtacacgctgtccacagcaggccagtactgggaaatgtgcaaggactcccagctggagttcaagcgcgtcagcgccaccacgcagtgctgctggggcattgcctgtgacaaccaggtctacgtgtatgtgtgtgccagcgatgtccccatccgccgccgagaggaggcctatgagaatcaggcttgggtccaaggccgcctctgtgtccccggccctcagcgctggaatcccatgggcggcttct

SEQ ID NO: 189969 - DNA, 6564 bp, Homo sapiens
  Payload ID: 17510
  Gene Symbol: TECPR1
  Gene Name: tectonin beta-propeller repeat containing 1
  Uniprot ID: Q7Z6L1
  ENST ID: ENST00000447648
  CDS Start-End: 301-3798
aatgggcacggggcctgatgccgcttccggcccaccctcttgcccggtccccgggagggccggtccgctcctcccggacgccgaggacctaccaccgcgacttcgccccgcccggcgcgggcccaggaccctgatgtcgcttttgaacagcccctgcacctggcagccagcgagctactgtagtaggcattgccgactgtttgcataccggatgggagtgacagtgtaatagaaaaacaagcaagaaaccttttaggtaggactcctaaggctcagaggaagttacctccagccgctgccatgcccaactcagtgctgtgggcggtggacctcttcgggagagtgtacacgctgtccacagcaggccagtactgggaaatgtgcaaggactcccagctggagttcaagcgcgtcagcgccaccacgcagtgctgctggggcattgcctgtgacaaccaggtctacgtgtatgtgtgtgccagcgatgtccccatccgccgccgagaggaggcctatgagaatcagcgctggaatcccatgggcggcttctgtgagaagctcctgctgagtgaccgctgggggtggagtgacgtgagtgggctccagcaccggccgctggacagggtggcactgccctcgccgcactgggagtgggagtctgactggtacgtggatgagaattttggaggtgaacccactgagaaaggggggtggacgtacgccatcgactttcccgccacctacacgaaagacaagaagtggaattcttgtgtgcggcgccggaagtggatccggtacaggagatacaagtcccgggacatctgggccaagatcccctcgaaggatgaccccaaggagctgcccgaccccttcaacgacctctctgtagggggctgggagatcacggaggagcctgtgggccgcctgtcagtgtgggctgtgtctctgcagggcaaggtgtggtacagagaggacgtcagccactccaaccccgaagggtcctcctggtccctgctggacacccccggggaggtggttcagatcagctgtgggccccacgacctcctgtgggccacactctgggagggacaggccctggtccgggaaggaatcaacaggagcaatcccaaaggaagttcctggtccatcgtggagcctcctggatctgaaaacggggtcatgcacatctcggtgggagtcagcgtggtctgggctgtcaccaaggactggaaggtgtggttccgaagaggcgtcaactctcacaatccctgcggcaccagttggattgagatggttggtgagatgacgatggtgaacgtgggaatgaacgaccaggtgtggggcattggctgtgaggaccgagccgtgtacttccggcagggtgtcacccccagcgagctcagtgggaagacctggaaagccatcatcgcggcccgagagtgtgaccggtcacactctggcagctcgtctagtctcctcagtgccggctgcttcttcggtgatgaggtgaggggtagtggcgagtctgcccccagcgacaccgatgcctcctcggaagtcgagagaccagggcctggccagattctccctgcagaacctctagacgattccaagaatgccacagggaactcagcctcaggcctgggggctggcaggaccgcagaagataccgtggaagatgcctgcccagccgagggcagcagggaggccagacccaacacgcaccccggcccggcccccaccccggccgagctgccctggaccaatattgacctcaaggaggccaagaaagtgcccagccactcggccgctggcttccccgagaccaccagcctctcctctctggggctcctcccactgggcttggaggagccgtatggggtggatgaccacccgctgtgggcctgggtgtcgggaggcggctgcgtggtggaggcatgtgccatgcccagatggttcactgtccaggcgggcctgtcctcctcggtacacatgctgtccctgtccatcacgccggcccagaccgctgcctggaggaagcagatcttccagcagctcacggaaaggaccaagcgggagctggagaacttcagacactacgagcaggccgtggagcagtcggtgtgggtgaagaccggggcgctgcagtggtggtgcgactggaagccccacaagtgggtggacgtgcgcttggccctggagcagttcacggggcacgacggcgtccgggacagcatcctcttcatctactatgtggtccacgaggagaagaagtacatccacatattcctgaatgaggtggtggcgctggtcccagtgctgaacgagaccaagcactcctttgccctgtacacccctgagcggacacggcagaggtggccggtgcgtctggctgctgccaccgagcaggacatgaatgactggctcgccctgctcagcctgtcttgctgcgagagccggaaggtgcagggccgcccgtccccgcaggccatctggtccatcacctgcaagggggacatcttcgtgagcgagcccagcccagacctggaggcccacgagcaccccctgccctgcgaccagatgttttggcggcagatgggaggccacctgcggatggtggaggccaacagccggggcgtggtgtggggcatcggctatgaccacacggcctgggtatacacaggcggctatggaggcggctgcttccaaggcctggccagcagcaccagtaacatctacacgcagtcagacgtgaagtgtgttcacatctatgagaaccagcgctggaaccccgtcacaggctacaccagcaggggtctgcccacggaccggtacatgtggagcgatgcctcggggctgcaggagtgcacgaaggctggcacgaagcccccgtccctgcagtgggcctgggtttccgactggttcgtggatttcagcgttccggggggcacggaccaggaggggtggcagtatgccagcgacttccctgcctcataccatgggtccaaaacgatgaaggattttgtgaggaggaggtgctgggccagaaaatgcaagctggtgaccagtgggccctggctggaggtgccccccatcgccctcagggacgtgtccatcatcccggagagcccgggtgccgaggggagtgggcacagcatcgccctctgggccgtcagcgacaagggggatgtgctgtgccgcctgggcgtgtcggagctcaaccctgcgggctcctcctggctgcacgttggcaccgaccagcccttcgcctccatctccatcggggcctgctaccaggtgtgggccgtggcaagggacggctccgccttctaccggggatccgtgtacccctcgcagccagccggtgactgctggtaccacatcccgtccccaccgagacagaggctgaagcaggtgtccgcggggcagacgtcggtgtatgccctggatgagaatggaaacctgtggtatcgccaagggatcacgcccagctacccgcagggctccagctgggagcacgtgtccaacaacgtgtgccgagtgtccgtggggcccctggaccaggtctgggtgatcgccaacaaagtgcagggcagccacagcctgagccgggggacagtgtgtcatcgcaccggcgtgcagcctcacgagcccaagggccacggctgggactacggcatcgggggaggctgggaccatatctctgtccgggccaatgccaccagggccccccggagctcgtcccaggagcaggagccgagtgccccaccagaggcccatggccccgtctgctgctgaggcccccccacacacctacatgcagggacggtgcccagtttgggggatcaaggctgagccattcttgtgctggagtgtgcaccgtgggagcaatgtggcccaggtggactcaggagggaacctggccccaaggctgcggccacttcagaggcactggctgagacggccctgaaatgtgaagctccgcggacactcccacacgtgtccccgtctgcgaggagtcccggggtgtggggcatggggtggggctgcacctcccagaggcccctcccacccttcccttcccctctcccttctgcctttccaggactagaaccgggaacctggagccctccgggaacgccggccctggggcagcagagccaggatggagccctcctgagctggcatctcagacagcacccgggcccgccacccctcaccaagagagatggccatggggctcagggcctctttaccatgtgcagtgaccatttctcagagcaggacttgcaaagaggctttaatttcaaaagtgaaggaaggaggccaggcgccgtggctcacgcctgtaatcccagcactttgggaggctgaggtgggcagatcacctaggtcaagagtttcaaaccagacgggccaacatggtgaaaccccatctctgctaaaaatacaaaaaaaaaaaaattagctgggcatggtggtgggtgcctgtaatcccagctactcgggaggctgaggcaggagaatcgtttgaacccgggaggcggaggctgcagtgagccgagatcatgccactgcactccagcctgggcgacagagactccatctcaaaaaaaaaaaaaaaaaaaagtgaaggaaggagacagcagattggaaataacactggagtggatgggatgtcctcttccctgagggggccggggtaccagacgggaggctgggagaggatgagaggctgccccatggctggaggcagtgtccgtgtgtgcagtcaccatcatcaacccccattcggccccttccccagatgcgctggtgacaggggcttcttggatgtcaaatcatgttgtaggagggtgcagactgcgggcttctgtggggagcagtactactgtgtctgtcggcagtggccatgggaccctcagcccgtcctgtacatggagcagggtgcacagtcaccctccatcctgtggcgagaggctggcccggcccggccaggcgaggcagaaggtgtcggccaagtggccccgaccccatcccgcagtctctcagctgctttttattacctctgtgccccatttgggagtttgcttcctccacctggacactttgcccgggaggtcatcagagcccaaccccaggctctgctcggttggagaggggatgacttcaccaccacctgaccttcctagggtcctggtctcactgtcagctgggggtccgttgtgtgtatttgtacagttttgctgtatggggtttgtcacccaaaagctgatgctgagaaaggcctccctggggcccctcccgcgggcatctgagagacctggtgttccagtgtttctggaaatgggtcccagtgccgccggctgtgaagctctcagatcaatcacgggaagggcctggcggtggtggccacctggaaccaccctgtcctgtctgtttacatttcactatcaggttttctctgggcattacgatttgttcccctacaacagtgacctgtgcattctgctgtggcctgctgtgtctgcaggtggctctcagcgaggtacggggagggcgtcaccctgcagaacggcagagtgacgcgtcctctcgctgctgagcaccagctgtttacctgccctgcatcacttcctcggatactttactcaataagcatttcccctggagtgtccgtgccctggtgttttttatcgatacgttgattaaaacgcgtggttccccgtgtgcctgaagcagacattgctgtgaaatcttttatttttgttttatgacacagcatcaatttcatgaatactttgaaagggccattagaaaaaataagagccaatttgggtcatttgagaaacattttcagcacaattacagtgggggcacgggccgttcggctccagctgggttttcccagatgcaacaatcgcggttctggcttctccactggtggggatggggatcgcgccttcggagctctcagggcgcctgtctgtcgggggctgggtgcgtccacagccccgggggatggcgcgtggcgtagcccaggaacggcatgtgggtgggtctctgacctgcttgtgcagggacttgagggacctcatcccgatggccgaggcaggggctccccacgggataaaaggatccggcctggccttggggtccaagaggagggccaagggagtggacctggcccctgtcccctctcctcctcgaaacactggacaccctgaagcgagactatggctgctgaggatcctgtgtgatgtggccgcggggcgtcccctctggcctcaggggaagaaggactgggcggctcggcccaggtcaccctctaggaagcagaggaggtgcaggtgccagttcagggcagaaagaaagagccactgaggccattgtcctgaaggcggtgacccccaggcactcctgctgccccccaggaagccctgggctgcgctggacaccgggccgagtctccgtcttctggaccgaggctcttctgggctttcaggctcagctcgtcggtccattcagcaagttcaggggcagactgagccctgctctggccat

SEQ ID NO: 189970 - DNA, 590 bp, Homo sapiens
  Payload ID: 17510
  Gene Symbol: TECPR1
  Gene Name: tectonin beta-propeller repeat containing 1
  ENST ID: ENST00000423128
  CDS Start-End: 288-590
acaggctagcgaagttgcctggtgcaggtgacgcccccattccagcctttggactggagccataggagaagcggatcgcgggatcctggttgttttcgagaatcacgcagcaaggggcctgcctatccctctccctgggaccctgatgtcgcttttgaacagcccctgcacctggcagccagcgagctactgtagtaggcattgccgactgtttgcataccggatgggagtgacagtgtaatagaaaaacaagcaagaaaccttttaggttacctccagccgctgccatgcccaactcagtgctgtgggcggtggacctcttcgggagagtgtacacgctgtccacagcaggccagtactgggaaatgtgcaaggactcccagctggagttcaagcgcgtcagcgccaccacgcagtgctgctggggcattgcctgtgacaaccaggtctacgtgtatgtgtgtgccagcgatgtccccatccgccgccgagaggaggcctatgagaatcagcgctggaatcccatgggcggcttctgtgagaagctcctgctgagtgaccgctgggggtggagtgacgtgagtgggctc

SEQ ID NO: 189971 - DNA, 552 bp, Homo sapiens
  Payload ID: 17510
  Gene Symbol: TECPR1
  Gene Name: tectonin beta-propeller repeat containing 1
  ENST ID: ENST00000415086
  CDS Start-End: 256-552
ggtccccgggagggccggtccgctcctcccggacgccgaggacctaccaccgcgacttcgccccgcccggcgcgggcccaggaccctgatgtcgcttttgaacagcccctgcacctggcagccagcgagctactgtagtaggcattgccgactgtttgcataccggatgggagtgacagtgtaatagaaaaacaagcaagaaaccttttaggtaggactcctaaggctcagaggaagttacctccagccgctgccatgcccaactcagtgctgtgggcggtggacctcttcgggagagtgtacacgctgtccacagcaggccagtactgggaaatgtgcaaggactcccagctggagttcaagcgcgtcagcgccaccacgcagtgctgctggggcattgcctgtgacaaccaggtctacgtgtatgtgtgtgccagcgatgtccccatccgccgccgagaggaggcctatgagaatcaggcttgggtccaaggccgcctctgtgtccccggccctcagcgctggaatcccatgggcggcttctgtgagaag

SEQ ID NO: 189972 - DNA, 8686 bp, Homo sapiens
  Payload ID: 17511
  Gene Symbol: TECPR2
  Gene Name: tectonin beta-propeller repeat containing 2
  Uniprot ID: O15040
  ENST ID: ENST00000359520
  CDS Start-End: 227-4462
cccccggcggagccagctgctgctcttcggtgctggccccggtgccggccccgttgcccagggaacaggctcccggcagcccccgcggcccggagtccatcccgcctcctccggcccggcggggccgacgagtccggaggggctgccgcgggagcccccaggtttccctagatgacaaataaacattccttttcctgcgtgaagatagtctgtggaaaccttggccatggcatcgatatcagagcctgttacattcagagagttctgcccgttgtactatctcctcaatgccattccgacaaagatccagaagggtttccgctctatcgtggtctatctcacggccctcgacaccaacggggactacatcgcggtgggcagcagcatcggcatgctctatctgtactgccggcacctcaaccagatgaggaagtacaactttgaggggaagacggaatctatcactgtggtgaagctgctgagctgctttgatgacctggtggcagcaggcacagcctctggcagggttgcagtttttcaacttgtatcttcattgccagggagaaataaacagcttcggagatttgatgtcactggtattcacaaaaatagcattacagctctggcttggagccccaatggaatgaaattgttctctggagatgacaaaggcaaaattgtttattcttctctggatctagaccaggggctctgtaactcccagctggtgttggaggagccatcttccattgtgcagctggattatagccagaaagtgctgctggtctctactctgcaaagaagtctgctcttttacactgaagaaaagtctgtaaggcaaattggaacacaaccaaggaaaagtactgggaaatttggtgcttgttttataccaggactctgtaagcaaagtgatctaaccttgtatgcgtcacggcccgggctccggctatggaaggctgatgtccacgggactgttcaagccacgtttatcttaaaagatgcttttgccgggggagtcaagccttttgaactgcacccgcgtctggaatcccccaacagtggaagttgcagcttacctgagaggcacctggggcttgtttcatgtttctttcaagaaggctgggtgctgagttggaatgaatatagtatctatctcctagacacagtcaaccaggccacagttgctggtttggaaggatccggtgatattgtgtctgtttcgtgcacagaaaatgaaatatttttcttgaaaggagataggaacattataagaatttcaagcaggcctgaaggattaacatcaacagtgagagatggtctggagatgtctggatgctcagagcgtgtccacgtgcagcaagcggagaagctgccaggggccacagtttctgagacgaggctcagaggctcttccatggccagctccgtggccagcgagccaaggagcaggagcagctcgctcaactccaccgacagcggctccgggctcctgccccctgggctccaggccacccctgagctgggcaagggcagccagcccctgtcacagagattcaacgccatcagctcagaggactttgaccaggagcttgtcgtgaagcctatcaaagtgaaaaggaagaagaagaagaagaagacagaaggtggaagcaggagcacctgtcacagctccctggaatcgacaccctgctccgaatttcctggggacagtccccagtccttgaacacagacttgctgtcgatgacctcaagtgtcctgggcagtagcgtggatcagttaagtgcagagtctccagaccaggaaagcagcttcaatggtgaagtgaacggtgtcccacaggaaaatactgaccccgaaacgtttaatgtcctggaggtgtcaggatcaatgcctgattctctggctgaggaagatgacattagaactgaaatgccacactgtcaccatgcacatgggcgggagctgctcaatggagcgagggaagatgtgggaggcagtgatgtcacgggactcggagatgagccgtgtcctgcagatgatggaccaaatagcacacagttacccttccaagaacaggacagctctcctggggcgcatgatggggaagacatccaacccattggcccccaaagcactttttgtgaagtccccctcctgaactcactcactgtgccttccagcctcagctgggccccaagtgctgaacagtggctgcctgggaccagagctgatgaaggcagccccgtggagcccagccaagagcaggacatcctaaccagcatggaggcctctggccacctcagcacaaatctctggcatgctgtcactgatgatgacacaggtcagaaagaaatacccatttctgaacgtgtcttggggagtgtgggaggacagctgactccggtctctgccttggcagccagcactcacaagccctggcttgagcagcctccacgggatcagacattgacgtccagcgatgaggaggacatctatgcccacgggcttccttcttcatcctcagagacgagtgtgacagagctcggacctagttgctcccagcaggacctgagccggctgggtgcagaggacgccgggctgctcaagccagatcagtttgcagaaagctggatgggctactcgggtcccggctatggcatcctcagcttggtggtctccgagaagtatatctggtgcctggactacaaaggcggcctgttctgcagcgcgttgccgggcgccgggctgcgctggcagaagtttgaagatgctgtccagcaggtggcagtctcgccctcaggagcccttctctggaagattgaacagaaatctaaccgggcttttgcttgtgggaaagtcaccatcaaggggaagcggcactggtacgaagccctgccccaggcagtgtttgtggccctgagcgatgacacggcctggatcatcaggaccagtggggacctatacttgcagacaggtctgagcgtggatcgcccttgtgccagagccgtaaaggtggactgtccctacccgctgtcccagatcacagcccggaacaatgtggtgtgggcgctgacagagcagagggccctcctgtaccgggagggcgtgagcagcttctgtccggaaggcgagcagtggaagtgtgacattgtcagcgaaaggcaagctttagaacccgtctgcataacgctcggggatcagcagactctctgggccctggacatccatgggaacctgtggttcagaactggcattatttccaagaagccccaaggagatgacgaccattggtggcaagtgagcatcacggactatgtggtgtttgaccagtgcagcttatttcagacgataatccatgccactcactcggtggccacagcagcccaagcccccgtagaaaaggtggcagataagctgcgcatggcgttttggtcccagcagcttcagtgccagccaagccttctcggggtcaataacagcggtgtctggatctcctcgggcaagaatgaattccacgtcgctaagggaagtctcataggcacctactggaatcatgtggttccccgtgggacagcttctgctacaaaatgggcctttgtgttggcttctgcagctcccacgaaggaaggaagcttcctgtggctgtgccagagcagcaaggacctgtgcagcgtcagcgcccagagcgcacagtcgcggccctccacggtgcagctgcctcccgaagccgagatgcgcgcctatgccgcctgccaggatgcgctgtgggcgctggacagcctcggccaggtgttcatcaggacgctctccaagagctgccccacgggcatgcactggaccaggctggacctctcccagctaggagctgtaaaattgacaagcttggcatgtggaaatcagcacatctgggcctgtgattccaggggtggagtttacttccgtgtagggactcagcctctcaatcccagtctcatgcttccagcctggataatgattgagccacctgtccagcccgccggggtcagcttggtcagcgtccattccagccccaacgaccagatgctgtgggtgcttgacagcaggtggaacgtgcacgtgcggaccgggatcaccgaggagatgcctgtggggaccgcctgggagcatgtgccagggttgcaggcctgccagctggcgctgagcaccaggaccgtgtgggcccgctgtccaaacggagacctcgcccggcggtacggcgtcacagacaagaaccccgccggggactactggaagaaaattcccggcagcgtgtcgtgtttcacagtgactgcgtcagatgagctgtgggctgtgggcccgcccggctacctcctccaacggctgacaaagacgttcagccactcgcacggcacccagaagagcagccaggccgccatgccccaccctgaggacctggaggacgagtgggaggtcatctgaaggagccctggccgagtcacgcggaggggcccggcgtctgtggcgggcacaggggcttcagagtgactccctggtggacgcgctgcctcaacacttgtccagacacctctggccaggttggacccgcacacttactttcatctatgttggtttctgtctcgttccagaacccacagcctccacccgtggctggcgtgattgctgcagcagtggcgcctcctagctcaggacagtggcgactgcccggctgcatgcactccgattacccacgtgctgccgtcctggtctcatccacagatagctccagcttttgttggtgggagtggtctccggaggcctcccagaaccaagggtagccgggcagctggtttggcccagggcctccttccacattagtagccccagggccagatggagccaaaggtcagctctctgcagcgcgggatgtgctcggtgatggctttgtcccatcataggggggtgtccccccagagacaaagctgcagagcacattccatgccagacgctctggccaggaagctgaggccgggcttgagaggagagcgctggccatgccaggagagaacccacgcacatgcacaccacaacacacaacacacctcacctcacaccacagcacacctcaccacaccacaccgcactgcaccatacctcaccacatctcaccacaccacagcacacctcaccacacaacacaccacaccccacaccgcactgcaccgcaccgcaccgcaccgtacctcgccacatctcaccacaccacaccacaccacacctcactgcccacacacggcgcaggctgcccgcctcctggagagcacacttcagctgaaacagtaaagcctgatgggtgcaaatggaacctggatgtgtgcacgtgtgtcccaggtagggacggcacaggagggtgcatggggcgtgggggagctgagcaagggtcgctcacttagaaatgtctttggaatggtgtttaactaatgctgctggcggacatcctaaaaccagatgcatcctcagaggacgagtctactaattattgcctttgttgttgtattacaaatctgcataaaatacctcatttcaaatcaaatcttacaaatttagaagagagatatgttttccgaaaacagtggaagccctttgttccttcccgggtttgtcctgagcctgcactgtcctcgcctgcagcctcagaggggcaggcatccccgcacagacttgactggcagggcggtcacgggacctgcgggctggctccgagtggcagcccatgccttctgcggggtatgggttgacacttgacaggttgaaaccagtgcctctatggacggctgctgtggccccttcagacaatgggcagtgcccaccccgcccactggcatctgcgtgtgagggctaggccgccctgccacacatcccgccccctcccggaggcagcttcaggacaggacaccaggctggctgctttttttagcctgcccctggcccaggcccagtccttggtgtcagggagcccccaggccgcaggtggagggtgataaaatatgttctctgacaggacccagccagccacataggtggaggttttccatgtccaaatgaggtcaagatgccgaaatcccagatctgacttcacacttcccttttctagaaccttttgtaaaagttggtggcagcagaggcagccccaggccgggctgcatctctctgtgtctgttgtgccttgcccggcgcctcacggatggcaaagctctcctcacccatgggactgtagtgcaattaaacccgcgtctaggtgatgcttttaaagttgtagcttcgtgctttgtacagttttctttctggttttaatttttagttgtgctttgagtcagtgcaataaactagactttttccaaacctggccgagtgtggtgcctgagctgtgagaagtgtcctcagccgacactcacgagggcagtgcaagggagaacctgccagcccagccccaccacagggagagtgcgtcagcagacctgtcctggcctggctggtgttgaaatacacaccggtttgcccaagtggctgttatgggggaatggccgctccagagctggctgtaccccatggtagcctctgaggaggacgctgtggggtgaggtccagggctgcctcctcatggagctgtgtgtgagcaggcgttggaggggttcgagcccctggttctgtatcttcagccagcaaacgaaaccatatcgcaaaccagagctgctggaaaccagcacacgcaaaagatgacgcccagcacagcagcaggacacaccatgtgccaggaaatgacctcagcaagaaacctcaggccgtgtgaagagcagcaaagctttccagaaggcataaaaggaaacttgaataaaggaagatatgttccacattcctggatggaggactacacacattatggaaagacctcattctttccaaaggaatttataggtgtagcttgatttcagttcaaatccccactgggattgttttgttggggcaggcagggaggaataatgttagtacccacaaatgcccatgactgtgcccaatgtgcttctcaccagagccctgcaaggggaagtctcattagccccttgagactcagagaggttaggtaacttgctcaaggtcacacagcactgggactggaagccagctctgtagaactgcagacctgtgctgtttgatgcctcctcactgtcccgtcactcctgggaagaagaaacgggtgagaactgctaagtgatgacaggtggagccccagcaggggccactctattgaatggcatggcccagaccctcggagggccaggcaacaggctagcaaggcccacagggagggagcagaatggagagggcatctcagatgcgcttaaggagcggcgggggcggggcatggggggtgtcacaactaatgtggccactgcttcattctctgggcaaaataatattaaatggattaaagaatctaaaaccagtgggaaaactgtctgatttctggatggcaaaggctttctaaactcaaaagtgataggacaagctacagaggaaaataagtacatagatttgatttctccaaaatacagaaatgctgctgggcacagtgatgtgcagttatagtcccagctacttgggaggccaaggcaggaggattacttgagcccaggagtttgaggctgcaatgaactatgatcacaccactgcactccagcctcggcgacagagcaagaccttgtttctcaaaaataaataaatagaaggaaataaatgtaaaaatgctgcaaattaaaaacctcaaagaagggaaataattgcaacaaatgggaattgatgttgaatatttaccttaaaaacctatacaacaataagaggagtgcgcccttcagcagcatgtatacaaaaattgcaacgatacagagattagcatggcccctgcacaaggatgactcgcaaattcataaagctttccataaatatatttattaaaaaccaataggaggagcacttcgagtcgagtgtaagggcccttcacaaaagcagaaggaacactggcccaaacccccagcaccccggaagcagaggtgagatgggagcagcttgggagccccccattggcgccgccctactggggaagccggtccgtacgtaggccttgcatctcgccacctccacttctgtcctcaagaacaagtcctaggtcaagggaaacagcacagcctgtttataattaggaaacacttaaaacagcctggcatttgggaacagccatgttaacgtgagcaaattcctctcatgaaatagcctgcagctattaagaagcacgtgtgtgcaggaagcggaggcgcaggacctcaccgcgccagcgtgaagttcccgggcatggtcatgaaagcgtggttctgtaagaaatcagagggagaaagggagagaagggggagggagacaacccaaacgttggagggtatttgttgtaaacttcaaacttttggcaggtttgaaatttttcataactccggggaggagcaagaggggtgaaaagaaacaagttctctacttgtgatcagcagctggtcatagtggttgcctggagtatatgcctttttgtatcctttgaatttccagccatgtaaatgtattatttattccaaaaataaagcagatttacattttaaaaattca

SEQ ID NO: 189973 - DNA, 4281 bp, Homo sapiens
  Payload ID: 17511
  Gene Symbol: TECPR2
  Gene Name: tectonin beta-propeller repeat containing 2
  Uniprot ID: O15040
  ENST ID: ENST00000558678
  CDS Start-End: 111-3914
cggcggggccgacgagtccggaggggctgccgcgggagcccccaggtttccctagatgacaaataaacattccttttcctgcgtgaagatagtctgtggaaaccttggccatggcatcgatatcagagcctgttacattcagagagttctgcccgttgtactatctcctcaatgccattccgacaaagatccagaagggtttccgctctatcgtggtctatctcacggccctcgacaccaacggggactacatcgcggtgggcagcagcatcggcatgctctatctgtactgccggcacctcaaccagatgaggaagtacaactttgaggggaagacggaatctatcactgtggtgaagctgctgagctgctttgatgacctggtggcagcaggcacagcctctggcagggttgcagtttttcaacttgtatcttcattgccagggagaaataaacagcttcggagatttgatgtcactggtattcacaaaaatagcattacagctctggcttggagccccaatggaatgaaattgttctctggagatgacaaaggcaaaattgtttattcttctctggatctagaccaggggctctgtaactcccagctggtgttggaggagccatcttccattgtgcagctggattatagccagaaagtgctgctggtctctactctgcaaagaagtctgctcttttacactgaagaaaagtctgtaaggcaaattggaacacaaccaaggaaaagtactgggaaatttggtgcttgttttataccaggactctgtaagcaaagtgatctaaccttgtatgcgtcacggcccgggctccggctatggaaggctgatgtccacgggactgttcaagccacgtttatcttaaaagatgcttttgccgggggagtcaagccttttgaactgcacccgcgtctggaatcccccaacagtggaagttgcagcttacctgagaggcacctggggcttgtttcatgtttctttcaagaaggctgggtgctgagttggaatgaatatagtatctatctcctagacacagtcaaccaggccacagttgctggtttggaaggatccggtgatattgtgtctgtttcgtgcacagaaaatgaaatatttttcttgaaaggagataggaacattataagaatttcaagcaggcctgaaggattaacatcaacagtgagagatggtctggagatgtctggatgctcagagcgtgtccacgtgcagcaagcggagaagctgccaggggccacagtttctgagacgaggctcagaggctcttccatggccagctccgtggccagcgagccaaggagcaggagcagctcgctcaactccaccgacagcggctccgggctcctgccccctgggctccaggccacccctgagctgggcaagggcagccagcccctgtcacagagattcaacgccatcagctcagaggactttgaccaggagcttgtcgtgaagcctatcaaagtgaaaaggaagaagaagaagaagaagacagaaggtggaagcaggagcacctgtcacagctccctggaatcgacaccctgctccgaatttcctggggacagtccccagtccttgaacacagacttgctgtcgatgacctcaagtgtcctgggcagtagcgtggatcagttaagtgcagagtctccagaccaggaaagcagcttcaatggtgaagtgaacggtgtcccacaggaaaatactgaccccgaaacgtttaatgtcctggaggtgtcaggatcaatgcctgattctctggctgaggaagatgacattagaactgaaatgccacactgtcaccatgcacatgggcgggagctgctcaatggagcgagggaagatgtgggaggcagtgatgtcacgggactcggagatgagccgtgtcctgcagatgatggaccaaatagcacacagttacccttccaagaacaggacagctctcctggggcgcatgatggggaagacatccaacccattggcccccaaagcactttttgtgaagtccccctcctgaactcactcactgtgccttccagcctcagctgggccccaagtgctgaacagtggctgcctgggaccagagctgatgaaggcagccccgtggagcccagccaagagcaggacatcctaaccagcatggaggcctctggccacctcagcacaaatctctggcatgctgtcactgatgatgacacaggtcagaaagaaatacccatttctgaacgtgtcttggggagtgtgggaggacagctgactccggtctctgccttggcagccagcactcacaagccctggcttgagcagcctccacgggatcagacattgacgtccagcgatgaggaggacatctatgcccacgggcttccttcttcatcctcagagacgagtgtgacagagctcggacctagttgctcccagcaggacctgagccggctgggtgcagaggacgccgggctgctcaagccagatcagtttgcagaaagctggatgggctactcgggtcccggctatggcatcctcagcttggtggtctccgagaagtatatctggtgcctggactacaaaggcggcctgttctgcagcgcgttgccgggcgccgggctgcgctggcagaagtttgaagatgctgtccagcaggtggcagtctcgccctcaggagcccttctctggaagattgaacagaaatctaaccgggcttttgcttgtgggaaagtcaccatcaaggggaagcggcactggtacgaagccctgccccaggcagtgtttgtggccctgagcgatgacacggcctggatcatcaggaccagtggggacctatacttgcagacaggtctgagcgtggatcgcccttgtgccagagccgtaaaggtggactgtccctacccgctgtcccagatcacagcccggaacaatgtggtgtgggcgctgacagagcagagggccctcctgtaccgggagggcgtgagcagcttctgtccggaaggcgagcagtggaagtgtgacattgtcagcgaaaggcaagctttagaacccgtctgcataacgctcggggatcagcagactctctgggccctggacatccatgggaacctgtggttcagaactggcattatttccaagaagccccaaggagatgacgaccattggtggcaagtgagcatcacggactatgtggtgtttgaccagtgcagcttatttcagacgataatccatgccactcactcggtggccacagcagcccaagcccccgtagaaaaggtggcagataagctgcgcatggcgttttggtcccagcagcttcagtgccagccaagccttctcggggtcaataacagcggtgtctggatctcctcgggcaagaatgaattccacgtcgctaagggaagtctcataggcacctactggaatcatgtggttccccgtgggacagcttctgctacaaaatgggcctttgtgttggcttctgcagctcccacgaaggaaggaagcttcctgtggctgtgccagagcagcaaggacctgtgcagcgtcagcgcccagagcgcacagtcgcggccctccacggtgcagctgcctcccgaagccgagatgcgcgcctatgccgcctgccaggatgcgctgtgggcgctggacagcctcggccaggtgttcatcaggacgctctccaagagctgccccacgggcatgcactggaccaggctggacctctcccagctaggagctgtaaaattgacaagcttggcatgtggaaatcagcacatctgggcctgtgattccaggggtggagtttacttccgtgtagggactcagcctctcaatcccagtctcatgcttccagcctggataatgattgagccacctgtccaggtaagcagaagttagctggtggaactcactcttcagtaagacagaaactgtgaggatgctggtactgggaaaaaggatctgcacagcctctagaggcctcccagcaaatgcggggagccatgcccccagggtctacacactctcgttcatcaacatcacaactggaattcgggatttgtgaagtttagagctgaacagactgttacagattatgagtcaacacgtatattttctctttcaaaataataatatttcgtttttgactttttactaagtgaatattattttttaaatctgcctatatattggaacctctattttataataataatgataataaatcagtacccagaagtataaagaaggtaaaagttactttgaa

SEQ ID NO: 189974 - DNA, 6468 bp, Homo sapiens
  Payload ID: 17512
  Gene Symbol: TECTA
  Gene Name: tectorin alpha
  Uniprot ID: O75443
  ENST ID: ENST00000264037
  CDS Start-End: 1-6468
atgaattattcatcattccttagaatttgggtctctttcatcttcgcacttgtacagcaccaagctcagcccagggagctcatgtatccattttggcagaatgacaccaaaacccctaaagtagatgatggaagctcatctgagattaagttggccatcccagttttcttctttggcgttccttaccgcactgtctatgtcaataacaacggagttgtttccttcaatgtgctagtgagccagttcacgccagaatcctttcccctgacagatgggagagccttcgtcgccccattttgggcagatgtgcacaatggaattcgaggcgagatctattacagagagaccatggagcctgccatcttgaaaagagccaccaaggacatcaggaagtacttcaaagacatggcaaccttctctgccacttgggttttcattgtgacatgggaggaagtcacgttttatggaggcagcagcaccacacctgtgaacaccttccaggccgtcctagtgtccgatggctcctatacattcaccctcttcaattattacgaaatcaactggaccacggggacggcgagtggcggcgaccccctgacaggtcttggtggagtgatggcacaggcaggatttaatggtggaaacctcaccaatttcttcagcctcccggggtcaagaacccccgagatcgtgaatatccaggagaccacaaacgtcaatgttccaggccgctgggcatttaaagttgatggaaaggaaattgacccagccaatggctgcacctcaaggggacaattccttcggcgaggggaggtgttttgggatgacttgaactgcaccgtcaagtgccgctgtctggatttcaacaatgagatctactgccaggaggcttcctgtagcccctacgaggtgtgcgaacccaaaggcaaattcttctactgcagcgctgtggagaccagcacatgcgtggtgtttggggagccacactaccacacttttgacggcttcctcttccacttccaaggctcctgtgcctacttgctggcccgacagtgtttgcagacttccagcctccctttcttcagtgtggaggccaagaatgaacaccgcagaggttcagccgtctcctgggtgaaggagctctcagtggaggtgaatggctacaagattctcatccccaaaggaagctatggaagagtcaaggttaatgacctagtgacttctttgcctgtcaccttagacttggggacagtgaaaatctaccagagtggcatatctactgccgtggaaacagattttgggctcttagtgacttttgatggccagcactacgcctccatttccgtcccaggctcctatataaactccacctgtggactctgtggaaactataataaaaacccactggatgacttcctccgcccggatggcaggccggccatgtctgtcctggatctgggagagagctggcgtgtgtaccacgcagactggaagtgcgactccggctgcgtcgacaactgcacccagtgcgacgctgccactgaagccctctactttggctctgactactgcggcttcctcaacaagacagacggccctctgtgggagtgtggcactgtcgtggaccccactgcttttgtgcacagctgcgtgtatgacctgtgcagtgtgagggacaatggcacgctcctctgccaagccatccaggcctatgctcttgtgtgccaagcccttggcattccaattggagactggcgaacccagactgggtgtgtgtccacagtgcagtgcccgagcttcagccactactccgtgtgcacaagcagctgccccgacacatgctccgacctgacggcctcgcggaactgcgccacgccgtgcacagagggctgcgagtgcaaccagggcttcgtcctcagcaccagccagtgcgtccctctgcacaagtgcggctgcgacttcgacggccactactacaccatgggggagttcttctgggccacggccaactgcactgtgcaatgcctgtgcgaggagggcggggacgtctactgcttcaacaagacctgcggcagcggggaggtgtgcgccgtggaggacggctaccagggctgcttccccaagcgggagaccgtgtgcctgctcagccagaaccaggtgctgcacacctttgacggcgcctcctacgccttcccctccgagttctcctacaccctcctgaagacctgccctgagcgcccagagtacttggaaatcgacatcaacaagaagaagcccgatgcaggacctgcttggctgcggggacttcggatcctggtggccgaccaggaggtcaagataggaggcatcggggcttcggaagtcaagttgaatggtcaggaagtggaattgccttttttccatccttcggggaagctggaaatttatcgaaacaaaaacagtacgacagtggagtccaagggcgtggtgactgtccagtactcagacataggtctattgtacatccggctgtccaccacatacttcaattgcacagggggcttgtgcggcttctacaatgccaacgccagtgacgagttctgtctccccaacggcaagtgcacggacaacctggcagtgttcctggaaagctggacaactttcgaggagatctgcaatggagagtgtggggacctgctgaaggcctgcaacaatgactcggagctgctcaagttttatcgaagccgctccaggtgcggcatcatcaacgacccctccaacagctccttcctggagtgccatggggtggtgaacgtcactgcctattaccgcacctgccttttccgcctgtgccagagtgggggcaatgagtcagagctctgtgactctgtggcccggtatgcaagcgcctgcaagaatgcggacgtggaggtggggccctggcggacctatgacttctgcccactggagtgcccagagaacagccactttgaggagtgcatcacatgtacagagacctgtgagacccttaccctgggccccatctgcgtggatagctgctctgagggatgtcagtgtgatgagggctatgctctactgggcagccagtgtgtcacgcggagtgagtgtggctgcaactttgaggggcaccaacttgccaccaatgagaccttctgggtggacctggactgccagatcttctgctattgcagtggcacagacaacagggtccactgcgagaccattccctgcaaggatgatgagtactgcatggaggaaggtggcctgtactactgccaagcccgcaccgacgcctcctgcatcgtctcaggctacggccactacctcacctttgatggcttcccctttgacttccagaccagctgcccactcatcctgtgcaccacaggaagcaggccaagctcagactctttccccaagtttgttgtcacagccaagaatgaggaccgggacccgtcactggccttgtgggttaagcaggtggacgtgaccgtgtttggctacagcatcgtgatccaccgagcttacaagcacactgtgctggtcaacagtgaacggctctatctgcccctgaagctggggcaagggaagataaatatcttttcctttggcttccacgtggtggtggaaactgattttggcctgaaggttgtatatgactggaagaccttcctgtccatcacagtccctcggagcatgcagaacagcacctatggtctgtgtggccgctacaacggcaaccctgatgatgacctggagatgcccatgggtctgcttgcatcgagtgtcaatgagtttgggcagagctgggtgaagagggacaccttctgccaggtgggctgtggggaccgctgtccgtcctgtgccaaggtggaaggtttctccaaagtgcagcagctgtgcagcctgatccccaaccagaacgctgccttctccaagtgtcacagcaaagttaaccccaccttcttctataagaactgcctgtttgactcttgcatcgatgggggcgcggtgcagaccgcctgcagctggctgcagaactacgccagcacctgccagactcaggggattacggtgactggctggaggaattacacgtcctgcactgtcacctgccctccaaacagccattacgagagctgcgtgagtgtctgccagccccgctgcgccgccatccgcctgaagagtgactgcagccactactgcgtggagggctgtcactgcgacgctggctacgtcctcaacggcaagagctgcatcctgccccacagctgcggctgctactccgatggcaaatattacgagcccaagcagctattttggaacagcgactgcacgcggcgctgccgctgtttccgtcgcaacgtgattcagtgcgacccgcgccaatgcaagtcagacgaggagtgtgcgctgcgcaacggggtgcgcggctgcttcagcaccaagacctcctactgcctggcggccggcggcggcgtcttccgcaccttcgacggcgccttcctgcgcttcccagccaactgcgccttcgtgctgtccaccatctgccagaaactgcccgacatctccttccagcttatcatcaacttcgacaagtggtcggcccccaacctcaccatcatttcgcccgtctacttctacattaacgaagagcagattctcatcaacgaccggaacacggtcaaggtgaatggcacacaagtgaatgttccatttataactggtttggcaaccaaaatctacagcagtgaggggtttctggtgattgacaccagcccagacatccagatatactacaatggtttcaacgtcattaaaatcagcatcagcgagaggctgcagaacaaagtgtgcggtctctgtggcaacttcaacggggacctaacagatgattatgtgaccttgcgagggaagccggtggtaagcagcgtggtgctggcccagagctggaaaaccaatggcatgcagaagagacctcttgcccccagctgcaacgagctgcagttctcacagtatgcagccatgtgtgacaatgtgcacatccagaagatgcagggtgatggctactgcctgaagctcaccgacatgaagggcttcttccagccctgctatgggcttctcgatcccctcccattctacgagtcctgctacctggacggctgctacagccacaagaagttccagctgtgcggctccctggccgcctacggggaggcctgccgctccttcgggatccttagcaccgagtggattgagaaggagaattgctcaggagtggttgaagatccctgtgtgggggcggactgtcccaaccgaacttgcgagctgggcaatggcagggagctgtgtggctgcatcgagccacccccctatggaaataactcacatgacattatcgatgcagaggtgacctgcaaagcagcccaaatggaagtgtccatatctaagtgcaagctcttccagctcggttttgagagggagggcgtgaggatcaatgacagacagtgcaccggcatcgagggggaagattttatctcctttcagatcaacaacaccaaagggaattgtggaaacattgtgcagtccaatggcacgcatatcatgtataaaaacacactctggatcgaaagcgccaacaacactggcaacatcatcaccagggaccgcacgatcaatgtggaattttcatgtgcttatgagctggatatcaagatctccttggattctgttgtgaagcctatgctaagtgtaattaacctgacagttccaacccaagaaggcagcttcatcaccaagatggctctctacaaaaacgcctcctacaaacatccttaccgccagggtgaagtagtgttgacgactcgagatgtgctgtatgtaggggtttttgtggttggagctgacgccacacatttaatcctaacactcaacaaatgctatgccacacccacccgagatagcaatgataagctccgatatttcatcattgaaggagggtgtcagaacctcaaagataacaccattggcatcgaggagaatgcagtctccctgacctgtcgctttcacgtcaccgtctttaaattcataggggattacgacgaagttcaccttcactgtgcagtgtcactctgcgactcagaaaagtactcctgtaaaatcacttgcccacacaattccaggattgccacagattacacaaaagagcccaaagaacagatcatttcagtgggacctattaggagaaaaaggctggactggtgtgaggacaatggagggtgtgagcagatttgcacgagccgggtggatgggcctctctgcagctgtgtaacaggaaccctgcaggaggacggcaagagctgcagagcctctaattcttcaatggaacttcaagtctggacgcttcttctcatcatgatccagatttcattatggcattttgtctataaatcaggcacgacctcataa

SEQ ID NO: 189975 - DNA, 7426 bp, Homo sapiens
  Payload ID: 17512
  Gene Symbol: TECTA
  Gene Name: tectorin alpha
  Uniprot ID: O75443
  ENST ID: ENST00000392793
  CDS Start-End: 272-6739
cgcaatcctgaaactgatctttagatttacttttccttaatcaatagaaaaaaacttgattgcagctcaacacttacctgtctctagtgcaggactaacttaatttttggttttaagagtacgagattcagacattatttcaggaatcagaaattattggcaacaagttgaggagaactgacatgaattcttgttttacctaattttttctggcttaccaagatttggcttaatatttctgactcagttcctccagcctctacagaacaggatgaattattcatcattccttagaatttgggtctctttcatcttcgcacttgtacagcaccaagctcagcccagggagctcatgtatccattttggcagaatgacaccaaaacccctaaagtagatgatggaagctcatctgagattaagttggccatcccagttttcttctttggcgttccttaccgcactgtctatgtcaataacaacggagttgtttccttcaatgtgctagtgagccagttcacgccagaatcctttcccctgacagatgggagagccttcgtcgccccattttgggcagatgtgcacaatggaattcgaggcgagatctattacagagagaccatggagcctgccatcttgaaaagagccaccaaggacatcaggaagtacttcaaagacatggcaaccttctctgccacttgggttttcattgtgacatgggaggaagtcacgttttatggaggcagcagcaccacacctgtgaacaccttccaggccgtcctagtgtccgatggctcctatacattcaccctcttcaattattacgaaatcaactggaccacggggacggcgagtggcggcgaccccctgacaggtcttggtggagtgatggcacaggcaggatttaatggtggaaacctcaccaatttcttcagcctcccggggtcaagaacccccgagatcgtgaatatccaggagaccacaaacgtcaatgttccaggccgctgggcatttaaagttgatggaaaggaaattgacccagccaatggctgcacctcaaggggacaattccttcggcgaggggaggtgttttgggatgacttgaactgcaccgtcaagtgccgctgtctggatttcaacaatgagatctactgccaggaggcttcctgtagcccctacgaggtgtgcgaacccaaaggcaaattcttctactgcagcgctgtggagaccagcacatgcgtggtgtttggggagccacactaccacacttttgacggcttcctcttccacttccaaggctcctgtgcctacttgctggcccgacagtgtttgcagacttccagcctccctttcttcagtgtggaggccaagaatgaacaccgcagaggttcagccgtctcctgggtgaaggagctctcagtggaggtgaatggctacaagattctcatccccaaaggaagctatggaagagtcaaggttaatgacctagtgacttctttgcctgtcaccttagacttggggacagtgaaaatctaccagagtggcatatctactgccgtggaaacagattttgggctcttagtgacttttgatggccagcactacgcctccatttccgtcccaggctcctatataaactccacctgtggactctgtggaaactataataaaaacccactggatgacttcctccgcccggatggcaggccggccatgtctgtcctggatctgggagagagctggcgtgtgtaccacgcagactggaagtgcgactccggctgcgtcgacaactgcacccagtgcgacgctgccactgaagccctctactttggctctgactactgcggcttcctcaacaagacagacggccctctgtgggagtgtggcactgtcgtggaccccactgcttttgtgcacagctgcgtgtatgacctgtgcagtgtgagggacaatggcacgctcctctgccaagccatccaggcctatgctcttgtgtgccaagcccttggcattccaattggagactggcgaacccagactgggtgtgtgtccacagtgcagtgcccgagcttcagccactactccgtgtgcacaagcagctgccccgacacatgctccgacctgacggcctcgcggaactgcgccacgccgtgcacagagggctgcgagtgcaaccagggcttcgtcctcagcaccagccagtgcgtccctctgcacaagtgcggctgcgacttcgacggccactactacaccatgggggagttcttctgggccacggccaactgcactgtgcaatgcctgtgcgaggagggcggggacgtctactgcttcaacaagacctgcggcagcggggaggtgtgcgccgtggaggacggctaccagggctgcttccccaagcgggagaccgtgtgcctgctcagccagaaccaggtgctgcacacctttgacggcgcctcctacgccttcccctccgagttctcctacaccctcctgaagacctgccctgagcgcccagagtacttggaaatcgacatcaacaagaagaagcccgatgcaggacctgcttggctgcggggacttcggatcctggtggccgaccaggaggtcaagataggaggcatcggggcttcggaagtcaagttgaatggtcaggaagtggaattgccttttttccatccttcggggaagctggaaatttatcgaaacaaaaacagtacgacagtggagtccaagggcgtggtgactgtccagtactcagacataggtctattgtacatccggctgtccaccacatacttcaattgcacagggggcttgtgcggcttctacaatgccaacgccagtgacgagttctgtctccccaacggcaagtgcacggacaacctggcagtgttcctggaaagctggacaactttcgaggagatctgcaatggagagtgtggggacctgctgaaggcctgcaacaatgactcggagctgctcaagttttatcgaagccgctccaggtgcggcatcatcaacgacccctccaacagctccttcctggagtgccatggggtggtgaacgtcactgcctattaccgcacctgccttttccgcctgtgccagagtgggggcaatgagtcagagctctgtgactctgtggcccggtatgcaagcgcctgcaagaatgcggacgtggaggtggggccctggcggacctatgacttctgcccactggagtgcccagagaacagccactttgaggagtgcatcacatgtacagagacctgtgagacccttaccctgggccccatctgcgtggatagctgctctgagggatgtcagtgtgatgagggctatgctctactgggcagccagtgtgtcacgcggagtgagtgtggctgcaactttgaggggcaccaacttgccaccaatgagaccttctgggtggacctggactgccagatcttctgctattgcagtggcacagacaacagggtccactgcgagaccattccctgcaaggatgatgagtactgcatggaggaaggtggcctgtactactgccaagcccgcaccgacgcctcctgcatcgtctcaggctacggccactacctcacctttgatggcttcccctttgacttccagaccagctgcccactcatcctgtgcaccacaggaagcaggccaagctcagactctttccccaagtttgttgtcacagccaagaatgaggaccgggacccgtcactggccttgtgggttaagcaggtggacgtgaccgtgtttggctacagcatcgtgatccaccgagcttacaagcacactgtgctggtcaacagtgaacggctctatctgcccctgaagctggggcaagggaagataaatatcttttcctttggcttccacgtggtggtggaaactgattttggcctgaaggttgtatatgactggaagaccttcctgtccatcacagtccctcggagcatgcagaacagcacctatggtctgtgtggccgctacaacggcaaccctgatgatgacctggagatgcccatgggtctgcttgcatcgagtgtcaatgagtttgggcagagctgggtgaagagggacaccttctgccaggtgggctgtggggaccgctgtccgtcctgtgccaaggtggaaggtttctccaaagtgcagcagctgtgcagcctgatccccaaccagaacgctgccttctccaagtgtcacagcaaagttaaccccaccttcttctataagaactgcctgtttgactcttgcatcgatgggggcgcggtgcagaccgcctgcagctggctgcagaactacgccagcacctgccagactcaggggattacggtgactggctggaggaattacacgtcctgcactgtcacctgccctccaaacagccattacgagagctgcgtgagtgtctgccagccccgctgcgccgccatccgcctgaagagtgactgcagccactactgcgtggagggctgtcactgcgacgctggctacgtcctcaacggcaagagctgcatcctgccccacagctgcggctgctactccgatggcaaatattacgagcccaagcagctattttggaacagcgactgcacgcggcgctgccgctgtttccgtcgcaacgtgattcagtgcgacccgcgccaatgcaagtcagacgaggagtgtgcgctgcgcaacggggtgcgcggctgcttcagcaccaagacctcctactgcctggcggccggcggcggcgtcttccgcaccttcgacggcgccttcctgcgcttcccagccaactgcgccttcgtgctgtccaccatctgccagaaactgcccgacatctccttccagcttatcatcaacttcgacaagtggtcggcccccaacctcaccatcatttcgcccgtctacttctacattaacgaagagcagattctcatcaacgaccggaacacggtcaaggtgaatggcacacaagtgaatgttccatttataactggtttggcaaccaaaatctacagcagtgaggggtttctggtgattgacaccagcccagacatccagatatactacaatggtttcaacgtcattaaaatcagcatcagcgagaggctgcagaacaaagtgtgcggtctctgtggcaacttcaacggggacctaacagatgattatgtgaccttgcgagggaagccggtggtaagcagcgtggtgctggcccagagctggaaaaccaatggcatgcagaagagacctcttgcccccagctgcaacgagctgcagttctcacagtatgcagccatgtgtgacaatgtgcacatccagaagatgcagggtgatggctactgcctgaagctcaccgacatgaagggcttcttccagccctgctatgggcttctcgatcccctcccattctacgagtcctgctacctggacggctgctacagccacaagaagttccagctgtgcggctccctggccgcctacggggaggcctgccgctccttcgggatccttagcaccgagtggattgagaaggagaattgctcaggagtggttgaagatccctgtgtgggggcggactgtcccaaccgaacttgcgagctgggcaatggcagggagctgtgtggctgcatcgagccacccccctatggaaataactcacatgacattatcgatgcagaggtgacctgcaaagcagcccaaatggaagtgtccatatctaagtgcaagctcttccagctcggttttgagagggagggcgtgaggatcaatgacagacagtgcaccggcatcgagggggaagattttatctcctttcagatcaacaacaccaaagggaattgtggaaacattgtgcagtccaatggcacgcatatcatgtataaaaacacactctggatcgaaagcgccaacaacactggcaacatcatcaccagggaccgcacgatcaatgtggaattttcatgtgcttatgagctggatatcaagatctccttggattctgttgtgaagcctatgctaagtgtaattaacctgacagttccaacccaagaaggcagcttcatcaccaagatggctctctacaaaaacgcctcctacaaacatccttaccgccagggtgaagtagtgttgacgactcgagatgtgctgtatgtaggggtttttgtggttggagctgacgccacacatttaatcctaacactcaacaaatgctatgccacacccacccgagatagcaatgataagctccgatatttcatcattgaaggagggtgtcagaacctcaaagataacaccattggcatcgaggagaatgcagtctccctgacctgtcgctttcacgtcaccgtctttaaattcataggggattacgacgaagttcaccttcactgtgcagtgtcactctgcgactcagaaaagtactcctgtaaaatcacttgcccacacaattccaggattgccacagattacacaaaagagcccaaagaacagatcatttcagtgggacctattaggagaaaaaggctggactggtgtgaggacaatggagggtgtgagcagatttgcacgagccgggtggatgggcctctctgcagctgtgtaacaggaaccctgcaggaggacggcaagagctgcagagcctctaattcttcaatggaacttcaagtctggacgcttcttctcatcatgatccagatttcattatggcattttgtctataaatcaggcacgacctcataattaactcaaggttgctatataaagtactgtaatttacttacttcaacaccctgtaggataaaaagtgtgtgcccttaagtcaaaacctatttgaaagtgtccagcatctcaaaatgatgccacctgcctccaatggtccaaggtccagaaaccagcgaccatccaagctcctctttcagagtatgaaacggggcttctacaagccagttatggaaagtatctctcttgtgtaaaattcccaaacagttgtcactagagactttggttcacatgaaaaaccagtaaaggaaaaaaattctggttagagaaatctgactggaaatctgaccagagaaatctgtcaagccagtgctatttctggatcacagttttttacagagagagggcctgttggaacgattttgaagtgatgactggaaggtttgactccctctaaggaatcttgctggtgtttggaagtgtccgatctacgttatgcacgtgttctgtctatgaggcgcttctccacccactgtgtccttcaaccttgccatggcagctttggccactggggatattgttgacctggggaaccccacccactctcctaccccctcgaacccaatcccttctctttttacaaatcaaccaaatactttttaatgtgttttatccttaaataaactttgtgttcaagtattctcatta

SEQ ID NO: 189976 - DNA, 2713 bp, Homo sapiens
  Payload ID: 17513
  Gene Symbol: TECTB
  Gene Name: tectorin beta
  Uniprot ID: Q96PL2
  ENST ID: ENST00000369422
  CDS Start-End: 1-990
atggtgacgaaggcctttgtcttgttggccatctttgcagaagcctctgcaaaatcgtgtgctccaaataaagcagatgtcattcttgtgttttgctatcccaaaaccatcatcaccaaaatccccgagtgtccctatggatgggaagttcatcagctggccctcggagggctgtgttacaatggggtccacgaaggaggttactaccaatttgtgatcccagatttatcacctaaaaacaagtcctattgtggaacccagtctgagtacaagccacctatctatcacttctacagtcacatcgtttccaatgacaccacagtgattgtaaaaaaccagcctgtcaactactccttctcctgcacctaccactccacctacttggtgaaccaggctgcctttgaccagagagtggccactgttcacgtgaagaacgggagcatgggcacatttgagagccaactgtctctcaacttctacactaatgccaagttctccatcaagaaagaagctccctttgtcctggaggcatccgaaatcggttcagatctgtttgcaggagtggaagccaaagggttaagcattaggtttaaagtggtcttgaacagctgttgggccaccccctcggctgacttcatgtatcccttgcagtggcagctgatcaacaagggctgccccacggatgaaaccgtcctcgtgcatgagaatgggagagatcacagggcaaccttccaattcaatgctttccggttccagaacatccccaaactctccaaggtgtggttacactgtgagacgttcatctgcgacagtgagaaactctcctgcccagtgacctgcgataaacggaagcgcctcctgcgagaccagaccgggggagtcctggtcgtggagctctccctgcggagcaggggattttccagtctctatagcttctcagatgttctccaccacctcatcatgatgttggggatttgtgccgtgttataggagttagccaggcagctgccgctcctccacccacaatagtcctcagcgaatgacaaacacatttattgtgctgccaaaaagaacaaacagaagaccacattgttggggggcagagaatagcactttgccaaatatgcactccaataatttctgtgaatttggtgatgcctttttctttctaagaaaaacttaggctacttcccgtggcccttagatctcacagtccttctacagctgggggaggagcctcctttctccatactcaagtcagggctgcagtaaattcctttgaaagctattttaactttaaaaggttagcagacccaaccaagtactgctgagcattttgaagagaatgtagggtgcaactacaaagtcaacactaaatgcacaacgcacattaatagctgactttgccaaaaaggagctttgtcattgaggcagtgtcattctacttaaggaccagagctgagcccccacgcagggagttccaatctttcaactgatgacatgggagatgatgtgggattcagagtggaatacaatagttttgctcaaacctaatgatataaaggaaatagattcttgaaagcccctagtactgacctaatttgtttttattataccatttgttaaatatataaacatgatataggtagaaactccttgtttttatagcagatgtatacttctaaagtcaaaagaaaattacaaattaaataggaatatttacaaaaagaataatcacaagaagaatacaactcacattaatttaacctaataacacggcattgccccagtgaaactgctgctggaaacatgactataaagtgactccaatgacacaagtgctgtgagtttggtgacccaatcctacagataaatgccttgtgacactcaatgctattttttctctatttgctctactaagaagttttcatttataagaaatggtctgatctcatttagcttttacttaaacatcgaagcttacatctgtttttgtctcattcacttacaatcattagaatgaagctaacacaaaatcagaaacacaaatgcaaatgcagccaatgaaagcatgcagtagcacatcttggtaactggccaccccagtgatccagaatatgcccatataaatgatttacattgtcaacaaaatacaaactgaatgaaccaattctggtagagaattggctggattgtgataggaaaaggcagagttctaagtccttagttatgtaaagacttaattagtaggcttataatttgaaaacaacacatgggtttgtctctctgtatttaaggtatttgagaagttttgcaatttgcagtttgatgattcttttacaacttgtgttagtgaactcagagattaaactagttatgaaatctccggatacatgaagtgtatgtttgtttagtaataggctaaagtaaaatgactcaatttggtctagacttggtctctaagctggagttccaacgagtttaggatctcttctttctgtaaattcagagtttttatagtcaggaaaaacagaagacatattttattggttctagtagaaaactcttaaatagcatactcatagccatgttcaaatcctttgctgtcagaataaaccaatgttgtattagttttgctgtatttcatcattgtgttttatgatcttgtatctctacctggcgctatggaataaataaaatgccttaaaataaa

SEQ ID NO: 189977 - DNA, 4760 bp, Homo sapiens
  Payload ID: 17514
  Gene Symbol: TEK
  Gene Name: TEK tyrosine kinase, endothelial
  Uniprot ID: Q02763
  ENST ID: ENST00000380036
  CDS Start-End: 443-3817
agtttcccgcctatgagaggatacccctattgtttctgaaaatgctgaccgggacccacacttccaacaaaaattcctctgcccctacagcagcagcaaaagcagcagcagaagcaacagcaacagataagtgttttgatgaattgcgagatggatagggcttgagtgcccccagccctgctgataccaaatgcctttaagatacagcctttcccatcctaatctacaaaggaaacaggaaaaaggaacttaaaactccctgtgctcagacagaaatgagactgttacagcctgcttctgtgctgttccttcttgcctctaacttgtaaacaagacgtagtaggacgatgctaatggaaagtcacaaaccgctgggtttttgaaaggatccttgggacctcatgcacatttgtggaaactggatggagagatttggggaagcatggactctttagccagcttagttctctgtggagtcagcttgctcctttctggaactgtggaaggtgccatggacttgatcttgatcaattccctacctcttgtatctgatgctgaaacatctctcacctgcattgcctctgggtggcgcccccatgagcccatcaccataggaagggactttgaagccttaatgaaccagcaccaggatccgctggaagttactcaagatgtgaccagagaatgggctaaaaaagttgtttggaagagagaaaaggctagtaagatcaatggtgcttatttctgtgaagggcgagttcgaggagaggcaatcaggatacgaaccatgaagatgcgtcaacaagcttccttcctaccagctactttaactatgactgtggacaagggagataacgtgaacatatctttcaaaaaggtattgattaaagaagaagatgcagtgatttacaaaaatggttccttcatccattcagtgccccggcatgaagtacctgatattctagaagtacacctgcctcatgctcagccccaggatgctggagtgtactcggccaggtatataggaggaaacctcttcacctcggccttcaccaggctgatagtccggagatgtgaagcccagaagtggggacctgaatgcaaccatctctgtactgcttgtatgaacaatggtgtctgccatgaagatactggagaatgcatttgccctcctgggtttatgggaaggacgtgtgagaaggcttgtgaactgcacacgtttggcagaacttgtaaagaaaggtgcagtggacaagagggatgcaagtcttatgtgttctgtctccctgacccctatgggtgttcctgtgccacaggctggaagggtctgcagtgcaatgaagcatgccaccctggtttttacgggccagattgtaagcttaggtgcagctgcaacaatggggagatgtgtgatcgcttccaaggatgtctctgctctccaggatggcaggggctccagtgtgagagagaaggcatacagaggatgaccccaaagatagtggatttgccagatcatatagaagtaaacagtggtaaatttaatcccatttgcaaagcttctggctggccgctacctactaatgaagaaatgaccctggtgaagccggatgggacagtgctccatccaaaagactttaaccatacggatcatttctcagtagccatattcaccatccaccggatcctcccccctgactcaggagtttgggtctgcagtgtgaacacagtggctgggatggtggaaaagcccttcaacatttctgttaaagttcttccaaagcccctgaatgccccaaacgtgattgacactggacataactttgctgtcatcaacatcagctctgagccttactttggggatggaccaatcaaatccaagaagcttctatacaaacccgttaatcactatgaggcttggcaacatattcaagtgacaaatgagattgttacactcaactatttggaacctcggacagaatatgaactctgtgtgcaactggtccgtcgtggagagggtggggaagggcatcctggacctgtgagacgcttcacaacagcttctatcggactccctcctccaagaggtctaaatctcctgcctaaaagtcagaccactctaaatttgacctggcaaccaatatttccaagctcggaagatgacttttatgttgaagtggagagaaggtctgtgcaaaaaagtgatcagcagaatattaaagttccaggcaacttgacttcggtgctacttaacaacttacatcccagggagcagtacgtggtccgagctagagtcaacaccaaggcccagggggaatggagtgaagatctcactgcttggacccttagtgacattcttcctcctcaaccagaaaacatcaagatttccaacattacacactcctcagctgtgatttcttggacaatattggatggctattctatttcttctattactatccgttacaaggttcaaggcaagaatgaagaccagcacgttgatgtgaagataaagaatgccaccatcactcagtatcagctcaagggcctagagcctgaaacagcataccaggtggacatttttgcagagaacaacatagggtcaagcaacccagccttttctcatgaactggtgaccctcccagaatctcaagcaccagcggacctcggaggggggaagatgctgcttatagccatccttggctctgctggaatgacctgcctgactgtgctgttggcctttctgatcatattgcaattgaagagggcaaatgtgcaaaggagaatggcccaagccttccaaaacgtgagggaagaaccagctgtgcagttcaactcagggactctggccctaaacaggaaggtcaaaaacaacccagatcctacaatttatccagtgcttgactggaatgacatcaaatttcaagatgtgattggggagggcaattttggccaagttcttaaggcgcgcatcaagaaggatgggttacggatggatgctgccatcaaaagaatgaaagaatatgcctccaaagatgatcacagggactttgcaggagaactggaagttctttgtaaacttggacaccatccaaacatcatcaatctcttaggagcatgtgaacatcgaggctacttgtacctggccattgagtacgcgccccatggaaaccttctggacttccttcgcaagagccgtgtgctggagacggacccagcatttgccattgccaatagcaccgcgtccacactgtcctcccagcagctccttcacttcgctgccgacgtggcccggggcatggactacttgagccaaaaacagtttatccacagggatctggctgccagaaacattttagttggtgaaaactatgtggcaaaaatagcagattttggattgtcccgaggtcaagaggtgtatgtgaaaaagacaatgggaaggctcccagtgcgctggatggccatcgagtcactgaattacagtgtgtacacaaccaacagtgatgtatggtcctatggtgtgttactatgggagattgttagcttaggaggcacaccctactgcgggatgacttgtgcagaactctacgagaagctgccccagggctacagactggagaagcccctgaactgtgatgatgaggtgtatgatctaatgagacaatgctggcgggagaagccttatgagaggccatcatttgcccagatattggtgtccttaaacagaatgttagaggagcgaaagacctacgtgaataccacgctttatgagaagtttacttatgcaggaattgactgttctgctgaagaagcggcctaggacagaacatctgtataccctctgtttccctttcactggcatgggagacccttgacacctgctgagaaaacatgcctctgccaaaggatgtgatatataagtgtacatatgtgctgtacacctgggaccttcaccactgtagatcccatgcatggatctatgtagtatgctctgactctaataggactgtatatactgttttaagaatgggctgaaatcagaatgcctgtttgtggtttcatatgcaataatatatttttttaaaaatgtggacttcataggaaggcgtgagtacaattagtataatgcataactcattgttgtcctagatattttgatatttacctttatgttgaatgctattaaatgttttcctgtgtcaaagtaaaatattgttaataaacctaacaatgaccctgatagtacaggttaagtgagagaactatatgaattctaacaagtcataggttaatatttaagacactgaaaaatctaagtgatataaatcagattcttctctctcaattttatccctcacctgtagcagccagtcccgtttcatttagtcatgtgaccactctgtcttgtgtttccacagcctgcaagtcagtccaggatgctaacatctaaaaatagacttaaatctcattgcttacaagcctaagaatctttagagaagtatacataagtttaggataaaataatgggattttcttttcttttctctggtaatattgacttgtatattttaagaaataacagaaagcctgggtgacatttgggagacatgtgacatttatatattgaattaatatccctacatgtattgcacattgtaaaaagttttagttttgatgagttgtgagtttaccttgtatactgtaggcacactttgcactgatatatcatgagtgaataaatgtcttgcctactcacgtctcat

SEQ ID NO: 189978 - DNA, 3935 bp, Homo sapiens
  Payload ID: 17514
  Gene Symbol: TEK
  Gene Name: TEK tyrosine kinase, endothelial
  Uniprot ID: Q02763
  ENST ID: ENST00000406359
  CDS Start-End: 176-3421
agacagaaatgagactgttacagcctgcttctgtgctgttccttcttgcctctaacttgtaaacaagacgtagtaggacgatgctaatggaaagtcacaaaccgctgggtttttgaaaggatccttgggacctcatgcacatttgtggaaactggatggagagatttggggaagcatggactctttagccagcttagttctctgtggagtcagcttgctcctttctggaactgtggaaggtgccatggacttgatcttgatcaattccctacctcttgtatctgatgctgaaacatctctcacctgcattgcctctgggtggcgcccccatgagcccatcaccataggaagggactttgaagccttaatgaaccagcaccaggatccgctggaagttactcaagatgtgaccagagaatgggctaaaaaagttgtttggaagagagaaaaggctagtaagatcaatggtgcttatttctgtgaagggcgagttcgaggagaggcaatcaggatacgaaccatgaagatgcgtcaacaagcttccttcctaccagctactttaactatgactgtggacaagggagataacgtgaacatatctttcaaaaaggtattgattaaagaagaagatgcagtgatttacaaaaatggttccttcatccattcagtgccccggcatgaagtacctgatattctagaagtacacctgcctcatgctcagccccaggatgctggagtgtactcggccaggtatataggaggaaacctcttcacctcggccttcaccaggctgatagtccggagatgtgaagcccagaagtggggacctgaatgcaaccatctctgtactgcttgtatgaacaatggtgtctgccatgaagatactggagaatgcatttgccctcctgggtttatgggaaggacgtgtgagaaggcttgtgaactgcacacgtttggcagaacttgtaaagaaaggtgcagtggacaagagggatgcaagtcttatgtgttctgtctccctgacccctatgggtgttcctgtgccacaggctggaagggtctgcagtgcaatgaaggcatacagaggatgaccccaaagatagtggatttgccagatcatatagaagtaaacagtggtaaatttaatcccatttgcaaagcttctggctggccgctacctactaatgaagaaatgaccctggtgaagccggatgggacagtgctccatccaaaagactttaaccatacggatcatttctcagtagccatattcaccatccaccggatcctcccccctgactcaggagtttgggtctgcagtgtgaacacagtggctgggatggtggaaaagcccttcaacatttctgttaaagttcttccaaagcccctgaatgccccaaacgtgattgacactggacataactttgctgtcatcaacatcagctctgagccttactttggggatggaccaatcaaatccaagaagcttctatacaaacccgttaatcactatgaggcttggcaacatattcaagtgacaaatgagattgttacactcaactatttggaacctcggacagaatatgaactctgtgtgcaactggtccgtcgtggagagggtggggaagggcatcctggacctgtgagacgcttcacaacagcttctatcggactccctcctccaagaggtctaaatctcctgcctaaaagtcagaccactctaaatttgacctggcaaccaatatttccaagctcggaagatgacttttatgttgaagtggagagaaggtctgtgcaaaaaagtgatcagcagaatattaaagttccaggcaacttgacttcggtgctacttaacaacttacatcccagggagcagtacgtggtccgagctagagtcaacaccaaggcccagggggaatggagtgaagatctcactgcttggacccttagtgacattcttcctcctcaaccagaaaacatcaagatttccaacattacacactcctcagctgtgatttcttggacaatattggatggctattctatttcttctattactatccgttacaaggttcaaggcaagaatgaagaccagcacgttgatgtgaagataaagaatgccaccatcactcagtatcagctcaagggcctagagcctgaaacagcataccaggtggacatttttgcagagaacaacatagggtcaagcaacccagccttttctcatgaactggtgaccctcccagaatctcaagcaccagcggacctcggaggggggaagatgctgcttatagccatccttggctctgctggaatgacctgcctgactgtgctgttggcctttctgatcatattgcaattgaagagggcaaatgtgcaaaggagaatggcccaagccttccaaaacgtgagggaagaaccagctgtgcagttcaactcagggactctggccctaaacaggaaggtcaaaaacaacccagatcctacaatttatccagtgcttgactggaatgacatcaaatttcaagatgtgattggggagggcaattttggccaagttcttaaggcgcgcatcaagaaggatgggttacggatggatgctgccatcaaaagaatgaaagaatatgcctccaaagatgatcacagggactttgcaggagaactggaagttctttgtaaacttggacaccatccaaacatcatcaatctcttaggagcatgtgaacatcgaggctacttgtacctggccattgagtacgcgccccatggaaaccttctggacttccttcgcaagagccgtgtgctggagacggacccagcatttgccattgccaatagcaccgcgtccacactgtcctcccagcagctccttcacttcgctgccgacgtggcccggggcatggactacttgagccaaaaacagtttatccacagggatctggctgccagaaacattttagttggtgaaaactatgtggcaaaaatagcagattttggattgtcccgaggtcaagaggtgtatgtgaaaaagacaatgggaaggctcccagtgcgctggatggccatcgagtcactgaattacagtgtgtacacaaccaacagtgatgtatggtcctatggtgtgttactatgggagattgttagcttaggaggcacaccctactgcgggatgacttgtgcagaactctacgagaagctgccccagggctacagactggagaagcccctgaactgtgatgatgaggtgtatgatctaatgagacaatgctggcgggagaagccttatgagaggccatcatttgcccagatattggtgtccttaaacagaatgttagaggagcgaaagacctacgtgaataccacgctttatgagaagtttacttatgcaggaattgactgttctgctgaagaagcggcctaggacagaacatctgtataccctctgtttccctttcactggcatgggagacccttgacacctgctgagaaaacatgcctctgccaaaggatgtgatatataagtgtacatatgtgctgtacacctgggaccttcaccactgtagatcccatgcatggatctatgtagtatgctctgactctaataggactgtatatactgttttaagaatgggctgaaatcagaatgcctgtttgtggtttcatatgcaataatatatttttttaaaaatgtggacttcataggaaggcgtgagtacaattagtataatgcataactcattgttgtcctagatattttgatatttacctttatgttgaatgctattaaatgttttcctgtgtcaaagtaaaatattgttaataaacctaacaatgaccctgatagtacaggttaagtgagagaactatatgaattctaacaagtcataggttaatatttaagacactgaaaaatctaagtgatataaatcagattc

SEQ ID NO: 189979 - DNA, 1543 bp, Homo sapiens
  Payload ID: 17514
  Gene Symbol: TEK
  Gene Name: TEK tyrosine kinase, endothelial
  ENST ID: ENST00000519080
  CDS Start-End: 139-1543
gttccttcttgcctctaacttgtaaacaagacgtagtaggacgatgctaatggaaagtcacaaaccgctgggtttttgaaaggatccttgggacctcatgcacatttgtggaaactggatggagagatttggggaagcatggactctttagccagcttagttctctgtggagtcagcttgctcctttctgtgccccggcatgaagtacctgatattctagaagtacacctgcctcatgctcagccccaggatgctggagtgtactcggccaggtatataggaggaaacctcttcacctcggccttcaccaggctgatagtccggagatgtgaagcccagaagtggggacctgaatgcaaccatctctgtactgcttgtatgaacaatggtgtctgccatgaagatactggagaatgcatttgccctcctgggtttatgggaaggacgtgtgagaaggcttgtgaactgcacacgtttggcagaacttgtaaagaaaggtgcagtggacaagagggatgcaagtcttatgtgttctgtctccctgacccctatgggtgttcctgtgccacaggctggaagggtctgcagtgcaatgaaggcatacagaggatgaccccaaagatagtggatttgccagatcatatagaagtaaacagtggtaaatttaatcccatttgcaaagcttctggctggccgctacctactaatgaagaaatgaccctggtgaagccggatgggacagtgctccatccaaaagactttaaccatacggatcatttctcagtagccatattcaccatccaccggatcctcccccctgactcaggagtttgggtctgcagtgtgaacacagtggctgggatggtggaaaagcccttcaacatttctgttaaagttcttccaaagcccctgaatgccccaaacgtgattgacactggacataactttgctgtcatcaacatcagctctgagccttactttggggatggaccaatcaaatccaagaagcttctatacaaacccgttaatcactatgaggcttggcaacatattcaagtgacaaatgagattgttacactcaactatttggaacctcggacagaatatgaactctgtgtgcaactggtccgtcgtggagagggtggggaagggcatcctggacctgtgagacgcttcacaacagcttctatcggactccctcctccaagaggtctaaatctcctgcctaaaagtcagaccactctaaatttgacctggcaaccaatatttccaagctcggaagatgacttttatgttgaagtggagagaaggtctgtgcaaaaaagtgatcagcagaatattaaagttccaggcaacttgacttcggtgctacttaacaacttacatcccagggagcagtacgtggtccgagctagagtcaacaccaaggcccagggggaatggagtgaagatctcactgcttggacccttagtgacattcttcctcctcaaccagaaaacatcaagatttccaacattacacactcctcagctgtgatttctt

SEQ ID NO: 189980 - DNA, 3836 bp, Homo sapiens
  Payload ID: 17514
  Gene Symbol: TEK
  Gene Name: TEK tyrosine kinase, endothelial
  Uniprot ID: Q02763
  ENST ID: ENST00000519097
  CDS Start-End: 451-3381
ttattctcagtttcccgcctatgagaggatacccctattgtttctgaaaatgctgaccgggacccacacttccaacaaaaattcctctgcccctacagcagcagcaaaagcagcagcagaagcaacagcaacagataagtgttttgatgaattgcgagatggatagggcttgagtgcccccagccctgctgataccaaatgcctttaagatacagcctttcccatcctaatctacaaaggaaacaggaaaaaggaacttaaaactccctgtgctcagacagaaatgagactgttacagcctgcttctgtgctgttccttcttgcctctaacttgtaaacaagacgtagtaggacgatgctaatggaaagtcacaaaccgctgggtttttgaaaggatccttgggacctcatgcacatttgtggaaactggatggagagatttggggaagcatggactctttagccagcttagttctctgtggagtcagcttgctcctttctgcttccttcctaccagctactttaactatgactgtggacaagggagataacgtgaacatatctttcaaaaaggtattgattaaagaagaagatgcagtgatttacaaaaatggttccttcatccattcagtgccccggcatgaagtacctgatattctagaagtacacctgcctcatgctcagccccaggatgctggagtgtactcggccaggtatataggaggaaacctcttcacctcggccttcaccaggctgatagtccggagatgtgaagcccagaagtggggacctgaatgcaaccatctctgtactgcttgtatgaacaatggtgtctgccatgaagatactggagaatgcatttgccctcctgggtttatgggaaggacgtgtgagaaggcttgtgaactgcacacgtttggcagaacttgtaaagaaaggtgcagtggacaagagggatgcaagtcttatgtgttctgtctccctgacccctatgggtgttcctgtgccacaggctggaagggtctgcagtgcaatgaaggcatacagaggatgaccccaaagatagtggatttgccagatcatatagaagtaaacagtggtaaatttaatcccatttgcaaagcttctggctggccgctacctactaatgaagaaatgaccctggtgaagccggatgggacagtgctccatccaaaagactttaaccatacggatcatttctcagtagccatattcaccatccaccggatcctcccccctgactcaggagtttgggtctgcagtgtgaacacagtggctgggatggtggaaaagcccttcaacatttctgttaaagttcttccaaagcccctgaatgccccaaacgtgattgacactggacataactttgctgtcatcaacatcagctctgagccttactttggggatggaccaatcaaatccaagaagcttctatacaaacccgttaatcactatgaggcttggcaacatattcaagtgacaaatgagattgttacactcaactatttggaacctcggacagaatatgaactctgtgtgcaactggtccgtcgtggagagggtggggaagggcatcctggacctgtgagacgcttcacaacagcttctatcggactccctcctccaagaggtctaaatctcctgcctaaaagtcagaccactctaaatttgacctggcaaccaatatttccaagctcggaagatgacttttatgttgaagtggagagaaggtctgtgcaaaaaagtgatcagcagaatattaaagttccaggcaacttgacttcggtgctacttaacaacttacatcccagggagcagtacgtggtccgagctagagtcaacaccaaggcccagggggaatggagtgaagatctcactgcttggacccttagtgacattcttcctcctcaaccagaaaacatcaagatttccaacattacacactcctcagctgtgatttcttggacaatattggatggctattctatttcttctattactatccgttacaaggttcaaggcaagaatgaagaccagcacgttgatgtgaagataaagaatgccaccatcactcagtatcagctcaagggcctagagcctgaaacagcataccaggtggacatttttgcagagaacaacatagggtcaagcaacccagccttttctcatgaactggtgaccctcccagaatctcaagcaccagcggacctcggaggggggaagatgctgcttatagccatccttggctctgctggaatgacctgcctgactgtgctgttggcctttctgatcatattgcaattgaagagggcaaatgtgcaaaggagaatggcccaagccttccaaaacagggaagaaccagctgtgcagttcaactcagggactctggccctaaacaggaaggtcaaaaacaacccagatcctacaatttatccagtgcttgactggaatgacatcaaatttcaagatgtgattggggagggcaattttggccaagttcttaaggcgcgcatcaagaaggatgggttacggatggatgctgccatcaaaagaatgaaagaatatgcctccaaagatgatcacagggactttgcaggagaactggaagttctttgtaaacttggacaccatccaaacatcatcaatctcttaggagcatgtgaacatcgaggctacttgtacctggccattgagtacgcgccccatggaaaccttctggacttccttcgcaagagccgtgtgctggagacggacccagcatttgccattgccaatagcaccgcgtccacactgtcctcccagcagctccttcacttcgctgccgacgtggcccggggcatggactacttgagccaaaaacagtttatccacagggatctggctgccagaaacattttagttggtgaaaactatgtggcaaaaatagcagattttggattgtcccgaggtcaagaggtgtatgtgaaaaagacaatgggaaggctcccagtgcgctggatggccatcgagtcactgaattacagtgtgtacacaaccaacagtgatgtatggtcctatggtgtgttactatgggagattgttagcttaggaggcacaccctactgcgggatgacttgtgcagaactctacgagaagctgccccagggctacagactggagaagcccctgaactgtgatgatgaggtgtatgatctaatgagacaatgctggcgggagaagccttatgagaggccatcatttgcccagatattggtgtccttaaacagaatgttagaggagcgaaagacctacgtgaataccacgctttatgagaagtttacttatgcaggaattgactgttctgctgaagaagcggcctaggacagaacatctgtataccctctgtttccctttcactggcatgggagacccttgacacctgctgagaaaacatgcctctgccaaaggatgtgatatataagtgtacatatgtgctgtacacctgggaccttcaccactgtagatcccatgcatggatctatgtagtatgctctgactctaataggactgtatatactgttttaagaatgggctgaaatcagaatgcctgtttgtggtttcatatgcaataatatatttttttaaaaatgtggacttcataggaaggcgtgagtacaattagtataatgcataactcattgttgtcctagatattttgatatttacctttatgttgaatgctattaaatgttttcctgtgtcaaagtaaaatattgttaataaacctaacaatgaccctgatagtacaggttaagtgagagaactatatgaattct

SEQ ID NO: 189981 - DNA, 4666 bp, Homo sapiens
  Payload ID: 17514
  Gene Symbol: TEK
  Gene Name: TEK tyrosine kinase, endothelial
  ENST ID: ENST00000615002
  CDS Start-End: 443-1849
agtttcccgcctatgagaggatacccctattgtttctgaaaatgctgaccgggacccacacttccaacaaaaattcctctgcccctacagcagcagcaaaagcagcagcagaagcaacagcaacagataagtgttttgatgaattgcgagatggatagggcttgagtgcccccagccctgctgataccaaatgcctttaagatacagcctttcccatcctaatctacaaaggaaacaggaaaaaggaacttaaaactccctgtgctcagacagaaatgagactgttacagcctgcttctgtgctgttccttcttgcctctaacttgtaaacaagacgtagtaggacgatgctaatggaaagtcacaaaccgctgggtttttgaaaggatccttgggacctcatgcacatttgtggaaactggatggagagatttggggaagcatggactctttagccagcttagttctctgtggagtcagcttgctcctttctggaactgtggaaggtgccatggacttgatcttgatcaattccctacctcttgtatctgatgctgaaacatctctcacctgcattgcctctgggtggcgcccccatgagcccatcaccataggaagggactttgaagccttaatgaaccagcaccaggatccgctggaagttactcaagatgtgaccagagaatgggctaaaaaagttgtttggaagagagaaaaggctagtaagatcaatggtgcttatttctgtgaagggcgagttcgaggagaggcaatcaggatacgaaccatgaagatgcgtcaacaagcttccttcctaccagctactttaactatgactgtggacaagggagataacgtgaacatatctttcaaaaaggtattgattaaagaagaagatgcagtgatttacaaaaatggttccttcatccattcagtgccccggcatgaagtacctgatattctagaagtacacctgcctcatgctcagccccaggatgctggagtgtactcggccaggtatataggaggaaacctcttcacctcggccttcaccaggctgatagtccggagatgtgaagcccagaagtggggacctgaatgcaaccatctctgtactgcttgtatgaacaatggtgtctgccatgaagatactggagaatgcatttgccctcctgggtttatgggaaggacgtgtgagaaggcttgtgaactgcacacgtttggcagaacttgtaaagaaaggtgcagtggacaagagggatgcaagtcttatgtgttctgtctccctgacccctatgggtgttcctgtgccacaggctggaagggtctgcagtgcaatgaaggcatacagaggatgaccccaaagatagtggatttgccagatcatatagaagtaaacagtggtaaatttaatcccatttgcaaagcttctggctggccgctacctactaatgaagaaatgaccctggtgaagccggatgggacagtgctccatccaaaagactttaaccatacggatcatttctcagtagccatattcaccatccaccggatcctcccccctgactcaggagtttgggtctgcagtgtgaacacagtggctgggatggtggaaaagcccttcaacatttctgttaaagttcttccaaagcccctgaatgccccaaacgtgattgacactggacataactttgctgtcatcaacatcagctctgagccttactttggggatggaccaatcaaatccaagaagcttctatacaaacccgttaatcactatgaggcttggcaacatattcaagtatccatggagaaacagaggctgactaaagcaaatagtgacaaatgagattgttacactcaactatttggaacctcggacagaatatgaactctgtgtgcaactggtccgtcgtggagagggtggggaagggcatcctggacctgtgagacgcttcacaacagcttctatcggactccctcctccaagaggtctaaatctcctgcctaaaagtcagaccactctaaatttgacctggcaaccaatatttccaagctcggaagatgacttttatgttgaagtggagagaaggtctgtgcaaaaaagtgatcagcagaatattaaagttccaggcaacttgacttcggtgctacttaacaacttacatcccagggagcagtacgtggtccgagctagagtcaacaccaaggcccagggggaatggagtgaagatctcactgcttggacccttagtgacattcttcctcctcaaccagaaaacatcaagatttccaacattacacactcctcagctgtgatttcttggacaatattggatggctattctatttcttctattactatccgttacaaggttcaaggcaagaatgaagaccagcacgttgatgtgaagataaagaatgccaccatcactcagtatcagctcaagggcctagagcctgaaacagcataccaggtggacatttttgcagagaacaacatagggtcaagcaacccagccttttctcatgaactggtgaccctcccagaatctcaagcaccagcggacctcggaggggggaagatgctgcttatagccatccttggctctgctggaatgacctgcctgactgtgctgttggcctttctgatcatattgcaattgaagagggcaaatgtgcaaaggagaatggcccaagccttccaaaacgtgagggaagaaccagctgtgcagttcaactcagggactctggccctaaacaggaaggtcaaaaacaacccagatcctacaatttatccagtgcttgactggaatgacatcaaatttcaagatgtgattggggagggcaattttggccaagttcttaaggcgcgcatcaagaaggatgggttacggatggatgctgccatcaaaagaatgaaagaatatgcctccaaagatgatcacagggactttgcaggagaactggaagttctttgtaaacttggacaccatccaaacatcatcaatctcttaggagcatgtgaacatcgaggctacttgtacctggccattgagtacgcgccccatggaaaccttctggacttccttcgcaagagccgtgtgctggagacggacccagcatttgccattgccaatagcaccgcgtccacactgtcctcccagcagctccttcacttcgctgccgacgtggcccggggcatggactacttgagccaaaaacagtttatccacagggatctggctgccagaaacattttagttggtgaaaactatgtggcaaaaatagcagattttggattgtcccgaggtcaagaggtgtatgtgaaaaagacaatgggaaggctcccagtgcgctggatggccatcgagtcactgaattacagtgtgtacacaaccaacagtgatgtatggtcctatggtgtgttactatgggagattgttagcttaggaggcacaccctactgcgggatgacttgtgcagaactctacgagaagctgccccagggctacagactggagaagcccctgaactgtgatgatgaggtgtatgatctaatgagacaatgctggcgggagaagccttatgagaggccatcatttgcccagatattggtgtccttaaacagaatgttagaggagcgaaagacctacgtgaataccacgctttatgagaagtttacttatgcaggaattgactgttctgctgaagaagcggcctaggacagaacatctgtataccctctgtttccctttcactggcatgggagacccttgacacctgctgagaaaacatgcctctgccaaaggatgtgatatataagtgtacatatgtgctgtacacctgggaccttcaccactgtagatcccatgcatggatctatgtagtatgctctgactctaataggactgtatatactgttttaagaatgggctgaaatcagaatgcctgtttgtggtttcatatgcaataatatatttttttaaaaatgtggacttcataggaaggcgtgagtacaattagtataatgcataactcattgttgtcctagatattttgatatttacctttatgttgaatgctattaaatgttttcctgtgtcaaagtaaaatattgttaataaacctaacaatgaccctgatagtacaggttaagtgagagaactatatgaattctaacaagtcataggttaatatttaagacactgaaaaatctaagtgatataaatcagattcttctctctcaattttatccctcacctgtagcagccagtcccgtttcatttagtcatgtgaccactctgtcttgtgtttccacagcctgcaagtcagtccaggatgctaacatctaaaaatagacttaaatctcattgcttacaagcctaagaatctttagagaagtatacataagtttaggataaaataatgggattttcttttcttttctctggtaatattgacttgtatattttaagaaataacagaaagcctgggtgacatttgggagacatgtgacatttatatattgaattaatatccctacatgtattgcacattgtaaaaagttttagttttgatgagttgtgagtttaccttgtatactgtaggcacactttgcactgatatatcatgagtgaataaatgtcttgcctactcacgtctc

SEQ ID NO: 189982 - DNA, 3421 bp, Homo sapiens
  Payload ID: 17515
  Gene Symbol: TEKT1
  Gene Name: tektin 1
  Uniprot ID: Q969V4
  ENST ID: ENST00000338694
  CDS Start-End: 131-1387
gttgtcatggagaccgcgttgtttacctctctgttctgcaagagctggaagctccagttggggtaaggaggctcccatcccgagcttgcgtagtggttctgtgtggcgctgaggaatttggaaacctcaaatggctaaactattacaacctccacccaagttcctgccctcagagtggcacattgctaacaagaaccagtaccacagagcagacgctcaaaggtcccgatcagaacgcctggtcgcagaaagccagaggcttgtggatgaaattgaaaagaccacaagaaaatctcaaagcgatgtgaacaagaaactagaacagagactcgaggaagtccagttctggaagaaggagttagatgacaaacttgagcagcttgtgaatgtaactgatgatctactcatatataagatcagattggaaaaagccctggagaccttgaaagagcccttgcacatcactgagacatgcctggcatacagggagaagcgcattggcattgacctggtgcacgacacagtggagcatgagctgataaaggaggctgagatcatccagggcattatggctctgctgacccgtaccttggaggaggcttccgagcagattcggatgaaccgctctgccaagtacaatcttgagaaggatttgaaggacaagtttgtggccctgaccatagatgatatctgcttctcgctcaacaacaactcaccaaacatcagatattctgagaacgccgtgaggattgagccaaactccgtgagtctggaagactggttggacttctccagcaccaatgtggagaaggctgacaagcagcggaacaactccctgatgctgaaagccctggtggatcgaatcctgtcccagacagccaatgatctgcgcaagcagtgtgatgtggtggacacggcattcaagaatgggctgaaggatacaaaggatgccagggacaagctggctgatcatctggccaaggtcatggaagagattgcttcccaggagaaaaatattacagctcttgaaaaggccatccttgaccaagaagggccagccaaggtggctcatacgcgcttggagaccaggacacaccggccgaacgtggagctgtgtcgtgatgtcgcacaatataggctaatgaaggaggttcaagagatcacccacaatgtcgcaagattgaaggaaactttagcccaagctcaggcagagctgaaagggctgcatcgcagacagcttgccctgcaggaggagatccaggtcaaagagaacaccatttatatcgacgaagtgctgtgtatgcagatgaggaaatccatcccacttcgggatggggaagaccatggggtctgggctgggggcctccgccctgatgctgtctgctaatagtagggctagttccaattctcattaaaccacattgtaaacagtagttacagtagtacagagctctcatttcaggctggcggggcctctagccagcctgctgcaacctcttggctggcattccaagcctgctcagggggctgattttggggcgagtttcttctcttatgctggtgtggtgtttgcctaacaattcaactccatattttagcacaggccactcttacaatatcacaggacttggggccccaggacagggtttcaagacatttcagttcagattcaattcaataaagtagttgggctggatcacctgtgtagaccatgcccctcttgctcatgagatgggatgctaacctttctcttggctctcaaaatttcttttctctagaaaataatgtgttttttttctcttaaatactcaaataacataaagaaaaagaacaaaattccattcattcaagtcaatgggttcaagtcaatggttaagactgtaggttccggagtctgccatctgagtataggacctccaatagtccccactcacagggctataggggcgttgaatgagatcacctccgtaaagggcttcatactgagcctgtatcatggggcagtgagtgtttaatgaatgtgagccattgtgagcagtcccaccctataccaacataatttctgcacaattgtactcatggcataaactcaatttcaggattatttttttccttcactgctaattattgcaagcctttgttcatgttgctaaattgtctttataattattttaatggttacgtacctctttacaagttttcagcaagactgttttatatacttactgtttcttttccaaaaagagttcaacttgtgggaggctgccttccgctgagctgcagcaggtcagagatctatgtgggtgactgtcaaaggaagacatttgctgtgggaaactgctcatttgttccttattccgctaacattgaaggaacactttccatggacgaggcttaccatctcagcaccctcccatgtgtgaagctgctgctacactctgctaacatttggttccccggtgctcatggacagctgacggtgtggggctcaggagacctagcttctagttgcaacactgccaggaaagtttctctccttctttaggaccacctgtaaagtaaggaaaggactatatcgtctggaactcttcctgtccttgctgttccctgaatctggctgtctagctgcacatacggtgtcatagggcacaatgataatgcagagtgtgggcctaattcctgggagctttgcaatctaggtgctccttggtccagagactctttgccatcagaaagggatgttcccaatctgggatggagaaaccccctttgaggccaaaagcactggcttaattctgttaattctgatctatgccaccccagtgctgaacgtctcctctcagagtgctcagcaaatacacagcccttcccatgcctcaatcaaggagggaggcccctctctgctcactgggaagcctctgggtgcttttctgctctggctcggaagagtccaaataagccttcccagctcactgggcagacctcagagtttctgctaacttagcagggttttgaggtctgtcccagaggatgtggctggcagggtgtgaagacactgggcaaaatccttccttgtgaatacagctctcagaggcagccagcctcagtggtggattcagatcccaggctctgcagggagatgtgattcagatcagctggtggatcagctccacgctctacctgtgatgtgatccccgccaagttactcaacttccccgagcttcagttgcctaatctgtaaataagactaataaagcctagattggcgagataacgtgtggaagactctcaacacagtgtctggaacatgctgcttttaagggaaatgtgattttgattatggttgaggccatttctcaacatgtagacataaaatgcggaaacatctaagatttcaataaagcaatgttttgttagtaaa

SEQ ID NO: 189983 - DNA, 492 bp, Homo sapiens
  Payload ID: 17515
  Gene Symbol: TEKT1
  Gene Name: tektin 1
  ENST ID: ENST00000572291
  CDS Start-End: 1-433
gaggattgagccaaactccgtgagtctggaagactggttggacttctccagcaccaatgtggagaaggctgacaagcagcggaacaactccctgatgctgaaagccctggtggatcgaatcctgtcccagacagccaatgatctgcgcaagcagtgtgatgtggtggacacggcattcaagaatgggctgaaggatacaaaggatgccagggacaagctggctgatcatctggccaagattgaaggaaactttagcccaagctcaggcagagctgaaagggctgcatcgcagacagcttgccctgcaggaggagatccaggtcaaagagaacaccatttatatcgacgaagtgctgtgtatgcagatgaggaaatccatcccacttcgggatggggaagaccatggggtctgggctgggggcctccgccctgatgctgtctgctaatagtagggctagttccaattctcattaaaccacattgtaaacagta

SEQ ID NO: 189984 - DNA, 384 bp, Homo sapiens
  Payload ID: 17515
  Gene Symbol: TEKT1
  Gene Name: tektin 1
  ENST ID: ENST00000571744
  CDS Start-End: 1-195
accaatgtggagaaggctgacaagcagcggaacaactccctgatgctgaaagccctggtggatcgaatcctgtcccagacagccaatgatctgcgcaagcagtgtgatgtggtggacacggcattcaagaatgggctgaaggatacaaaggatgccagggacaagctggctgatcatctggccaagagaagctgaaactcaaggaggttaaattcttgccccaaggcacaagacaagttcatggcaggccagtactcatccagacacctggctccaaaagccaggtttggggccatcaaacttggccattcacatctatgttcaacatcacagacccggtctcagcatatttgtggaaaaataaaggagacacaggaaaaacgg

SEQ ID NO: 189985 - DNA, 1587 bp, Homo sapiens
  Payload ID: 17515
  Gene Symbol: TEKT1
  Gene Name: tektin 1
  ENST ID: ENST00000575592
  CDS Start-End: 131-373
gttgtcatggagaccgcgttgtttacctctctgttctgcaagagctggaagctccagttggggtaaggaggctcccatcccgagcttgcgtagtggttctgtgtggcgctgaggaatttggaaacctcaaatggctaaactattacaacctccacccaagttcctgccctcagagtggcacattgctaacaagaaccagtaccacagagcagacgctcaaaggtcccgatcagaacgcctggtcgcagaaagccagaggcttgtggatgaaattgaaaagaccacaagaaaatctcaaagcgatgtgaacaagaaactagggagaagcgcattggcattgacctggtgcacgacacagtggagcatgagctgataaaggaggctgagatcatccagggcattatggctctgctgacccgtaccttggaggaggcttccgagcagattcggatgaaccgctctgccaagtacaatcttgagaaggatttgaaggacaagtttgtggccctgaccatagatgatatctgcttctcgctcaacaacaactcaccaaacatcagatattctgagaacgccgtgaggattgagccaaactccgtgagtctggaagactggttggacttctccagcaccaatgtggagaaggctgacaagcagcggaacaactccctgatgctgaaagccctggtggatcgaatcctgtcccagacagccaatgatctgcgcaagcagtgtgatgtggtggacacggcattcaagaatgggctgaaggatacaaaggatgccagggacaagctggctgatcatctggccaaggtcatggaagagattgcttcccaggagaaaaatattacagctcttgaaaaggccatccttgaccaagaagggccagccaaggtggctcatacgcgcttggagaccaggacacaccggccgaacgtggagctgtgtcgtgatgtcgcacaatataggctaatgaaggaggttcaagagatcacccacaatgtcgcaagattgaaggaaactttagcccaagctcaggcagagctgaaagggctgcatcgcagacagcttgccctgcaggaggagatccaggtcaaagagaacaccatttatatcgacgaagtgctgtgtatgcagatgaggaaatccatcccacttcgggatggggaagaccatggggtctgggctgggggcctccgccctgatgctgtctgctaatagtagggctagttccaattctcattaaaccacattgtaaacagtagttacagtagtacagagctctcatttcaggctggcggggcctctagccagcctgctgcaacctcttggctggcattccaagcctgctcagggggctgattttggggcgagtttcttctcttatgctggtgtggtgtttgcctaacaattcaactccatattttagcacaggccactcttacaatatcacaggacttggggccccaggacagggtttcaagacatttcagttcagattcaattcaataaagtagttgggctggatcacctgtgtagaccatgcccctcttgctcatgagatgggatgctaacctttctctt

SEQ ID NO: 189986 - DNA, 1509 bp, Homo sapiens
  Payload ID: 17516
  Gene Symbol: TEKT2
  Gene Name: tektin 2 (testicular)
  Uniprot ID: Q9UIF3
  ENST ID: ENST00000207457
  CDS Start-End: 128-1420
tggttgcctagcaaccggtggtgccaaacactggagctcagagcggggggcgcggagagcgaagcgggaaaggaggtggtgtctgtgaacaggcctaggggtttctgacccttctggtttctgtgccatggccacgctgagcgtcaagccaagtcggcgcttccagctgcccgactggcacactaacagctacctgctatccaccaatgcccagctgcagcgagatgcttcccatcagatccgccaggaggcccgggtgctccgcaacgagaccaacaaccagaccatttgggatgaacatgacaacaggactcgactggtggagaggattgatactgtcaaccggtggaaggagatgctggacaagtgtctgacagatttagatgccgagatcgatgccctgacacagatgaaggagtcagcagagcaaaacctgcaggccaagaacctgcctctggatgtggccattgagtgcctgaccctgcgggaaagccggcgagacattgatgtggtgaaggaccctgtggaggatgagctgcataaagaggtggaggtcatcgaggccaccaagaaggccttgcaacagaaggtcagccaggccttcgagcagctctgcctcttgcaggaagtccaacagcagctcaactccgaccatcggggcaaaatggagacactagagatcgacagaggctgtctctctctcaacctcagatccccaaacatctcgctgaaggttgaccccacacgtgtacctgatggctccaccacactccagcagtgggatgacttcagtcggttcaacaaggaccgagcggaggctgagatgaaggcagccacagagctgagggaggccactgctctaactattgctgagaccaacaacgagcttgaagcccagagagttgcaacggaatttgccttcaggaagcggctgcgggagatggagaaagtgtacagtgagctcaagtggcaagagaagaataccttggaggagatcgctgagctgcaggaggacatccggcacctggaggaggatctgcgcacaaagctcctgagcctgaagctgtcccatacccggctagaggccagaacctaccggcccaacgtggaactctgccgggaccaggcacagtacggcctcaccgacgaggttcaccagctagaggcaaccatcgctgccctgaagcagaagctggcgcaagcacaggacgcactggacgccctgtgcaagcacctggcccggctgcaggctgacattgcctgcaaggccaactccatgctgctggacaccaagtgcatggacacacggcgcaagctgaccgtgcctgctgagaggttcgtgcctgaggtggacaccttcacacgtaccacaaatagcaccctgagtccactcaaaagctgccagctggagctggcctagccttggaggactgcaggaggagggcagggttgggtgggcaatggaaggagggaggagagaaatgaatggaataaatgcagaggatctca

SEQ ID NO: 189987 - DNA, 753 bp, Homo sapiens
  Payload ID: 17516
  Gene Symbol: TEKT2
  Gene Name: tektin 2 (testicular)
  ENST ID: ENST00000473120
  CDS Start-End: 1-289
caggaagcggctgcgggagatggagaaagtgtacagtgagctcaagtggcaagagaagaataccttggaggagatcgctgagctgcaggaggacatccggcacctggaggaggatctgcgcacaaagctcctgagcctgaagctgtcccatacccggctagaggccagaacctaccggcccaacgtggaactctgccgggaccaggcacagtacggcctcaccgacgaggttcaccagctagaggcaaccatcgctgccctgaagcagaagctggcgcaagcacagtaggtctcgggagtgggcggaaggagcagtgagacgctgcccacaaatggggcctcttgctggctgctggctccctggggctgtcttcctgactgaaggctatgcacgcagcccaggcctcccagcctcatgggggctggggggttgtcaatgtccttccctagggacgcactggacgccctgtgcaagcacctggcccggctgcaggctgacattgcctgcaaggccaactccatgctgctggacaccaagtgcatggacacacggcgcaagctgaccgtgcctgctgagaggttcgtgcctgaggtggacaccttcacacgtaccacaaatagcaccctgagtccactcaaaagctgccagctggagctggcctagccttggaggactgcaggaggagggcagggttgggtgggcaatggaaggagggaggagagaaatgaatggaataaatgcagaggatctca

SEQ ID NO: 189988 - DNA, 1738 bp, Homo sapiens
  Payload ID: 17516
  Gene Symbol: TEKT2
  Gene Name: tektin 2 (testicular)
  ENST ID: ENST00000469024
  CDS Start-End: 226-552
gcgggagggcgtggcggctaccagacggggagggggccgccccgggggccgccccccagctccccagtgccaacaggcacgcgtccctggagacagaacagggctcctgcccttagatcccccacggggactggcccgcagcctggggaagaaaggaaaggaagatcaacaaggtggtgtctgtgaacaggcctaggggtttctgacccttctggtttctgtgccatggccacgctgagcgtcaagccaagtcggcgcttccagctgcccgactggcacactaacagctacctgctatccaccaatgcccagctgcagcgagatgcttcccatcagatccgccaggaggcccgggtgctccgcaacgagaccaacaaccagaccatttgggatgaacatgacaacaggactcgactggtggagaggattgatactgtcaaccggtggaaggagatgctggacaagtgtctgacagatttagatgccgagatcgatgccctgacacagagacggggtttcaccattttggccaggctgttctcgaactcctgacctcaagtgttccatccaactcggcctcccgaagtgctgggattacagatgtgagccaccgtgcccggccgcgccctcttttctagatgaaggagtcagcagagcaaaacctgcaggccaagaacctgcctctggatgtggccattgagtgcctgaccctgcgggaaagccggcgagacattgatgtggtgaaggaccctgtggaggatgagctgcataaagaggtggaggtcatcgaggccaccaagaaggccttgcaacagaaggtcagccaggccttcgagcagctctgcctcttgcaggaagtccaacagcagctcaactccgaccatcggggcaaaatggagacactagagatcgacagaggctgtctctctctcaacctcagatccccaaacatctcgctgaaggttgaccccacacgtgtacctgatggctccaccacactccagcagtgggatgacttcagtcggttcaacaaggaccgagcggaggctgagatgaaggcagccacagagctgagggaggccactgctctaactattgctgagaccaacaacgagcttgaagcccagagagttgcaacggaatttgccttcaggaagcggctgcgggagatggagaaagtgtacagtgagctcaagtggcaagagaagaataccttggaggagatcgctgagctgcaggaggacatccggcacctggaggaggatctgcgcacaaagctcctgagcctgaagctgtcccatacccggctagaggccagaacctaccggcccaacgtggaactctgccgggaccaggcacagtacggcctcaccgacgaggttcaccagctagaggcaaccatcgctgccctgaagcagaagctggcgcaagcacaggacgcactggacgccctgtgcaagcacctggcccggctgcaggctgacattgcctgcaaggccaactccatgctgctggacaccaagtgcatggacacacggcgcaagctgaccgtgcctgctgagaggttcgtgcctgaggtggacaccttcacacgtaccacaaatagcaccctgagtccactcaaaagctgccagctggagctggcctagccttggaggactgcaggaggagggcagggttgggtgggcaatggaaggagggaggagagaaatgaatggaataaatgcagaggatctca

SEQ ID NO: 189989 - DNA, 1630 bp, Homo sapiens
  Payload ID: 17517
  Gene Symbol: TEKT3
  Gene Name: tektin 3
  Uniprot ID: Q9BXF9
  ENST ID: ENST00000338696
  CDS Start-End: 36-1508
taacaggagagatttacaaatagtgttttggcatcatggaacgtgtaggttgtactttaacgacaacttacgcccaccctagaccaacaccaaccaactttctaccagccatcagtaccatggcctcaagctacagggaccgctttccccactccaatttgacccatagcctgagccttccttggagacccagcacatactacaaagtcgcctccaattccccaagcgtggccccgtactgcaccagatcacagagggtgtccgagaataccatgcttccctttgtttccaacagaaccactttcttcacaagatacacaccggatgactggtacaggtccaatttaaccaactatcaagagtccaacacttcccgacataattcggagaaactaagagtggatacatctcgcctgattcaagacaaatatcaacaaacaagaaaaactcaggcagacacaacccaaaatctgggagaacgtgtcaatgacatagggttttggaaatctgaaatcattcatgagttggatgaaatgattggagagacaaatgcacttactgatgtgaagaaaagactggagcgggctttgatggagactgaagcccctcttcaggtagcccgagaatgtctatttcatcgagaaaagagaatgggaatcgacctagttcacgatgaagttgaagcacaactgctgacggaagttgatactattctgtgttgtcaagaaagaatgaagctacatttggataaggctattgcccaacttgcagccaacagagcgtcccagcatgagctggaaaaggacctgagtgacaaacagacggcttaccggatcgacgacaaatgccaccacctgcgcaacacatcagacggtgtcggctacttccgcggagtggagagggtcgatgcaactgtctcagtgcctgagtcctgggccaaatttacagatgacaatattctccgctcccagagtgaacgggcagcttccgctaagctaagagacgacattgaaaacctcttggttgtgactgccaatgagatgtggaatcaattcaacaaagtgaacttgtctttcaccaatcgcattgctgagactgcagatgctaagaataagattcagacgcacttagcaaagaccctgcaggagattttccagactgaaatgaccatagaatccatcaagaaggccatcaaggacaagactgccttcctgaaggtggctcagaccagactggatgagcgcacaagacggccgaacattgagttgtgccgagacatggctcagctacgccttgttaacgaggtacacgaggttgacgacaccatccagaccctgcagcagcgcctgagggatgcagaggacaccctgcagtcgctggtccacatcaaagccacactcgagtatgacctggctgtcaaagccaattccctgtacatcgaccaggaaaaatgcatgagcatgcgcaagagctaccccaacaccctccggctggtcggcttctgctagggaccccaccgggtgtggttttgatacccctaagttaaggctgagccagagcactgtctcagcatttgaaccgaatgctaatatagtcacttattaaaggattatgctgatggaaatgtacc

SEQ ID NO: 189990 - DNA, 1785 bp, Homo sapiens
  Payload ID: 17517
  Gene Symbol: TEKT3
  Gene Name: tektin 3
  Uniprot ID: Q9BXF9
  ENST ID: ENST00000395930
  CDS Start-End: 188-1660
acagataggaaaggcggggccagggccagactggtctgggccccagtcgagggctgcaggtggtaggctgcgaccccttcctcccacagccccttcccgcccctcgccgggcatccgccgacaggtacataccaagaaattgaattgctgagtcacaggagagatttacaaatagtgttttggcatcatggaacgtgtaggttgtactttaacgacaacttacgcccaccctagaccaacaccaaccaactttctaccagccatcagtaccatggcctcaagctacagggaccgctttccccactccaatttgacccatagcctgagccttccttggagacccagcacatactacaaagtcgcctccaattccccaagcgtggccccgtactgcaccagatcacagagggtgtccgagaataccatgcttccctttgtttccaacagaaccactttcttcacaagatacacaccggatgactggtacaggtccaatttaaccaactatcaagagtccaacacttcccgacataattcggagaaactaagagtggatacatctcgcctgattcaagacaaatatcaacaaacaagaaaaactcaggcagacacaacccaaaatctgggagaacgtgtcaatgacatagggttttggaaatctgaaatcattcatgagttggatgaaatgattggagagacaaatgcacttactgatgtgaagaaaagactggagcgggctttgatggagactgaagcccctcttcaggtagcccgagaatgtctatttcatcgagaaaagagaatgggaatcgacctagttcacgatgaagttgaagcacaactgctgacggaagttgatactattctgtgttgtcaagaaagaatgaagctacatttggataaggctattgcccaacttgcagccaacagagcgtcccagcatgagctggaaaaggacctgagtgacaaacagacggcttaccggatcgacgacaaatgccaccacctgcgcaacacatcagacggtgtcggctacttccgcggagtggagagggtcgatgcaactgtctcagtgcctgagtcctgggccaaatttacagatgacaatattctccgctcccagagtgaacgggcagcttccgctaagctaagagacgacattgaaaacctcttggttgtgactgccaatgagatgtggaatcaattcaacaaagtgaacttgtctttcaccaatcgcattgctgagactgcagatgctaagaataagattcagacgcacttagcaaagaccctgcaggagattttccagactgaaatgaccatagaatccatcaagaaggccatcaaggacaagactgccttcctgaaggtggctcagaccagactggatgagcgcacaagacggccgaacattgagttgtgccgagacatggctcagctacgccttgttaacgaggtacacgaggttgacgacaccatccagaccctgcagcagcgcctgagggatgcagaggacaccctgcagtcgctggtccacatcaaagccacactcgagtatgacctggctgtcaaagccaattccctgtacatcgaccaggaaaaatgcatgagcatgcgcaagagctaccccaacaccctccggctggtcggcttctgctagggaccccaccgggtgtggttttgatacccctaagttaaggctgagccagagcactgtctcagcatttgaaccgaatgctaatatagtcacttattaaaggattatgctgatggaaatgtaccaac

SEQ ID NO: 189991 - DNA, 1820 bp, Homo sapiens
  Payload ID: 17517
  Gene Symbol: TEKT3
  Gene Name: tektin 3
  ENST ID: ENST00000395931
  CDS Start-End: 110-787
agtcgagggctgcaggtggtaggctgcgaccccttcctcccacagccccttcccgcccctcgccgggcatccgccgacaggagagatttacaaatagtgttttggcatcatggaacgtgtaggttgtactttaacgacaacttacgcccaccctagaccaacaccaaccaactttctaccagccatcagtaccatggcctcaagctacagggaccgctttccccactccaatttgacccatagcctgagccttccttggagacccagcacatactacaaagtcgcctccaattccccaagcgtggccccgtactgcaccagatcacagagggtgtccgagaataccatgcttccctttgtttccaacagaaccactttcttcacaagatacacaccggatgactggtacaggtccaatttaaccaactatcaagagtccaacacttcccgacataattcggagaaactaagagtggatacatctcgcctgattcaagacaaatatcaacaaacaagaaaaactcaggcagacacaacccaaaatctgggagaacgtgtcaatgacatagggttttggaaatctgaaatcattcatgagttggatgaaatgattggagagacaaatgcacttactgatgtgaagaaaagactggagcgggctttgatggagactgaagcccctcttcaggtagcccgagaatgtctatttcatcgagaaaagagaatgggaatcgacctagttcacgatgaagttgaagcacaactgctgacggacattgtcacctgagtgtgaagctccacttcccgactctgtattgcagagccaacagagcgtcccagcatgagctggaaaaggacctgagtgacaaacagacggcttaccggatcgacgacaaatgccaccacctgcgcaacacatcagacggtgtcggctacttccgcggagtggagagggtcgatgcaactgtctcagtgcctgagtcctgggccaaatttacagatgacaatattctccgctcccagagtgaacgggcagcttccgctaagctaagagacgacattgaaaacctcttggttgtgactgccaatgagatgtggaatcaattcaacaaagtgaacttgtctttcaccaatcgcattgctgagactgcagatgctaagaataagattcagacgcacttagcaaaggagaagtgaccgttccaggtggggccacatcttgaagaaagccttggagacagcaaatcagaggatgaattgaggtctgtaaagagtctggtgtgtggctggtgtagatggtttgtgtcctgggagaggaacatggaaaaaccctgcaggagattttccagactgaaatgaccatagaatccatcaagaaggccatcaaggacaagactgccttcctgaaggtggctcagaccagactggatgagcgcacaagacggccgaacattgagttgtgccgagacatggctcagctacgccttgttaacgaggtacacgaggttgacgacaccatccagaccctgcagcagcgcctgagggatgcagaggacaccctgcagtcgctggtccacatcaaagccacactcgagtatgacctggctgtcaaagccaattccctgtacatcgaccaggaaaaatgcatgagcatgcgcaagagctaccccaacaccctccggctggtcggcttctgctagggaccccaccgggtgtggttttgatacccctaagttaaggctgagccagagcactgtctcagcatttgaaccgaatgctaatatagtcacttattaaaggattatgctgatggaaatgta

SEQ ID NO: 189992 - DNA, 564 bp, Homo sapiens
  Payload ID: 17517
  Gene Symbol: TEKT3
  Gene Name: tektin 3
  ENST ID: ENST00000539316
  CDS Start-End: 145-564
aaaggcggggccagggccagactggtctgggccccagtcgagggctgcaggtggtaggctgcgaccccttcctcccacagccccttcccgcccctcgccgggcatccgccgacaggagagatttacaaatagtgttttggcatcatggaacgtgtaggttgtactttaacgacaacttacgcccaccctagaccaacaccaaccaactttctaccagccatcagtaccatggcctcaagctacagggaccgctttccccactccaatttgacccatagcctgagccttccttggagacccagcacatactacaaagtcgcctccaattccccaagcgtggccccgtactgcaccagatcacagagggtgtccgagaataccatgcttccctttgtttccaacagaaccactttcttcacaagatacacaccggatgactggtacaggtccaatttaaccaactatcaagagtccaacacttcccgacataattcggagaaactaagagtggatacatctcgcctgattcaagacaaatatcaacaaacaagaaaaactcaggca

SEQ ID NO: 189993 - DNA, 970 bp, Homo sapiens
  Payload ID: 17517
  Gene Symbol: TEKT3
  Gene Name: tektin 3
  ENST ID: ENST00000539245
  CDS Start-End: 391-970
agtcgagggctgcaggtggtaggctgcgaccccttcctcccacagccccttcccgcccctcgccgggcatccgccgacaggtacataccaagaaattgaattgctgagtcacaggagagatttacaaatagtgttttggcatcatggaacgtaaccactttcttcacaagatacacaccggatgactggtacaggtccaatttaaccaactatcaagagtccaacacttcccgacataattcggagaaactaagagtggatacatctcgcctgattcaagacaaatatcaacaaacaagaaaaactcaggcagacacaacccaaaatctgggagaacgtgtcaatgacatagggttttggaaatctgaaatcattcatgagttggatgaaatgattggagagacaaatgcacttactgatgtgaagaaaagactggagcgggctttgatggagactgaagcccctcttcaggtagcccgagaatgtctatttcatcgagaaaagagaatgggaatcgacctagttcacgatgaagttgaagcacaactgctgacggaagttgatactattctgtgttgtcaagaaagaatgaagctacatttggataaggctattgcccaacttgcagccaacagagcgtcccagcatgagctggaaaaggacctgagtgacaaacagacggcttaccggatcgacgacaaatgccaccacctgcgcaacacatcagacggtgtcggctacttccgcggagtggagagggtcgatgcaactgtctcagtgcctgagtcctgggccaaatttacagatgacaatattctccgctcccagagtgaacgggcagcttccgctaagctaagagacgacattgaaaacctcttggttgtgactgccaatgagatgtggaatcaattcaacaaagtgaacttgtctttcaccaatcgcattgctgagactgcagatgctaagaata

SEQ ID NO: 189994 - DNA, 483 bp, Homo sapiens
  Payload ID: 17517
  Gene Symbol: TEKT3
  Gene Name: tektin 3
  ENST ID: ENST00000543896
  CDS Start-End: 238-483
gagggctgcaggtggtaggctgcgaccccttcctcccacagccccttcccgcccctcgccgggcatccgccgacaggctggagtgcaatggcatgatctcagctcaccggaacctccgcctcccagattcaagcgattctcctgcctcagccccctgagtagctgggattacaggtacataccaagaaattgaattgctgagtcacaggagagatttacaaatagtgttttggcatcatggaacgtgtaggttgtactttaacgacaacttacgcccaccctagaccaacaccaaccaactttctaccagccatcagtaccatggcctcaagctacagggaccgctttccccactccaatttgacccatagcctgagccttccttggagacccagcacatactacaaagtcgcctccaattccccaagcgtggccccgtactgcaccagatcacagagggtgtccgagaataccatgcttccc

SEQ ID NO: 189995 - DNA, 583 bp, Homo sapiens
  Payload ID: 17517
  Gene Symbol: TEKT3
  Gene Name: tektin 3
  ENST ID: ENST00000536146
  CDS Start-End: 141-583
actccagcctgggggacagagcgagactccatctcaaaaaaaaaaaaaagaattgactgagttagaatttagagagtaagttaatcattgtgaaagatgcgcaccaccaaagagagatttacaaatagtgttttggcatcatggaacgtgtaggttgtactttaacgacaacttacgcccaccctagaccaacaccaaccaactttctaccagccatcagtaccatggcctcaagctacagggaccgctttccccactccaatttgacccatagcctgagccttccttggagacccagcacatactacaaagtcgcctccaattccccaagcgtggccccgtactgcaccagatcacagagggtgtccgagaataccatgcttccctttgtttccaacagaaccactttcttcacaagatacacaccggatgactggtacaggtccaatttaaccaactatcaagagtccaacacttcccgacataattcggagaaactaagagtggatacatctcgcctgattcaagacaaatatcaacaaacaagaaaaactcaggcagacacaacccaaaatctgggaga

SEQ ID NO: 189996 - DNA, 1505 bp, Homo sapiens
  Payload ID: 17518
  Gene Symbol: TEKT4
  Gene Name: tektin 4
  Uniprot ID: Q8WW24
  ENST ID: ENST00000295201
  CDS Start-End: 138-1445
tcacccaagcgactgggagccgcgtcctgctctgggactgagccgttggagctgccccgctgaccgcactaggctgaccgcaaccggctgaccacacacagtcctcactcccctggccctggtgggcggcaggcaccatggcgcagacagtgccgccctgcgagctgccctgcaaagagtacgacgtggcccgtaacacgggcgcctacacgtcctccggcctggccaccgccagcttccgcacctccaagtacctgctggaggagtggttccagaactgctatgctcgctaccaccaggccttcgccgaccgcgaccagtcggagcggcagcggcacgagagccagcagctggccacagagacccaggcgctggcgcagcgcacgcagcaagactccacgcgcacagtgggcgagcgactgcaggacacgcacagctggaagtcggagctgcagcgtgagatggaggcgctggctgcggagaccaacttgctcctggcccagaagcaacggctggagcgcgccctggacgccacagaggtgcccttctccatcaccactgacaacctgcagtgccgtgagcgccgcgagcaccccaacctcgtgcgcgaccatgtggaaacggagctgctgaaggaagccgagctcatccggaacattcaggagctgctgaagagaaccatcatgcaagcagtgagccagatccgactgaaccgggagcacaaggagacctgcgagatggactggtcagacaagatggaggcctacaacatcgacgagacctgcgggcgccaccacagccagagcaccgaggtgcaggctcatccgtactccaccaccttccaagagagcgcctccaccccggagacccgggccaagttcacgcaggacaatctgtgccgtgcccagcgcgagcgcctggcctcggccaacctgcgggtgctggtggactgcatccttcgcgacacctccgaggacctgcggctccagtgcgacgccgtgaacctggccttcgggcgccgctgtgaggagctggaggacgcgcggtacaagctgcatcaccacctgcacaagacactgcgggaaatcacagatcaggaacacaacgtggcggcactgaagcaggccatcaaggacaaagaggcacctctgcacgtagcccagacccggctgtacctgcgctcgcaccggcccaacatggagctgtgccgtgacgcagcccagttcaggctgttgagtgaggtggaggagctgaacatgtccctcacagcactgcgagagaagcttctagaagcggagcagtccctgcgcaacctcgaggacatccacatgagcctggagaaggacattgccgccatgaccaacagtctcttcatcgaccgccagaagtgcatggcccatcgtactcgctaccccaccatcctgcagctggctggctaccagtgagcagcggcacggtgcttccccccagtcccccaaataaacagcgcgttagctttctgcaca

SEQ ID NO: 189997 - DNA, 1612 bp, Homo sapiens
  Payload ID: 17519
  Gene Symbol: TEKT5
  Gene Name: tektin 5
  Uniprot ID: Q96M29
  ENST ID: ENST00000283025
  CDS Start-End: 73-1530
actttcacctttcctggtgatgcctttggctccttgagctgagttttgcccgagtggggctcatgagggaggatggagtttcttgggactactcagaccgccagttactgtggtcccaagaaatgctgtggcttgacctcactgccagctgtacaggcgccagtgatccaggaatgctatcagccctactacctgcccgggtaccgctacctcaattcatggaggcctagcctcttctacaagatagccaacgtccagacctgcccggacgagagcaccagtaccctgcggccgcccaccatcctgcccacactgcgctccgcactcttctctcgctatagcccccacgactgggaccagtccaaccagctgcaggtgcgtggggccgaggcctcccggctgtgggccagccggctgacggatgactccatgaggctcttgcaggacaaggaccagctgacgcaccagatgcaggagggcacctgccggaacctgggccagaggctgtcggacattggcttctggaagtcagagctgagctatgagctggacaggcttctgactgagaaccagaacttggagacggtcaagaggcggctggagtgcgcggccaatgaggtgaactgcccattgcaggtggccttggagtgtctgtaccatcgagagaagaggattgggattgatttggtccatgacaacgtggagaaaaaccttatccgggaagtggatttgctaaaatgttgccaagaacagatgagaaaattagctcaaagaattgatatccagatgcgggataaccgggatgctcagcacgtgctggagagggacctcgaagacaaaagctcggcccagtgtatcgatgagaagtgctttaacctgagaaatacgtcagactgcatcagcttcttccacggcatggagaaaattgacggcacgatctccgtacctgagacctgggccaagttcagtaacgacaacatcaaacactctcagaacatgcgggccaactccatccagctgcgggaggaggcggagcacctctttgagaccttgtcggatcagatgtggaggcagttcacagacaccaacctggccttcaacgcccgcatctctgaggtgacggatgtgaagaataagctgcagacgcagctggcgaagacgctgcaggagatcttccaggccgagaacaccatcatgctgctggaaaggtccatcatggccaaggagggcccgctgaaggtggcccagacaaggctggagtgccggacccggcgccccaacatggagctgtgcagggacatcccgcagttgaagctggtgaacgaggtgttcaccatcgacgacaccctgcagaccctcaagctgcggctgcgggagacacaggacacgctgcagctgctggtcatgaccaagtgccggctggagcacgagctcgccatcaaggccaacaccctctgcatcgacaaggagaagtgcatgggcatgcgtaagaccttcccctgcaccccgcgcctggtgggccacacctgagcaccgccctggcgcctcattccgcgctggcgtaaaattggaaaaggctgagaaacaaagtaaaacagtattttgtttgaaa

SEQ ID NO: 189998 - DNA, 771 bp, Homo sapiens
  Payload ID: 17519
  Gene Symbol: TEKT5
  Gene Name: tektin 5
  ENST ID: ENST00000576638
  CDS Start-End: 212-771
gaacagattgtggcaagggtggatgtgagtcccttctgctcagggtctacatacagctacaggaagaatacgttctttctgctgcttcccacaggtggccttggagtgtctgtaccatcgagagaagaggattgggattgatttggtccatgacaacgtggagaaaaaccttatccgggaagtggatttgctaaaatgttgccaagaacagatgagaaaattagctcaaagaattgatatccagatgcgggataaccgggatgctcagcacgtgctggagagggacctcgaagacaaaagctcggcccagtgtatcgatgagaagtgctttaacctgagaaatacgtcagactgcatcagcttcttccacggcatggagaaaattgacggcacgatctccgtacctgagacctgggccaagttcagtaacgacaacatcaaacactctcagaacatgcgggccaactccatccagctgcgggaggaggcggagcacctctttgagaccttgtcggatcagatgtggaggcagttcacagacaccaacctggccttcaacgcccgcatctctgaggtgacggatgtgaagaataagctgcagacgcagctggcgaagacgctgcaggagatcttccaggccgagaacaccatcatgctgctggaaaggtccatcatggccaaggagggcccgctgaaggtggcccagacaaggctggagtgccggacccggcgccccaacatggagctgtgcagggacatcccgcagttgaa

SEQ ID NO: 189999 - DNA, 3825 bp, Homo sapiens
  Payload ID: 17520
  Gene Symbol: TTI1
  Gene Name: TELO2 interacting protein 1
  Uniprot ID: O43156
  ENST ID: ENST00000373447
  CDS Start-End: 107-3376
acttagcgcgtcacttccggcgaggcagaggaggcgggagagtgagagaaaggctggaagacgagcctgcaggatgtttcctcaatgaggggaaggctgctgcacaatggcagtttttgatactcctgaggaggcctttggtgtcttacgtccagtctgtgttcagctcacaaagacccagacagtggagaatgtggagcatctgcagacacgactacaagctgtgagtgacagtgcccttcaggaacttcagcagtacatcctcttccctctgcgatttaccctgaagaccccaggtcccaaaagagagcgtttgatccaaagtgtggtggaatgcctcacatttgtcctttcttcaacatgtgtgaaagaacaggagcttctccaggaactcttttcagaactctctgcttgtctgtattcacccagctcccaaaaacctgcggctgtgtccgaggagttgaaattggctgtgatccagggacttagcacattaatgcactcagcttatggggacatcattctgactttttatgagccctccattctgccacgtttaggatttgctgtatctttactgttaggccttgcagaacaggagaaatcaaagcaaattaaaattgctgccttaaaatgtttacaggttctactcttgcagtgtgattgtcaggaccatccaaggtcattggatgaacttgaacaaaagcagctgggggatttgtttgcctcttttttacctggaatctcaactgcactgaccaggcttatcacaggagactttaaacaaggtcacagcattgtcgtatcttccctaaagatcttttacaagacagtgagcttcattatggctgatgaacagctcaaaagaatctcaaaggtccaagcaaaacctgcagttgagcacagagtagcagagctgatggtttacagggaagcagattgggtaaaaaagactggcgacaagttgactatccttattaaaaagataattgagtgtgtttctgttcacccacactggaaggtgagactggaactggtagaacttgtggaggaccttcttttgaagtgcagtcaatcattggtcgaatgtgctggtccccttctgaaggccttagtgggactagtaaatgatgagagtcctgaaatccaagcccagtgcaataaagttctgagacattttgcagatcaaaaagtagtggtgggcaacaaagccctcgctgacatcttgtcagaaagcctgcattcccttgccacatctcttcctcgcctaatgaactcccaagatgaccagggcaaattctctactctttccttgttacttggttatctgaaactcttgggcccaaaaataaactttgtcctcaactctgtggcccatctccagcggctttccaaagcactcatccaagttctagagctagacgtggctgacatcaagattgttgaggaacggcgttggaactctgatgatctgaatgcttctccaaagacctcagccacacagccttggaaccgcatccagaggagatatttccgcttcttcactgatgagagaatcttcatgctcttgaggcaggtttgtcagctacttggttattatgggaatctttatttgcttgtggatcactttatggaactttaccatcaatctgtggtttaccggaagcaagctgccatgatccttaatgaactggttacaggggctgctgggctggaggttgaggatcttcacgaaaaacatattaaaacaaacccagaagaactgagagagattgtgacatctatacttgaagaatacacaagtcaagaaaattggtatttggttacctgtcttgaaactgaggaaatgggagaggagctgatgatggagcacccaggcctccaagccatcacgtctggtgaacacacctgccaagttacatcttttctagccttctcaaagccaagtcccactatttgctccatgaacagtaacatctggcaaatatgcattcagttggaaggaattggccagtttgcatatgcactaggaaaagacttctgtttgctcttgatgtcagccctttatccagtactggagaaggctggagaccaaaccctactcattagtcaggtggctaccagcaccatgatggacgtttgccgtgcttgtggctacgactccctgcagcacctgatcaatcaaaattcagactatttagtgaatgggatctctttaaatctgcgtcatctggctctgcatcctcataccccaaaggtcctggaagtcatgctgcggaactcagatgctaacctgcttcctttggtggcagatgtggttcaagatgtcttggccaccctggaccaattttacgataagagagctgcttcctttgtcagcgttctgcatgctctgatggcagcattagcccagtggttcccagacacaggtaatcttgggcacctccaagagcaaagtttaggagaagagggaagtcatttgaaccaaagaccagcagctcttgagaagagcaccaccacagctgaagacatcgaacagtttttgctgaactacctcaaagagaaggatgtggcagatggaaatgtctcggattttgataatgaagaagaggaacagtcagtccctcccaaagtggatgagaatgacacccgtccagatgtggagccaccactgccattgcagatccaaatagccatggacgtgatggaacgctgcatccacttgttgtcagataaaaatctgcaaatccgcctgaaggtcttggatgtgctggatctgtgtgtggttgttcttcagtcccacaaaaaccagctgcttcccttggctcatcaggcctggccctcgctcgttcaccgactcacacgggacgcccccctggcagtgcttagagccttcaaggttttacgtaccctgggaagcaagtgtggtgactttcttcgcagccggttctgcaaagatgtcctgccaaagctggctggctccctagtcacccaggcccccatcagtgccagggctggaccagtttactcgcacacgctggccttcaagttgcagctggctgtcttacagggcctgggccccctctgtgagagactggacctaggtgagggtgacctgaataaagtggctgatgcctgcttgatttacctcagtgtcaaacagcccgtgaaattacaagaggctgccaggagcgtcttcctccacttgatgaaggtggacccagactccacctggttcctcctgaacgagctttactgccccgtgcagttcacacctccccaccccagcctccaccctgtgcagctgcacggggccagcgggcagcagaacccctacacgaccaacgtgctccagctgctcaaggagctgcagtgaccctgctcccccaccacagaggccaccgatccctcccctactgccagccagaagctgggctgaccccaccccggccataggcggtggcagcggcagcagagaaggtgaattagttagccaatcgatttataaattgatcgatcacacaactgcttagaaatggattgaaggaaagtagctgactattatttatgtttcataccttgtgttgtcaagtgacattgtctggtggctctaagggtttaaccccttagcctaccatctctatagccccagctccctcacaggccacacacacacacacacaagaggtcagttcccctccatctgcatacacctccctgtcttcaaataatgagatggaactaatttgttttacctaacctgatctttgggaaacaaacggaaataaagacacttcttggatgaaaagtatgatcaaaagctca

SEQ ID NO: 190000 - DNA, 3958 bp, Homo sapiens
  Payload ID: 17520
  Gene Symbol: TTI1
  Gene Name: TELO2 interacting protein 1
  Uniprot ID: O43156
  ENST ID: ENST00000373448
  CDS Start-End: 240-3509
gcgtcacttccggcgaggcagaggaggcgggagagtgagagaaaggctggaagacgagacctgctcactctgtcaccgaggctagagtacagtggcacaatcacagctcattgcagcctcaacctcccaggctcaatcgatccttccaactgagcctccctagcagctgggactattagtgcacaccaccacacctagcctgcaggatgtttcctcaatgaggggaaggctgctgcacaatggcagtttttgatactcctgaggaggcctttggtgtcttacgtccagtctgtgttcagctcacaaagacccagacagtggagaatgtggagcatctgcagacacgactacaagctgtgagtgacagtgcccttcaggaacttcagcagtacatcctcttccctctgcgatttaccctgaagaccccaggtcccaaaagagagcgtttgatccaaagtgtggtggaatgcctcacatttgtcctttcttcaacatgtgtgaaagaacaggagcttctccaggaactcttttcagaactctctgcttgtctgtattcacccagctcccaaaaacctgcggctgtgtccgaggagttgaaattggctgtgatccagggacttagcacattaatgcactcagcttatggggacatcattctgactttttatgagccctccattctgccacgtttaggatttgctgtatctttactgttaggccttgcagaacaggagaaatcaaagcaaattaaaattgctgccttaaaatgtttacaggttctactcttgcagtgtgattgtcaggaccatccaaggtcattggatgaacttgaacaaaagcagctgggggatttgtttgcctcttttttacctggaatctcaactgcactgaccaggcttatcacaggagactttaaacaaggtcacagcattgtcgtatcttccctaaagatcttttacaagacagtgagcttcattatggctgatgaacagctcaaaagaatctcaaaggtccaagcaaaacctgcagttgagcacagagtagcagagctgatggtttacagggaagcagattgggtaaaaaagactggcgacaagttgactatccttattaaaaagataattgagtgtgtttctgttcacccacactggaaggtgagactggaactggtagaacttgtggaggaccttcttttgaagtgcagtcaatcattggtcgaatgtgctggtccccttctgaaggccttagtgggactagtaaatgatgagagtcctgaaatccaagcccagtgcaataaagttctgagacattttgcagatcaaaaagtagtggtgggcaacaaagccctcgctgacatcttgtcagaaagcctgcattcccttgccacatctcttcctcgcctaatgaactcccaagatgaccagggcaaattctctactctttccttgttacttggttatctgaaactcttgggcccaaaaataaactttgtcctcaactctgtggcccatctccagcggctttccaaagcactcatccaagttctagagctagacgtggctgacatcaagattgttgaggaacggcgttggaactctgatgatctgaatgcttctccaaagacctcagccacacagccttggaaccgcatccagaggagatatttccgcttcttcactgatgagagaatcttcatgctcttgaggcaggtttgtcagctacttggttattatgggaatctttatttgcttgtggatcactttatggaactttaccatcaatctgtggtttaccggaagcaagctgccatgatccttaatgaactggttacaggggctgctgggctggaggttgaggatcttcacgaaaaacatattaaaacaaacccagaagaactgagagagattgtgacatctatacttgaagaatacacaagtcaagaaaattggtatttggttacctgtcttgaaactgaggaaatgggagaggagctgatgatggagcacccaggcctccaagccatcacgtctggtgaacacacctgccaagttacatcttttctagccttctcaaagccaagtcccactatttgctccatgaacagtaacatctggcaaatatgcattcagttggaaggaattggccagtttgcatatgcactaggaaaagacttctgtttgctcttgatgtcagccctttatccagtactggagaaggctggagaccaaaccctactcattagtcaggtggctaccagcaccatgatggacgtttgccgtgcttgtggctacgactccctgcagcacctgatcaatcaaaattcagactatttagtgaatgggatctctttaaatctgcgtcatctggctctgcatcctcataccccaaaggtcctggaagtcatgctgcggaactcagatgctaacctgcttcctttggtggcagatgtggttcaagatgtcttggccaccctggaccaattttacgataagagagctgcttcctttgtcagcgttctgcatgctctgatggcagcattagcccagtggttcccagacacaggtaatcttgggcacctccaagagcaaagtttaggagaagagggaagtcatttgaaccaaagaccagcagctcttgagaagagcaccaccacagctgaagacatcgaacagtttttgctgaactacctcaaagagaaggatgtggcagatggaaatgtctcggattttgataatgaagaagaggaacagtcagtccctcccaaagtggatgagaatgacacccgtccagatgtggagccaccactgccattgcagatccaaatagccatggacgtgatggaacgctgcatccacttgttgtcagataaaaatctgcaaatccgcctgaaggtcttggatgtgctggatctgtgtgtggttgttcttcagtcccacaaaaaccagctgcttcccttggctcatcaggcctggccctcgctcgttcaccgactcacacgggacgcccccctggcagtgcttagagccttcaaggttttacgtaccctgggaagcaagtgtggtgactttcttcgcagccggttctgcaaagatgtcctgccaaagctggctggctccctagtcacccaggcccccatcagtgccagggctggaccagtttactcgcacacgctggccttcaagttgcagctggctgtcttacagggcctgggccccctctgtgagagactggacctaggtgagggtgacctgaataaagtggctgatgcctgcttgatttacctcagtgtcaaacagcccgtgaaattacaagaggctgccaggagcgtcttcctccacttgatgaaggtggacccagactccacctggttcctcctgaacgagctttactgccccgtgcagttcacacctccccaccccagcctccaccctgtgcagctgcacggggccagcgggcagcagaacccctacacgaccaacgtgctccagctgctcaaggagctgcagtgaccctgctcccccaccacagaggccaccgatccctcccctactgccagccagaagctgggctgaccccaccccggccataggcggtggcagcggcagcagagaaggtgaattagttagccaatcgatttataaattgatcgatcacacaactgcttagaaatggattgaaggaaagtagctgactattatttatgtttcataccttgtgttgtcaagtgacattgtctggtggctctaagggtttaaccccttagcctaccatctctatagccccagctccctcacaggccacacacacacacacacaagaggtcagttcccctccatctgcatacacctccctgtcttcaaataatgagatggaactaatttgttttacctaacctgatctttgggaaacaaacggaaataaagacacttcttggatgaaaagtatgatcaaaagctca

SEQ ID NO: 190001 - DNA, 3791 bp, Homo sapiens
  Payload ID: 17520
  Gene Symbol: TTI1
  Gene Name: TELO2 interacting protein 1
  Uniprot ID: O43156
  ENST ID: ENST00000449821
  CDS Start-End: 88-3357
cttgctttgaacttgacatttttactgaacagtttccttcctccagcctgcaggatgtttcctcaatgaggggaaggctgctgcacaatggcagtttttgatactcctgaggaggcctttggtgtcttacgtccagtctgtgttcagctcacaaagacccagacagtggagaatgtggagcatctgcagacacgactacaagctgtgagtgacagtgcccttcaggaacttcagcagtacatcctcttccctctgcgatttaccctgaagaccccaggtcccaaaagagagcgtttgatccaaagtgtggtggaatgcctcacatttgtcctttcttcaacatgtgtgaaagaacaggagcttctccaggaactcttttcagaactctctgcttgtctgtattcacccagctcccaaaaacctgcggctgtgtccgaggagttgaaattggctgtgatccagggacttagcacattaatgcactcagcttatggggacatcattctgactttttatgagccctccattctgccacgtttaggatttgctgtatctttactgttaggccttgcagaacaggagaaatcaaagcaaattaaaattgctgccttaaaatgtttacaggttctactcttgcagtgtgattgtcaggaccatccaaggtcattggatgaacttgaacaaaagcagctgggggatttgtttgcctcttttttacctggaatctcaactgcactgaccaggcttatcacaggagactttaaacaaggtcacagcattgtcgtatcttccctaaagatcttttacaagacagtgagcttcattatggctgatgaacagctcaaaagaatctcaaaggtccaagcaaaacctgcagttgagcacagagtagcagagctgatggtttacagggaagcagattgggtaaaaaagactggcgacaagttgactatccttattaaaaagataattgagtgtgtttctgttcacccacactggaaggtgagactggaactggtagaacttgtggaggaccttcttttgaagtgcagtcaatcattggtcgaatgtgctggtccccttctgaaggccttagtgggactagtaaatgatgagagtcctgaaatccaagcccagtgcaataaagttctgagacattttgcagatcaaaaagtagtggtgggcaacaaagccctcgctgacatcttgtcagaaagcctgcattcccttgccacatctcttcctcgcctaatgaactcccaagatgaccagggcaaattctctactctttccttgttacttggttatctgaaactcttgggcccaaaaataaactttgtcctcaactctgtggcccatctccagcggctttccaaagcactcatccaagttctagagctagacgtggctgacatcaagattgttgaggaacggcgttggaactctgatgatctgaatgcttctccaaagacctcagccacacagccttggaaccgcatccagaggagatatttccgcttcttcactgatgagagaatcttcatgctcttgaggcaggtttgtcagctacttggttattatgggaatctttatttgcttgtggatcactttatggaactttaccatcaatctgtggtttaccggaagcaagctgccatgatccttaatgaactggttacaggggctgctgggctggaggttgaggatcttcacgaaaaacatattaaaacaaacccagaagaactgagagagattgtgacatctatacttgaagaatacacaagtcaagaaaattggtatttggttacctgtcttgaaactgaggaaatgggagaggagctgatgatggagcacccaggcctccaagccatcacgtctggtgaacacacctgccaagttacatcttttctagccttctcaaagccaagtcccactatttgctccatgaacagtaacatctggcaaatatgcattcagttggaaggaattggccagtttgcatatgcactaggaaaagacttctgtttgctcttgatgtcagccctttatccagtactggagaaggctggagaccaaaccctactcattagtcaggtggctaccagcaccatgatggacgtttgccgtgcttgtggctacgactccctgcagcacctgatcaatcaaaattcagactatttagtgaatgggatctctttaaatctgcgtcatctggctctgcatcctcataccccaaaggtcctggaagtcatgctgcggaactcagatgctaacctgcttcctttggtggcagatgtggttcaagatgtcttggccaccctggaccaattttacgataagagagctgcttcctttgtcagcgttctgcatgctctgatggcagcattagcccagtggttcccagacacaggtaatcttgggcacctccaagagcaaagtttaggagaagagggaagtcatttgaaccaaagaccagcagctcttgagaagagcaccaccacagctgaagacatcgaacagtttttgctgaactacctcaaagagaaggatgtggcagatggaaatgtctcggattttgataatgaagaagaggaacagtcagtccctcccaaagtggatgagaatgacacccgtccagatgtggagccaccactgccattgcagatccaaatagccatggacgtgatggaacgctgcatccacttgttgtcagataaaaatctgcaaatccgcctgaaggtcttggatgtgctggatctgtgtgtggttgttcttcagtcccacaaaaaccagctgcttcccttggctcatcaggcctggccctcgctcgttcaccgactcacacgggacgcccccctggcagtgcttagagccttcaaggttttacgtaccctgggaagcaagtgtggtgactttcttcgcagccggttctgcaaagatgtcctgccaaagctggctggctccctagtcacccaggcccccatcagtgccagggctggaccagtttactcgcacacgctggccttcaagttgcagctggctgtcttacagggcctgggccccctctgtgagagactggacctaggtgagggtgacctgaataaagtggctgatgcctgcttgatttacctcagtgtcaaacagcccgtgaaattacaagaggctgccaggagcgtcttcctccacttgatgaaggtggacccagactccacctggttcctcctgaacgagctttactgccccgtgcagttcacacctccccaccccagcctccaccctgtgcagctgcacggggccagcgggcagcagaacccctacacgaccaacgtgctccagctgctcaaggagctgcagtgaccctgctcccccaccacagaggccaccgatccctcccctactgccagccagaagctgggctgaccccaccccggccataggcggtggcagcggcagcagagaaggtgaattagttagccaatcgatttataaattgatcgatcacacaactgcttagaaatggattgaaggaaagtagctgactattatttatgtttcataccttgtgttgtcaagtgacattgtctggtggctctaagggtttaaccccttagcctaccatctctatagccccagctccctcacaggccacacacacacacacacaagaggtcagttcccctccatctgcatacacctccctgtcttcaaataatgagatggaactaatttgttttacctaacctgatctttgggaaacaaacggaaataaagacacttcttggatgaaaagt

SEQ ID NO: 190002 - DNA, 432 bp, Homo sapiens
  Payload ID: 17520
  Gene Symbol: TTI1
  Gene Name: TELO2 interacting protein 1
  ENST ID: ENST00000620381
  CDS Start-End: 1-98
aacagtttttgctgaactacctcaaagagaaggatgtggcagatggaaatgtctcggattttgataatgaagaaggtaacttgtttattttggcttagctggttttttctttctgaaacagattattgtaaaaatggtgaaacatcattacagaaagggtagaaataagaaaagttactcataaccttaccaggctaacatagctattctcctgttttgtgtaatctttttccattcttttctgttacaaaactgtttttccgtggttgcagctgtgtaccctttttgtgtttagttataagcaactctgcttattgccgttgaattttgatcattaacgttttaatagctgttactaagtgtccatcccctgtaggacatttaggttgcttctggcttaataataactctaataaacagtgctgcggtgga

SEQ ID NO: 190003 - DNA, 2242 bp, Homo sapiens
  Payload ID: 17521
  Gene Symbol: TTI2
  Gene Name: TELO2 interacting protein 2
  Uniprot ID: Q6NXR4
  ENST ID: ENST00000360742
  CDS Start-End: 497-2023
agacaccggcgggcgcgagccgttgcaggtacctgggggtggttaagttggtgacatggctcagaagtttatttctttaaatttttaagttttttttctttttagtcttcagaaaggcaacagtagtcttttaacgtcactgttaaaagtgtaagactcttttactccctgagagtcccctttccctttcttgcgtcctttcctctttattcttttttttttttttttttttactgagacggagtctcactctgtcgcccaggctggagtgcagtggcgcgatctcggctcactgcaaactccgcctcccgggttcaccctttctctttattcttatcccggtcagactcgccccctcctccaagacatctctctgttttattttatttgattttagttctctttgggtgatcgctccttccctcttcaacggatccctccccgcctccatcctcgttctgtgggagagaccagccttctggtgctgcagtcaggaatggagcttgacagcgctctggaagccccatcgcaggaagactctaatttgtccgaggagttgtctcactccgcctttggacaggccttctccaagattttacactgtcttgcccgcccggaggcacgacgaggcaatgtaaaagatgcagttcttaaagacctcggtgatctaatagaagccacagaatttgataggttatttgaggggactggtgcacggctccgcggaatgccggagacactggggcaggtagcaaaagccctggagaagtatgcagccccctccaaggaggaggaaggtggaggtgatgggcactccgaagcggccgagaaagcagcccaagttgggttactgtttcttaaactgttagggaaagttgagactgctaagaattccctggtcggccctgcatggcagacgggcctgcatcacttggcaggacccgtttatatttttgccatcacacacagcttggagcaaccatggaccactccgagatctcgggaagttgctagggaggtgctcacctcactgcttcaagttactgaatgcggttctgtggcaggattcctacatggagaaaatgaagatgagaaagggagactttcggtgatactagggcttctcaaacccgacttgtataaggaatcctggaagaataaccctgccatcaaacatgttttctcatggactctgcaacaggtcactcggccctggctgagccagcatctggaaagggtacttcccgcatcattggtcatttcagatgactatcagactgagaacaaaatcctgggtgtacactgtctccatcacattgtgcttaatgtgccagctgctgatttgctccagtataacagagcccaggtcctataccatgccatttccaaccacctgtacacaccagagcaccacctcattcaggctgtgctcctgtgtctgctggatttattccccatcctggagaaaaccctgcactggaaaggagatggagctcgacccaccacccattgtgatgaggtcctgcggctgatcctgacccacatggagccagagcaccgccttcttttacgcaggacctacgcaagaaacctgccggctttcgtgaacaggttggggatcctaactgtccggcacttaaagaggctggagagagtcatcattggttatctggaggtttatgatggacctgaggaggaagctagactgaagatattggaaaccctaaaacttctcatgcaacatacttggcccagagtttcctgcagacttgtggtcttactgaaggccctcttgaaactgatttgtgatgtagcaagggatccaaaccttacacctgagtctgttaagagcgccctgctacaggaggccacagactgcctgattctcctggaccgctgttctcaaggacgggtaaagggtctcctggccaaaattccccaaagctgtgaagacagaaaagtggtgaactatatcagaaaagtgcagcaggtttctgaaggcgcaccctacaatggaacttaagacttgtattactttcccaagaggaaaggattttcttcccatcccaatttgtatgaatggagttatttaagaaaaaaagatatttttacacgaaactttgtaagtgaaagctgctttttccttccttcctttccttttacctccataagaatagggaaagtagaacaagaaaaaattgaactccttccatttctaaataaagtttgggagaaaaaagga

SEQ ID NO: 190004 - DNA, 2363 bp, Homo sapiens
  Payload ID: 17521
  Gene Symbol: TTI2
  Gene Name: TELO2 interacting protein 2
  Uniprot ID: Q6NXR4
  ENST ID: ENST00000431156
  CDS Start-End: 620-2146
gttaaatcgatccttgaagttcaggtcagacgggtaatgtgcccacgtcgtaacaaggttcaagggtggcacatctcacacaagcgtatgaacacccaatcatcacgctcatgaactacaaaaggatcatcttatagttgacattaaggagtgccaagtatgtgccactaatttacacatagggtgactaccgtaatgcgatacatccattcttcacgtataaaatcctggatattttcaaagtcccactgagattctgtgattattcttttgtttctaccttagcaaaggaaaacagaaacacaattagcgagcggattattatatatgcaaatttattctctatagttccacctctccgtcattttcccgagcctggatctttattgctttacgaccatacgtcgtgaaataagaaggtgttgcggcagtactggcggaagctagccttgcgttttgcggcagcaatatgagctaggtccggatcctgttagacaccggcgggcgcgagccgttgcagttctctttgggtgatcgctccttccctcttcaacggatccctccccgcctccatcctcgttctgtgggagagaccagccttctggtgctgcagtcaggaatggagcttgacagcgctctggaagccccatcgcaggaagactctaatttgtccgaggagttgtctcactccgcctttggacaggccttctccaagattttacactgtcttgcccgcccggaggcacgacgaggcaatgtaaaagatgcagttcttaaagacctcggtgatctaatagaagccacagaatttgataggttatttgaggggactggtgcacggctccgcggaatgccggagacactggggcaggtagcaaaagccctggagaagtatgcagccccctccaaggaggaggaaggtggaggtgatgggcactccgaagcggccgagaaagcagcccaagttgggttactgtttcttaaactgttagggaaagttgagactgctaagaattccctggtcggccctgcatggcagacgggcctgcatcacttggcaggacccgtttatatttttgccatcacacacagcttggagcaaccatggaccactccgagatctcgggaagttgctagggaggtgctcacctcactgcttcaagttactgaatgcggttctgtggcaggattcctacatggagaaaatgaagatgagaaagggagactttcggtgatactagggcttctcaaacccgacttgtataaggaatcctggaagaataaccctgccatcaaacatgttttctcatggactctgcaacaggtcactcggccctggctgagccagcatctggaaagggtacttcccgcatcattggtcatttcagatgactatcagactgagaacaaaatcctgggtgtacactgtctccatcacattgtgcttaatgtgccagctgctgatttgctccagtataacagagcccaggtcctataccatgccatttccaaccacctgtacacaccagagcaccacctcattcaggctgtgctcctgtgtctgctggatttattccccatcctggagaaaaccctgcactggaaaggagatggagctcgacccaccacccattgtgatgaggtcctgcggctgatcctgacccacatggagccagagcaccgccttcttttacgcaggacctacgcaagaaacctgccggctttcgtgaacaggttggggatcctaactgtccggcacttaaagaggctggagagagtcatcattggttatctggaggtttatgatggacctgaggaggaagctagactgaagatattggaaaccctaaaacttctcatgcaacatacttggcccagagtttcctgcagacttgtggtcttactgaaggccctcttgaaactgatttgtgatgtagcaagggatccaaaccttacacctgagtctgttaagagcgccctgctacaggaggccacagactgcctgattctcctggaccgctgttctcaaggacgggtaaagggtctcctggccaaaattccccaaagctgtgaagacagaaaagtggtgaactatatcagaaaagtgcagcaggtttctgaaggcgcaccctacaatggaacttaagacttgtattactttcccaagaggaaaggattttcttcccatcccaatttgtatgaatggagttatttaagaaaaaaagatatttttacacgaaactttgtaagtgaaagctgctttttccttccttcctttccttttacctccataagaatagggaaagtagaacaagaaaaaattgaactccttccatttctaaataaagtttgggagaaaaaag

SEQ ID NO: 190005 - DNA, 1588 bp, Homo sapiens
  Payload ID: 17521
  Gene Symbol: TTI2
  Gene Name: TELO2 interacting protein 2
  ENST ID: ENST00000520636
  CDS Start-End: 100-1533
ttctctttgggtgatcgctccttccctcttcaacggatccctccccgcctccatcctcgttctgtgggagagaccagccttctggtgctgcagtcaggaatggagcttgacagcgctctggaagccccatcgcaggaagactctaatttgtccgaggagttgtctcactccgcctttggacaggccttctccaagattttacactgtcttgcccgcccggaggcacgacgaggcaatgtaaaagatgcagttcttaaagacctcggtgatctaatagaagccacagaatttgataggttatttgaggggactggtgcacggctccgcggaatgccggagacactggggcaggtagcaaaagccctggagaagtatgcagccccctccaaggaggaggaaggtggaggtgatgggcactccgaagcggccgagaaagcagcccaagttgggttactgtttcttaaactgttagggaaagttgagactgctaagaattccctggtcggccctgcatggcagacgggcctgcatcacttggcaggacccgtttatatttttgccatcacacacagcttggagcaaccatggaccactccgagatctcgggaagttgctagggaggtgctcacctcactgcttcaagttactgaatgcggttctgtggcaggattcctacatggagaaaatgaagatgagaaagggagactttcggtgatactagggcttctcaaacccgacttgtataaggaatcctggaagaataaccctgccatcaaacatgttttctcatggactctgcaacaggtcactcggccctggctgagccagcatctggaaagggtacttcccgcatcattggtcatttcagatgactatcagactgagaacaaaatcctgggtgtacactgtctccatcacattgtgcttaatgtggctgtgctcctgtgtctgctggatttattccccatcctggagaaaaccctgcactggaaaggagatggagctcgacccaccacccattgtgatgaggtcctgcggctgatcctgacccacatggagccagagcaccgccttcttttacgcaggacctacgcaagaaacctgccggctttcgtgaacaggttggggatcctaactgtccggcacttaaagaggctggagagagtcatcattggttatctggaggtttatgatggacctgaggaggaagctagactgaagatattggaaaccctaaaacttctcatgcaacatacttggcccagagtttcctgcagacttgtggtcttactgaaggccctcttgaaactgatttgtgatgtagcaagggatccaaaccttacacctgagtctgttaagagcgccctgctacaggaggccacagactgcctgattctcctggaccgctgttctcaaggacgggtaaagggtctcctggccaaaattccccaaagctgtgaagacagaaaagtggtgaactatatcagaaaagtgcagcaggtttctgaaggcgcaccctacaatggaacttaagacttgtattactttcccaagaggaaaggattttcttcccatcccaatttgtatg

SEQ ID NO: 190006 - DNA, 485 bp, Homo sapiens
  Payload ID: 17521
  Gene Symbol: TTI2
  Gene Name: TELO2 interacting protein 2
  ENST ID: ENST00000523305
  CDS Start-End: 183-485
ggatcctgttagacaccggcgggcgcgagccgttgcagtcttcagaaaggcaacagtagtcttttaacgtcactgttaaaagtttctctttgggtgatcgctccttccctcttcaacggatccctccccgcctccatcctcgttctgtgggagagaccagccttctggtgctgcagtcaggaatggagcttgacagcgctctggaagccccatcgcaggaagactctaatttgtccgaggagttgtctcactccgcctttggacaggccttctccaagattttacactgtcttgcccgcccggaggcacgacgaggcaatgtaaaagatgcagttcttaaagacctcggtgatctaatagaagccacagaatttgataggttatttgaggggactggtgcacggctccgcggaatgccggagacactggggcaggtagcaaaagccctggagaagtatgcagccccctccaaggaggaggaaggt

SEQ ID NO: 190007 - DNA, 2516 bp, Homo sapiens
  Payload ID: 17521
  Gene Symbol: TTI2
  Gene Name: TELO2 interacting protein 2
  Uniprot ID: Q6NXR4
  ENST ID: ENST00000613904
  CDS Start-End: 326-1852
aaggtgttgcggcagtactggcggaagctagccttgcgttttgcggcagcaatatgagctaggtccggatcctgttagacaccggcgggcgcgagccgttgcaggtacctgggggtggttaagttggtgacatggctcagaagtttatttctttaaatttttaagttttttttctttttagtcttcagaaaggcaacagtagtcttttaacgtcactgttaaaagtttctctttgggtgatcgctccttccctcttcaacggatccctccccgcctccatcctcgttctgtgggagagaccagccttctggtgctgcagtcaggaatggagcttgacagcgctctggaagccccatcgcaggaagactctaatttgtccgaggagttgtctcactccgcctttggacaggccttctccaagattttacactgtcttgcccgcccggaggcacgacgaggcaatgtaaaagatgcagttcttaaagacctcggtgatctaatagaagccacagaatttgataggttatttgaggggactggtgcacggctccgcggaatgccggagacactggggcaggtagcaaaagccctggagaagtatgcagccccctccaaggaggaggaaggtggaggtgatgggcactccgaagcggccgagaaagcagcccaagttgggttactgtttcttaaactgttagggaaagttgagactgctaagaattccctggtcggccctgcatggcagacgggcctgcatcacttggcaggacccgtttatatttttgccatcacacacagcttggagcaaccatggaccactccgagatctcgggaagttgctagggaggtgctcacctcactgcttcaagttactgaatgcggttctgtggcaggattcctacatggagaaaatgaagatgagaaagggagactttcggtgatactagggcttctcaaacccgacttgtataaggaatcctggaagaataaccctgccatcaaacatgttttctcatggactctgcaacaggtcactcggccctggctgagccagcatctggaaagggtacttcccgcatcattggtcatttcagatgactatcagactgagaacaaaatcctgggtgtacactgtctccatcacattgtgcttaatgtgccagctgctgatttgctccagtataacagagcccaggtcctataccatgccatttccaaccacctgtacacaccagagcaccacctcattcaggctgtgctcctgtgtctgctggatttattccccatcctggagaaaaccctgcactggaaaggagatggagctcgacccaccacccattgtgatgaggtcctgcggctgatcctgacccacatggagccagagcaccgccttcttttacgcaggacctacgcaagaaacctgccggctttcgtgaacaggttggggatcctaactgtccggcacttaaagaggctggagagagtcatcattggttatctggaggtttatgatggacctgaggaggaagctagactgaagatattggaaaccctaaaacttctcatgcaacatacttggcccagagtttcctgcagacttgtggtcttactgaaggccctcttgaaactgatttgtgatgtagcaagggatccaaaccttacacctgagtctgttaagagcgccctgctacaggaggccacagactgcctgattctcctggaccgctgttctcaaggacgggtaaagggtctcctggccaaaattccccaaagctgtgaagacagaaaagtggtgaactatatcagaaaagtgcagcaggtttctgaaggcgcaccctacaatggaacttaagacttgtattactttcccaagaggaaaggattttcttcccatcccaatttgtatgaatggagttatttaagaaaaaaagatatttttacacgaaactttgtaagtgaaagctgctttttccttccttcctttccttttacctccataagaatagggaaagtagaacaagaaaaaattgaactccttccatttctaaataaagtttgggagaaaaaaggacaccaagtaatgtagcatttaaaatttagaaatatttacatccgtcatctcatcccagattcaagaactcatctgttaagtttctcgggcacaagctgttacttcaacacatatgctataaaaacactcttgttcacaacttagctttcttcactcactccagatttcttgccccactgacgtggcataaataataaaaacacaaatattgtgttcagtacaacacaaaagagcaaaaactggaggtgtgtatgtgtttaagataaaaaaaaaaaaaaaacagttctgcatgttcagtcctgggtataaatgctgaaagggaaatcacgtggttttggctttggccacgggctctgtctcctgctcgtattctatttccacataggctcgttttctctgcagtggtcctctcaagggcattttgcctttgtgtttcgcactaagg

SEQ ID NO: 190008 - DNA, 4018 bp, Homo sapiens
  Payload ID: 17522
  Gene Symbol: TERT
  Gene Name: telomerase reverse transcriptase
  Uniprot ID: O14746
  ENST ID: ENST00000310581
  CDS Start-End: 59-3457
caggcagcgctgcgtcctgctgcgcacgtgggaagccctggccccggccacccccgcgatgccgcgcgctccccgctgccgagccgtgcgctccctgctgcgcagccactaccgcgaggtgctgccgctggccacgttcgtgcggcgcctggggccccagggctggcggctggtgcagcgcggggacccggcggctttccgcgcgctggtggcccagtgcctggtgtgcgtgccctgggacgcacggccgccccccgccgccccctccttccgccaggtgtcctgcctgaaggagctggtggcccgagtgctgcagaggctgtgcgagcgcggcgcgaagaacgtgctggccttcggcttcgcgctgctggacggggcccgcgggggcccccccgaggccttcaccaccagcgtgcgcagctacctgcccaacacggtgaccgacgcactgcgggggagcggggcgtgggggctgctgctgcgccgcgtgggcgacgacgtgctggttcacctgctggcacgctgcgcgctctttgtgctggtggctcccagctgcgcctaccaggtgtgcgggccgccgctgtaccagctcggcgctgccactcaggcccggcccccgccacacgctagtggaccccgaaggcgtctgggatgcgaacgggcctggaaccatagcgtcagggaggccggggtccccctgggcctgccagccccgggtgcgaggaggcgcgggggcagtgccagccgaagtctgccgttgcccaagaggcccaggcgtggcgctgcccctgagccggagcggacgcccgttgggcaggggtcctgggcccacccgggcaggacgcgtggaccgagtgaccgtggtttctgtgtggtgtcacctgccagacccgccgaagaagccacctctttggagggtgcgctctctggcacgcgccactcccacccatccgtgggccgccagcaccacgcgggccccccatccacatcgcggccaccacgtccctgggacacgccttgtcccccggtgtacgccgagaccaagcacttcctctactcctcaggcgacaaggagcagctgcggccctccttcctactcagctctctgaggcccagcctgactggcgctcggaggctcgtggagaccatctttctgggttccaggccctggatgccagggactccccgcaggttgccccgcctgccccagcgctactggcaaatgcggcccctgtttctggagctgcttgggaaccacgcgcagtgcccctacggggtgctcctcaagacgcactgcccgctgcgagctgcggtcaccccagcagccggtgtctgtgcccgggagaagccccagggctctgtggcggcccccgaggaggaggacacagacccccgtcgcctggtgcagctgctccgccagcacagcagcccctggcaggtgtacggcttcgtgcgggcctgcctgcgccggctggtgcccccaggcctctggggctccaggcacaacgaacgccgcttcctcaggaacaccaagaagttcatctccctggggaagcatgccaagctctcgctgcaggagctgacgtggaagatgagcgtgcgggactgcgcttggctgcgcaggagcccaggggttggctgtgttccggccgcagagcaccgtctgcgtgaggagatcctggccaagttcctgcactggctgatgagtgtgtacgtcgtcgagctgctcaggtctttcttttatgtcacggagaccacgtttcaaaagaacaggctctttttctaccggaagagtgtctggagcaagttgcaaagcattggaatcagacagcacttgaagagggtgcagctgcgggagctgtcggaagcagaggtcaggcagcatcgggaagccaggcccgccctgctgacgtccagactccgcttcatccccaagcctgacgggctgcggccgattgtgaacatggactacgtcgtgggagccagaacgttccgcagagaaaagagggccgagcgtctcacctcgagggtgaaggcactgttcagcgtgctcaactacgagcgggcgcggcgccccggcctcctgggcgcctctgtgctgggcctggacgatatccacagggcctggcgcaccttcgtgctgcgtgtgcgggcccaggacccgccgcctgagctgtactttgtcaaggtggatgtgacgggcgcgtacgacaccatcccccaggacaggctcacggaggtcatcgccagcatcatcaaaccccagaacacgtactgcgtgcgtcggtatgccgtggtccagaaggccgcccatgggcacgtccgcaaggccttcaagagccacgtctctaccttgacagacctccagccgtacatgcgacagttcgtggctcacctgcaggagaccagcccgctgagggatgccgtcgtcatcgagcagagctcctccctgaatgaggccagcagtggcctcttcgacgtcttcctacgcttcatgtgccaccacgccgtgcgcatcaggggcaagtcctacgtccagtgccaggggatcccgcagggctccatcctctccacgctgctctgcagcctgtgctacggcgacatggagaacaagctgtttgcggggattcggcgggacgggctgctcctgcgtttggtggatgatttcttgttggtgacacctcacctcacccacgcgaaaaccttcctcaggaccctggtccgaggtgtccctgagtatggctgcgtggtgaacttgcggaagacagtggtgaacttccctgtagaagacgaggccctgggtggcacggcttttgttcagatgccggcccacggcctattcccctggtgcggcctgctgctggatacccggaccctggaggtgcagagcgactactccagctatgcccggacctccatcagagccagtctcaccttcaaccgcggcttcaaggctgggaggaacatgcgtcgcaaactctttggggtcttgcggctgaagtgtcacagcctgtttctggatttgcaggtgaacagcctccagacggtgtgcaccaacatctacaagatcctcctgctgcaggcgtacaggtttcacgcatgtgtgctgcagctcccatttcatcagcaagtttggaagaaccccacatttttcctgcgcgtcatctctgacacggcctccctctgctactccatcctgaaagccaagaacgcagggatgtcgctgggggccaagggcgccgccggccctctgccctccgaggccgtgcagtggctgtgccaccaagcattcctgctcaagctgactcgacaccgtgtcacctacgtgccactcctggggtcactcaggacagcccagacgcagctgagtcggaagctcccggggacgacgctgactgccctggaggccgcagccaacccggcactgccctcagacttcaagaccatcctggactgatggccacccgcccacagccaggccgagagcagacaccagcagccctgtcacgccgggctctacgtcccagggagggaggggcggcccacacccaggcccgcaccgctgggagtctgaggcctgagtgagtgtttggccgaggcctgcatgtccggctgaaggctgagtgtccggctgaggcctgagcgagtgtccagccaagggctgagtgtccagcacacctgccgtcttcacttccccacaggctggcgctcggctccaccccagggccagcttttcctcaccaggagcccggcttccactccccacataggaatagtccatccccagattcgccattgttcacccctcgccctgccctcctttgccttccacccccaccatccaggtggagaccctgagaaggaccctgggagctctgggaatttggagtgaccaaaggtgtgccctgtacacaggcgaggaccctgcacctggatgggggtccctgtgggtcaaattggggggaggtgctgtgggagtaaaatactgaatatatgagtttttcagttttgaaaaaaa

SEQ ID NO: 190009 - DNA, 3210 bp, Homo sapiens
  Payload ID: 17522
  Gene Symbol: TERT
  Gene Name: telomerase reverse transcriptase
  Uniprot ID: O14746
  ENST ID: ENST00000334602
  CDS Start-End: 1-3210
atgccgcgcgctccccgctgccgagccgtgcgctccctgctgcgcagccactaccgcgaggtgctgccgctggccacgttcgtgcggcgcctggggccccagggctggcggctggtgcagcgcggggacccggcggctttccgcgcgctggtggcccagtgcctggtgtgcgtgccctgggacgcacggccgccccccgccgccccctccttccgccaggtgtcctgcctgaaggagctggtggcccgagtgctgcagaggctgtgcgagcgcggcgcgaagaacgtgctggccttcggcttcgcgctgctggacggggcccgcgggggcccccccgaggccttcaccaccagcgtgcgcagctacctgcccaacacggtgaccgacgcactgcgggggagcggggcgtgggggctgctgctgcgccgcgtgggcgacgacgtgctggttcacctgctggcacgctgcgcgctctttgtgctggtggctcccagctgcgcctaccaggtgtgcgggccgccgctgtaccagctcggcgctgccactcaggcccggcccccgccacacgctagtggaccccgaaggcgtctgggatgcgaacgggcctggaaccatagcgtcagggaggccggggtccccctgggcctgccagccccgggtgcgaggaggcgcgggggcagtgccagccgaagtctgccgttgcccaagaggcccaggcgtggcgctgcccctgagccggagcggacgcccgttgggcaggggtcctgggcccacccgggcaggacgcgtggaccgagtgaccgtggtttctgtgtggtgtcacctgccagacccgccgaagaagccacctctttggagggtgcgctctctggcacgcgccactcccacccatccgtgggccgccagcaccacgcgggccccccatccacatcgcggccaccacgtccctgggacacgccttgtcccccggtgtacgccgagaccaagcacttcctctactcctcaggcgacaaggagcagctgcggccctccttcctactcagctctctgaggcccagcctgactggcgctcggaggctcgtggagaccatctttctgggttccaggccctggatgccagggactccccgcaggttgccccgcctgccccagcgctactggcaaatgcggcccctgtttctggagctgcttgggaaccacgcgcagtgcccctacggggtgctcctcaagacgcactgcccgctgcgagctgcggtcaccccagcagccggtgtctgtgcccgggagaagccccagggctctgtggcggcccccgaggaggaggacacagacccccgtcgcctggtgcagctgctccgccagcacagcagcccctggcaggtgtacggcttcgtgcgggcctgcctgcgccggctggtgcccccaggcctctggggctccaggcacaacgaacgccgcttcctcaggaacaccaagaagttcatctccctggggaagcatgccaagctctcgctgcaggagctgacgtggaagatgagcgtgcgggactgcgcttggctgcgcaggagcccaggggttggctgtgttccggccgcagagcaccgtctgcgtgaggagatcctggccaagttcctgcactggctgatgagtgtgtacgtcgtcgagctgctcaggtctttcttttatgtcacggagaccacgtttcaaaagaacaggctctttttctaccggaagagtgtctggagcaagttgcaaagcattggaatcagacagcacttgaagagggtgcagctgcgggagctgtcggaagcagaggtcaggcagcatcgggaagccaggcccgccctgctgacgtccagactccgcttcatccccaagcctgacgggctgcggccgattgtgaacatggactacgtcgtgggagccagaacgttccgcagagaaaagagggccgagcgtctcacctcgagggtgaaggcactgttcagcgtgctcaactacgagcgggcgcggcgccccggcctcctgggcgcctctgtgctgggcctggacgatatccacagggcctggcgcaccttcgtgctgcgtgtgcgggcccaggacccgccgcctgagctgtactttgtcaaggtggatgtgacgggcgcgtacgacaccatcccccaggacaggctcacggaggtcatcgccagcatcatcaaaccccagaacacgtactgcgtgcgtcggtatgccgtggtccagaaggccgcccatgggcacgtccgcaaggccttcaagagccacgtctctaccttgacagacctccagccgtacatgcgacagttcgtggctcacctgcaggagaccagcccgctgagggatgccgtcgtcatcgagcagagctcctccctgaatgaggccagcagtggcctcttcgacgtcttcctacgcttcatgtgccaccacgccgtgcgcatcaggggcaagtcctacgtccagtgccaggggatcccgcagggctccatcctctccacgctgctctgcagcctgtgctacggcgacatggagaacaagctgtttgcggggattcggcgggacgggctgctcctgcgtttggtggatgatttcttgttggtgacacctcacctcacccacgcgaaaaccttcctcagctatgcccggacctccatcagagccagtctcaccttcaaccgcggcttcaaggctgggaggaacatgcgtcgcaaactctttggggtcttgcggctgaagtgtcacagcctgtttctggatttgcaggtgaacagcctccagacggtgtgcaccaacatctacaagatcctcctgctgcaggcgtacaggtttcacgcatgtgtgctgcagctcccatttcatcagcaagtttggaagaaccccacatttttcctgcgcgtcatctctgacacggcctccctctgctactccatcctgaaagccaagaacgcagggatgtcgctgggggccaagggcgccgccggccctctgccctccgaggccgtgcagtggctgtgccaccaagcattcctgctcaagctgactcgacaccgtgtcacctacgtgccactcctggggtcactcaggacagcccagacgcagctgagtcggaagctcccggggacgacgctgactgccctggaggccgcagccaacccggcactgccctcagacttcaagaccatcctggactga

SEQ ID NO: 190010 - DNA, 2992 bp, Homo sapiens
  Payload ID: 17522
  Gene Symbol: TERT
  Gene Name: telomerase reverse transcriptase
  Uniprot ID: O14746
  ENST ID: ENST00000460137
  CDS Start-End: 1-2388
atgccgcgcgctccccgctgccgagccgtgcgctccctgctgcgcagccactaccgcgaggtgctgccgctggccacgttcgtgcggcgcctggggccccagggctggcggctggtgcagcgcggggacccggcggctttccgcgcgctggtggcccagtgcctggtgtgcgtgccctgggacgcacggccgccccccgccgccccctccttccgccaggtgtcctgcctgaaggagctggtggcccgagtgctgcagaggctgtgcgagcgcggcgcgaagaacgtgctggccttcggcttcgcgctgctggacggggcccgcgggggcccccccgaggccttcaccaccagcgtgcgcagctacctgcccaacacggtgaccgacgcactgcgggggagcggggcgtgggggctgctgctgcgccgcgtgggcgacgacgtgctggttcacctgctggcacgctgcgcgctctttgtgctggtggctcccagctgcgcctaccaggtgtgcgggccgccgctgtaccagctcggcgctgccactcaggcccggcccccgccacacgctagtggaccccgaaggcgtctgggatgcgaacgggcctggaaccatagcgtcagggaggccggggtccccctgggcctgccagccccgggtgcgaggaggcgcgggggcagtgccagccgaagtctgccgttgcccaagaggcccaggcgtggcgctgcccctgagccggagcggacgcccgttgggcaggggtcctgggcccacccgggcaggacgcgtggaccgagtgaccgtggtttctgtgtggtgtcacctgccagacccgccgaagaagccacctctttggagggtgcgctctctggcacgcgccactcccacccatccgtgggccgccagcaccacgcgggccccccatccacatcgcggccaccacgtccctgggacacgccttgtcccccggtgtacgccgagaccaagcacttcctctactcctcaggcgacaaggagcagctgcggccctccttcctactcagctctctgaggcccagcctgactggcgctcggaggctcgtggagaccatctttctgggttccaggccctggatgccagggactccccgcaggttgccccgcctgccccagcgctactggcaaatgcggcccctgtttctggagctgcttgggaaccacgcgcagtgcccctacggggtgctcctcaagacgcactgcccgctgcgagctgcggtcaccccagcagccggtgtctgtgcccgggagaagccccagggctctgtggcggcccccgaggaggaggacacagacccccgtcgcctggtgcagctgctccgccagcacagcagcccctggcaggtgtacggcttcgtgcgggcctgcctgcgccggctggtgcccccaggcctctggggctccaggcacaacgaacgccgcttcctcaggaacaccaagaagttcatctccctggggaagcatgccaagctctcgctgcaggagctgacgtggaagatgagcgtgcgggactgcgcttggctgcgcaggagcccaggggttggctgtgttccggccgcagagcaccgtctgcgtgaggagatcctggccaagttcctgcactggctgatgagtgtgtacgtcgtcgagctgctcaggtctttcttttatgtcacggagaccacgtttcaaaagaacaggctctttttctaccggaagagtgtctggagcaagttgcaaagcattggaatcagacagcacttgaagagggtgcagctgcgggagctgtcggaagcagaggtcaggcagcatcgggaagccaggcccgccctgctgacgtccagactccgcttcatccccaagcctgacgggctgcggccgattgtgaacatggactacgtcgtgggagccagaacgttccgcagagaaaagagggccgagcgtctcacctcgagggtgaaggcactgttcagcgtgctcaactacgagcgggcgcggcgccccggcctcctgggcgcctctgtgctgggcctggacgatatccacagggcctggcgcaccttcgtgctgcgtgtgcgggcccaggacccgccgcctgagctgtactttgtcaaggacaggctcacggaggtcatcgccagcatcatcaaaccccagaacacgtactgcgtgcgtcggtatgccgtggtccagaaggccgcccatgggcacgtccgcaaggccttcaagagccacgtcctacgtccagtgccaggggatcccgcagggctccatcctctccacgctgctctgcagcctgtgctacggcgacatggagaacaagctgtttgcggggattcggcgggacgggctgctcctgcgtttggtggatgatttcttgttggtgacacctcacctcacccacgcgaaaaccttcctcagctatgcccggacctccatcagagccagtctcaccttcaaccgcggcttcaaggctgggaggaacatgcgtcgcaaactctttggggtcttgcggctgaagtgtcacagcctgtttctggatttgcaggtgaacagcctccagacggtgtgcaccaacatctacaagatcctcctgctgcaggcgtacaggtttcacgcatgtgtgctgcagctcccatttcatcagcaagtttggaagaaccccacatttttcctgcgcgtcatctctgacacggcctccctctgctactccatcctgaaagccaagaacgcagggatgtcgctgggggccaagggcgccgccggccctctgccctccgaggccgtgcagtggctgtgccaccaagcattcctgctcaagctgactcgacaccgtgtcacctacgtgccactcctggggtcactcaggacagcccagacgcagctgagtcggaagctcccggggacgacgctgactgccctggaggccgcagccaacccggcactgccctcagacttcaagaccatcctggactga

SEQ ID NO: 190011 - DNA, 2486 bp, Homo sapiens
  Payload ID: 17522
  Gene Symbol: TERT
  Gene Name: telomerase reverse transcriptase
  Uniprot ID: O14746
  ENST ID: ENST00000508104
  CDS Start-End: 1-2424
atgccgcgcgctccccgctgccgagccgtgcgctccctgctgcgcagccactaccgcgaggtgctgccgctggccacgttcgtgcggcgcctggggccccagggctggcggctggtgcagcgcggggacccggcggctttccgcgcgctggtggcccagtgcctggtgtgcgtgccctgggacgcacggccgccccccgccgccccctccttccgccaggtgtcctgcctgaaggagctggtggcccgagtgctgcagaggctgtgcgagcgcggcgcgaagaacgtgctggccttcggcttcgcgctgctggacggggcccgcgggggcccccccgaggccttcaccaccagcgtgcgcagctacctgcccaacacggtgaccgacgcactgcgggggagcggggcgtgggggctgctgctgcgccgcgtgggcgacgacgtgctggttcacctgctggcacgctgcgcgctctttgtgctggtggctcccagctgcgcctaccaggtgtgcgggccgccgctgtaccagctcggcgctgccactcaggcccggcccccgccacacgctagtggaccccgaaggcgtctgggatgcgaacgggcctggaaccatagcgtcagggaggccggggtccccctgggcctgccagccccgggtgcgaggaggcgcgggggcagtgccagccgaagtctgccgttgcccaagaggcccaggcgtggcgctgcccctgagccggagcggacgcccgttgggcaggggtcctgggcccacccgggcaggacgcgtggaccgagtgaccgtggtttctgtgtggtgtcacctgccagacccgccgaagaagccacctctttggagggtgcgctctctggcacgcgccactcccacccatccgtgggccgccagcaccacgcgggccccccatccacatcgcggccaccacgtccctgggacacgccttgtcccccggtgtacgccgagaccaagcacttcctctactcctcaggcgacaaggagcagctgcggccctccttcctactcagctctctgaggcccagcctgactggcgctcggaggctcgtggagaccatctttctgggttccaggccctggatgccagggactccccgcaggttgccccgcctgccccagcgctactggcaaatgcggcccctgtttctggagctgcttgggaaccacgcgcagtgcccctacggggtgctcctcaagacgcactgcccgctgcgagctgcggtcaccccagcagccggtgtctgtgcccgggagaagccccagggctctgtggcggcccccgaggaggaggacacagacccccgtcgcctggtgcagctgctccgccagcacagcagcccctggcaggtgtacggcttcgtgcgggcctgcctgcgccggctggtgcccccaggcctctggggctccaggcacaacgaacgccgcttcctcaggaacaccaagaagttcatctccctggggaagcatgccaagctctcgctgcaggagctgacgtggaagatgagcgtgcgggactgcgcttggctgcgcaggagcccaggggttggctgtgttccggccgcagagcaccgtctgcgtgaggagatcctggccaagttcctgcactggctgatgagtgtgtacgtcgtcgagctgctcaggtctttcttttatgtcacggagaccacgtttcaaaagaacaggctctttttctaccggaagagtgtctggagcaagttgcaaagcattggaatcagacagcacttgaagagggtgcagctgcgggagctgtcggaagcagaggtcaggcagcatcgggaagccaggcccgccctgctgacgtccagactccgcttcatccccaagcctgacgggctgcggccgattgtgaacatggactacgtcgtgggagccagaacgttccgcagagaaaagagggccgagcgtctcacctcgagggtgaaggcactgttcagcgtgctcaactacgagcgggcgcggcgccccggcctcctgggcgcctctgtgctgggcctggacgatatccacagggcctggcgcaccttcgtgctgcgtgtgcgggcccaggacccgccgcctgagctgtactttgtcaaggtggatgtgacgggcgcgtacgacaccatcccccaggacaggctcacggaggtcatcgccagcatcatcaaaccccagaacacgtactgcgtgcgtcggtatgccgtggtccagaaggccgcccatgggcacgtccgcaaggccttcaagagccacgtcctacgtccagtgccaggggatcccgcagggctccatcctctccacgctgctctgcagcctgtgctacggcgacatggagaacaagctgtttgcggggattcggcgggacgggctgctcctgcgtttggtggatgatttcttgttggtgacacctcacctcacccacgcgaaaaccttcctcaggtgaggcccgtgcc

SEQ ID NO: 190012 - DNA, 10695 bp, Homo sapiens
  Payload ID: 17523
  Gene Symbol: TEP1
  Gene Name: telomerase-associated protein 1
  Uniprot ID: Q99973
  ENST ID: ENST00000262715
  CDS Start-End: 42-7925
ggaatcggacgccccaggcatatacaagctgagtttcagccatggaaaaactccatgggcatgtgtctgcccatccagacatcctctccttggagaaccggtgcctggctatgctccctgacttacagcccttggagaaactacatcagcatgtatctacccactcagatatcctctccttgaagaaccagtgcctagccacgcttcctgacctgaagaccatggaaaaaccacatggatatgtgtctgcccacccagacatcctctccttggagaaccagtgcctggccacactttctgacctgaagaccatggagaaaccacatggacatgtttctgcccacccagacatcctctccttggagaaccggtgcctggccaccctctctagtctaaagagcactgtgtctgccagccccttgttccagagtctacagatatctcacatgacgcaagctgatttgtaccgtgtgaacaacagcaattgcctgctctctgagcctccaagttggagggctcagcatttctctaagggactagacctttcaacctgccctatagccctgaaatccatctctgccacagagacagctcaggaagcaactttgggtcgttggtttgattcagaagagaagaaaggggcagagacccaaatgccttcttatagtctgagcttgggagaggaggaggaggtggaggatctggccgtgaagctcacctctggagactctgaatctcatccagagcctactgaccatgtccttcaggaaaagaagatggctctactgagcttgctgtgctctactctggtctcagaagtaaacatgaacaatacatctgaccccaccctggctgccatttttgaaatctgtcgtgaacttgccctcctggagcctgagtttatcctcaaggcatctttgtatgccaggcagcagctgaacgtccggaatgtggccaataacatcttggccattgctgctttcttgccggcgtgtcgcccccacctgcgacgatatttctgtgccattgtccagctgccttctgactggatccaggtggctgagctttaccagagcctggctgagggagataagaataagctggtgcccctgcccgcctgtctccgtactgccatgacggacaaatttgcccagtttgacgagtaccagctggctaagtacaaccctcggaagcaccgggccaagagacacccccgccggccaccccgctctccagggatggagcctccattttctcacagatgttttccaaggtacatagggtttctcagagaagagcagagaaagtttgagaaggccggtgatacagtgtcagagaaaaagaatcctccaaggttcaccctgaagaagctggttcagcgactgcacatccacaagcctgcccagcacgttcaagccctgctgggttacagatacccctccaacctacagctcttttctcgaagtcgccttcctgggccttgggattctagcagagctgggaagaggatgaagctgtctaggccagagacctgggagcgggagctgagcctacgggggaacaaagcgtcggtctgggaggaactcattgaaaatgggaagcttcccttcatggccatgcttcggaacctgtgcaacctgctgcgggttggaatcagttcccgccaccatgagctcattctccagagactccagcatgcgaagtcggtgatccacagtcggcagtttccattcagatttcttaacgcccatgatgccattgatgccctcgaggctcaactcagaaatcaagcattgccctttccttcgaatataacactgatgaggcggatactaactagaaatgaaaagaaccgtcccaggcggaggtttctttgccacctaagccgtcagcagcttcggatggcaatgaggatacctgtgttgtatgagcagctcaagagggagaagctgagagtacacaaggccagacagtggaaatatgatggtgagatgctgaacaggtaccgacaggccctagagacagctgtgaacctctctgtgaagcacagcctgcccctgctgccaggccgcactgtcttggtctatctgacagatgctaatgcagacaggctctgtccaaagagcaacccacaagggcccccgctgaactatgcactgctgttgattgggatgatgatcacgagggcggagcaggtggacgtcgtgctgtgtggaggtgacactctgaagactgcagtgcttaaggcagaagaaggcatcctgaagactgccatcaagctccaggctcaagtccaggagtttgatgaaaatgatggatggtccctgaatacttttgggaaatacctgctgtctctggctggccaaagggttcctgtggacagggtcatcctccttggccaaagcatggatgatggaatgataaatgtggccaaacagctttactggcagcgtgtgaattccaagtgcctctttgttggtatcctcctaagaagggtacaatacctgtcaacagatttgaatcccaatgatgtgacactctcaggctgtactgatgcgatactgaagttcattgcagagcatggggcctcccatcttctggaacatgtgggccaaatggacaaaatattcaagattccaccacccccaggaaagacaggggtccagtctctccggccactggaagaggacactccaagccccttggctcctgtttcccagcaaggatggcgcagcatccggcttttcatttcatccactttccgagacatgcatggggagcgggacctgctgctgaggtctgtgctgccagcactgcaggcccgagcggcccctcaccgtatcagccttcacggaatcgacctccgctggggcgtcactgaggaggagacccgtaggaacagacaactggaagtgtgccttggggaggtggagaacgcacagctgtttgtggggattctgggctcccgttatggatacattccccccagctacaaccttcctgaccatccacacttccactgggcccagcagtacccttcagggcgctctgtgacagagatggaggtgatgcagttcctgaaccggaaccaacgtctgcagccctctgcccaagctctcatctacttccgggattccagcttcctcagctctgtgccagatgcctggaaatctgactttgtttctgagtctgaagaggccgcacgtcggatctcagaactgaagagctacctaagcagacagaaagggatcacctgccgcagatacccctgtgagtgggggggtgtggcagctggccggccctatgttggcgggctggaggagtttgggcagttggttctgcaggatgtatggaatatgatccagaagctctacctgcagcctggggccctgctggagcagccagtgtccatcccagacgatgacttggtccaggccaccttccagcagctgcagaagccaccgagtcctgcccggccacgccttcttcaggacacagtgcaacggctgatgctgccccacggaaggctgagcctggtgacggggcagtcaggacagggcaagacagccttcctggcatctcttgtgtcagccctgcaggctcctgatggggccaaggtggcatcattagtcttcttccacttttctggggctcgtcctgaccagggtcttgccctcactctgctcagacgcctctgtacctatctgcgtggccaactaaaagagccaggtgccctccccagcacctaccgaagcctggtgtgggagctgcagcagaggctgctgcccaagtctgctgagtccctgcatcctggccagacccaggtcctgatcatcgatggggctgataggttagtggaccagaatgggcagctgatttcagactggatcccaaagaagcttccccggtgtgtacacctggtgctgagtgtgtctagtgatgcaggcctaggggagacccttgagcagagccagggtgcccacgtgctggccttggggcctctggaggcctctgctcgggcccggctggtgagagaggagctggccctgtacgggaagcggctggaggagtcaccatttaacaaccagatgcgactgctgctggtgaagcgggaatcaggccggccgctctacctgcgcttggtcaccgatcacctgaggctcttcacgctgtatgagcaggtgtctgagagactccggaccctgcctgccactgtccccctgctgctgcagcacatcctgagcacactggagaaggagcacgggcctgatgtccttccccaggccttgactgccctagaagtcacacggagtggtttgactgtggaccagctgcacggagtgctgagtgtgtggcggacactaccgaaggggactaagagctgggaagaagcagtggctgctggtaacagtggagacccctaccccatgggcccgtttgcctgcctcgtccagagtctgcgcagtttgctaggggagggccctctggagcgccctggtgcccggctgtgcctccctgatgggcccctgagaacagcagctaaacgttgctatgggaagaggccagggctagaggacacggcacacatcctcattgcagctcagctctggaagacatgtgacgctgatgcctcaggcaccttccgaagttgccctcctgaggctctgggagacctgccttaccacctgctccagagcgggaaccgtggacttctttcgaagttccttaccaacctccatgtggtggctgcacacttggaattgggtctggtctctcggctcttggaggcccatgccctctatgcttcttcagtccccaaagaggaacaaaagctccccgaggctgacgttgcagtgtttcgcaccttcctgaggcagcaggcttcaatcctcagccagtacccccggctcctgccccagcaggcagccaaccagcccctggactcacctctttgccaccaagcctcgctgctctcccggagatggcacctccaacacacactacgatggcttaataaaccccggaccatgaaaaatcagcaaagctccagcctgtctctggcagtttcctcatcccctactgctgtggccttctccaccaatgggcaaagagcagctgtgggcactgccaatgggacagtttacctgttggacctgagaacttggcaggaggagaagtctgtggtgagtggctgtgatggaatctctgcttgtttgttcctctccgatgatacactctttcttactgccttcgacgggctcctggagctctgggacctgcagcatggttgtcgggtgctgcagactaaggctcaccagtaccaaatcactggctgctgcctgagcccagactgccggctgctagccaccgtgtgcttgggaggatgcctaaagctgtgggacacagtccgtgggcagctggccttccagcacacctaccccaagtccctgaactgtgttgccttccacccagaggggcaggtaatagccacaggcagctgggctggcagcatcagcttcttccaggtggatgggctcaaagtcaccaaggacctgggggcacccggagcctctatccgtaccttggccttcaatgtgcctgggggggttgtggctgtgggccggctggacagtatggtggagctgtgggcctggcgagaaggggcacggctggctgccttccctgcccaccatggctttgttgctgctgcgcttttcctgcatgcgggttgccagttactgacggctggagaggatggcaaggttcaggtgtggtcagggtctctgggtcggccccgtgggcacctgggttccctttctctctctcctgccctctctgtggcactcagcccagatggtgatcgggtggctgttggatatcgagcggatggcattaggatctacaaaatctcttcaggttcccagggggctcagggtcaggcactggatgtggcagtgtccgccctggcctggctaagccccaaggtattggtgagtggtgcagaagatgggtccttgcagggctgggcactcaaggaatgctcccttcagtccctctggctcctgtccagattccagaagcctgtgctaggactggccacttcccaggagctcttggcttctgcctcagaggatttcacagtgcagctgtggccaaggcagctgctgacgcggccacacaaggcagaagactttccctgtggcactgagctgcggggacatgagggccctgtgagctgctgtagtttcagcactgatggaggcagcctggccaccgggggccgggatcggagtctcctctgctgggacgtgaggacacccaaaacccctgttttgatccactccttccctgcctgtcaccgtgactgggtcactggctgtgcctggaccaaagataacctactgatatcctgctccagtgatggctctgtggggctctgggacccagagtcaggacagcggcttggtcagttcctgggtcatcagagtgctgtgagcgctgtggcagctgtggaggagcacgtggtgtctgtgagccgggatgggaccttgaaagtgtgggaccatcaaggcgtggagctgaccagcatccctgctcactcaggacccattagccactgtgcagctgccatggagccccgtgcagctggacagcctgggtcagagcttctggtggtaaccgtcgggctagatggggccacacggttatggcatccactcttggtgtgccaaacccacaccctcctgggacacagcggcccagtccgtgctgctgctgtttcagaaacctcaggcctcatgctgaccgcctctgaggatggttctgtacggctctggcaggttcctaaggaagcagatgacacatgtataccaaggagttctgcagccgtcactgctgtggcttgggcaccagatggttccatggcagtatctggaaatcaagctggggaactaatcttgtggcaggaagctaaggctgtggccacagcacaggctccaggccacattggtgctctgatctggtcctcggcacacaccttttttgtcctcagtgctgatgagaaaatcagcgagtggcaagtgaaactgcggaagggttcggcacccggaaatttgagtcttcacctgaaccgaattctacaggaggacttaggggtgctgacaagtctggattgggctcctgatggtcactttctcatcttggccaaagcagatttgaagttactttgcatgaagccaggggatgctccatctgaaatctggagcagctatacagaaaatcctatgatattgtccacccacaaggagtatggcatatttgtcctgcagcccaaggatcctggagttctttctttcttgaggcaaaaggaatcaggagagtttgaagagaggctgaactttgatataaacttagagaatcctagtaggaccctaatatcgataactcaagccaaacctgaatctgagtcctcatttttgtgtgccagctctgatgggatcctatggaacctggccaaatgcagcccagaaggagaatggaccacaggtaacatgtggcagaaaaaagcaaacactccagaaacccaaactccagggacagacccatctacctgcagggaatctgatgccagcatggatagtgatgccagcatggatagtgagccaacaccacatctaaagacacggcagcgtagaaagattcactcgggctctgtcacagccctccatgtgctacctgagttgctggtgacagcttcgaaggacagagatgttaagctatgggagagacccagtatgcagctgctgggcctgttccgatgcgaagggtcagtgagctgcctggaaccttggctgggcgctaactccaccctgcagcttgccgtgggagacgtgcagggcaatgtgtactttctgaattgggaatgaagatgtgccactcgggaataatgataccccttgtgctagagatgcaaagcctgaagacactggtagcttttaataattataaaattaataatttcttgataattataaaaatgaagtgtcaaaaaatctcaagtgtaggcctgcctgtgttctcatgtggatttagaacaggaggatattctatgtgtatgtatatgtacattctaatgtgtgtctcttcttattcaacattaatccttactagaaccacaagaaagtgaatgaaatctttagtaggtactcttttgaaactaggttttagaattcttgcatcactcgcgggccctaggaccctaggatgccattcttgccaggaggaggaatgagagtgatgttggccaacattcaatttgaacagagcatggaagacctttcagttcatcgggaaagaatgagggagggagaataagtcagtcatgcatcagggcatttagaaagagctatgtttctgtcacagagacagcccttttctcagaactacccagaggaggccgggcatggtggctcacgcttgtaatcccagcactttgggaggccgaggtgggcagatcacgaggtcaggagatcaagaccatcctggctaacatagtgaaaccctgtctctactaaaaaatacaaaaagttagccaggtgtggcggcgggcacctgtagtcccagctacttgggaggctgaggcaggagaatggcgtgaacccaggaggcggagcttgcagtgagccgagacaccactgcactccagcctgggcaacagagcgagactctgtctaaaaaaaaaaaaaaagaactacccagatgagaggtgaggagccaagccattgaaagcggaacaaaccttctggttttcccaacttctgacacgactttcaactttagtcaatatggtaattggcattctcagaagagatcacgaaagtgtcttactctctctcaaattgaaattcacaaagattaaaactaattgagaggtggcacaatcatagccatgaactctgattttcttaagtaaaaaaccttttttttttttttttgtttttgagatagagtctggctctgtcacctaggctggagtgcaatggtgcaatctcagctcagtgcaacctctgcttcctgggttcaagcgattctcctgccttagcctcccgagtagctgggattacaggtgcccaccaccacgcccagctaatttttgtatttcagtagagacgaagtttcaccatgttggccaggtgggtctcaaactcctgacctcaggttatctgcacacctcagcctcttaaagttctgggattacaggcgtgagccattgtgcccggcccataaaagaactttattatatttctaaaattcaatcatatggaagaatctattgagcaggttagcctttgcttaactttcctcctctgttactccagccttagctggggtgttttgtagaattttcagagcatgggagacagacaactagagcttcctcctgcccttggcccatgcttttaggagagcaaaaggcaaaagattgaaaccactgactttagtttcctcaggccctttctttctgagggttaaagaagaaggaaatgtcttctgtggccaagaattcaaggacttgtaggagataagtgaaggctattacagggattttgtcctggtttggtaggtttctcttggagaaataccactacaccctggtctagaaatgagttttgaagacttggggagttaaagggcactgagttttactctcactgtaccctgattccaggttttacatggagaaataacctgagggactttatttctatccaatgccctggtttccatcctgaccagaggatgatgacatccgctgataggccatgcttctgtcttctcttatgtgcctcatgccaagcctcgaaatataccttctggaccatcatttccacatctaccttgtgactagaagtcctagttatggtattttgaaatttatgatccataatccttgccagaaatcctgcagcgaactatggcatggcatcatcctagtcattgatttcaatcttttgccttttgctcccctaaaatcttgggccaattgcaggaggaagctctatttgtctctcttccatgctctgaaaattatataaaagcatcccagctaaggctggagtgaaggggttggggaaagttaagcaaaggctaacttgaccaataggctcaatagattcagtcttgttggccaggcccacttgaagggttttttgtttcatcttggagaaggacagtgaggtcatggtataattgttatgagtaaagtcaagaacagcttctaggtaaaagtaattatgtacccaaaaggagttgaagggaaaatcaatttaggtttacattaaacatccttcaagttcttatctttaaatggagtttcagtgtctcccaaaggctggatgagttttacagttataaccactggattgtgagaccataggacatttgaacaatcttttcttctacccatctagaaaagcatcttttttatataccaaatttttacacatatatccacatctgtttttgaaatctagagcagaggtactcaaagtttggttcatggactagtgccagttcacaaattgttaatgttttataatgagataagtacggaagttgagagtaaccatttagaaactgtgtaggaatttaaaaagtaatatctgacaaatttaataataaaaatggaggcttgta

SEQ ID NO: 190013 - DNA, 2967 bp, Homo sapiens
  Payload ID: 17523
  Gene Symbol: TEP1
  Gene Name: telomerase-associated protein 1
  ENST ID: ENST00000553365
  CDS Start-End: 1-753
tgggcaccagatggttccatggcagtatctggaaatcaagctggggaactaatcttgtggcaggaagctaaggctgtggccacagcacaggctccaggccacattggtgctctgatctggtcctcggcacacaccttttttgtcctcagtgctgatgagaaaatcagcgagtggcaagtgaaactgcggaagggttcggcacccggaaatttgagtcttcacctgaaccgaattctacaggaggacttaggggtgctgacaagtctggattgggctcctgatggtcactttctcatcttggccaaagcagatttgaagttactttgcatgaagccaggggatgctccatctgaaatctggagcagctatacagaaaatcctatgatattgtccacccacaaggagtatggcatatttgtcctgcagcccaaggatcctggagttctttctttcttgaggcaaaaggaatcaggagagtttgaagagaggctgaactttgatataaacttagagaatcctagtaggaccctaatatcgataactcaagccaaacctgaatctgctctgatgggatcctatggaacctggccaaatgcagcccagaaggagaatggaccacaggtaacatgtggcagaaaaaagcaaacactccagaaacccaaactccagggacagacccatctacctgcagggaatctgatgccagcatggatagtgatgccagcatggatagtgagccaacaccacatctaaagacacggcagcgtagaaagattcactcgggctctgtcacagccctccatgtgctacctgagttgctggtgacagcttcgaaggacagagatgttaagctatgggagagacccagtatgcagctgctgggcctgttccgatgcgaagggtcagtgagctgcctggaaccttggctgggcgctaactccaccctgcagcttgccgtgggagacgtgcagggcaatgtgtactttctgaattgggaatgaagatgtgccactcgggaataatgataccccttgtgctagagatgcaaagcctgaagacactggtagcttttaataattataaaattaataatttcttgataattataaaaatgaagtgtcaaaaaatctcaagtgtaggcctgcctgtgttctcatgtggatttagaacaggaggatattctatgtgtatgtatatgtacattctaatgtgtgtctcttcttattcaacattaatccttactagaaccacaagaaagtgaatgaaatctttagtaggtactcttttgaaactaggttttagaattcttgcatcactcgcgggccctaggaccctaggatgccattcttgccaggaggaggaatgagagtgatgttggccaacattcaatttgaacagagcatggaagacctttcagttcatcgggaaagaatgagggagggagaataagtcagtcatgcatcagggcatttagaaagagctatgtttctgtcacagagacagcccttttctcagaactacccagaggaggcgtgagccattgtgcccggcccataaaagaactttattatatttctaaaattcaatcatatggaagaatctattgagcaggttagcctttgcttaactttcctcctctgttactccagccttagctggggtgttttgtagaattttcagagcatgggagacagacaactagagcttcctcctgcccttggcccatgcttttaggagagcaaaaggcaaaagattgaaaccactgactttagtttcctcaggccctttctttctgagggttaaagaagaaggaaatgtcttctgtggccaagaattcaaggacttgtaggagataagtgaaggctattacagggattttgtcctggtttggtaggtttctcttggagaaataccactacaccctggtctagaaatgagttttgaagacttggggagttaaagggcactgagttttactctcactgtaccctgattccaggttttacatggagaaataacctgagggactttatttctatccaatgccctggtttccatcctgaccagaggatgatgacatccgctgataggccatgcttctgtcttctcttatgtgcctcatgccaagcctcgaaatataccttctggaccatcatttccacatctaccttgtgactagaagtcctagttatggtattttgaaatttatgatccataatccttgccagaaatcctgcagcgaactatggcatggcatcatcctagtcattgatttcaatcttttgccttttgctcccctaaaatcttgggccaattgcaggaggaagctctatttgtctctcttccatgctctgaaaattatataaaagcatcccagctaaggctggagtgaaggggttggggaaagttaagcaaaggctaacttgaccaataggctcaatagattcagtcttgttggccaggcccacttgaagggttttttgtttcatcttggagaaggacagtgaggtcatggtataattgttatgagtaaagtcaagaacagcttctaggtaaaagtaattatgtacccaaaaggagttgaagggaaaatcaatttaggtttacattaaacatccttcaagttcttatctttaaatggagtttcagtgtctcccaaaggctggatgagttttacagttataaccactggattgtgagaccataggacatttgaacaatcttttcttctacccatctagaaaagcatcttttttatataccaaatttttacacatatatccacatctgtttttgaaatctagagcagaggtactcaaagtttggttcatggactagtgccagttcacaaattgttaatgttttataatgagataagtacggaagttgagagtaaccatttagaaactgtgtaggaatttaaaaagtaatatctgacaaatttaataataaaaatggaggcttgta

SEQ ID NO: 190014 - DNA, 602 bp, Homo sapiens
  Payload ID: 17523
  Gene Symbol: TEP1
  Gene Name: telomerase-associated protein 1
  ENST ID: ENST00000553984
  CDS Start-End: 1-602
ggcagtatctggaaatcaagctggggaactaatcttgtggcaggaagctaaggctgtggccacagcacaggaggacttaggggtgctgacaagtctggattgggctcctgatggtcactttctcatcttggccaaagcagatttgaagttactttgcatgaagccaggggatgctccatctgaaatctggagcagctatacagaaaatcctatgatattgtccacccacaaggagtatggcatatttgtcctgcagcccaaggatcctggagttctttctttcttgaggcaaaaggaatcaggagagtttgaagagaggctgaactttgatataaacttagagaatcctagtaggaccctaatatcgataactcaagccaaacctgaatctgagtcctcatttttgtgtgccagctctgatgggatcctatggaacctggccaaatgcagcccagaaggagaatggaccacaggtaacatgtggcagaaaaaagcaaacactccagaaacccaaactccagggacagacccatctacctgcagggaatctgatgccagcatggatagtgatgccagcatggatagtgagccaacaccacatc

SEQ ID NO: 190015 - DNA, 6697 bp, Homo sapiens
  Payload ID: 17523
  Gene Symbol: TEP1
  Gene Name: telomerase-associated protein 1
  ENST ID: ENST00000555008
  CDS Start-End: 1-5715
atgctgaacaggtaccgacaggccctagagacagctgtgaacctctctgtgaagcacagcctgcccctgctgccaggccgcactgtcttggtctatctgacagatgctaatgcagacaggctctgtccaaagagcaacccacaagggcccccgctgaactatgcactgctgttgattgggatgatgatcacgagggcggagcaggtggacgtcgtgctgtgtggaggtgacactctgaagactgcagtgcttaaggcagaagaaggcatcctgaagactgccatcaagctccaggctcaagtccaggagtttgatgaaaatgatggatggtccctgaatacttttgggaaatacctgctgtctctggctggccaaagggttcctgtggacagggtcatcctccttggccaaagcatggatgatggaatgataaatgtggccaaacagctttactggcagcgtgtgaattccaagtgcctctttgttggtatcctcctaagaagggtacaatacctgtcaacagatttgaatcccaatgatgtgacactctcaggctgtactgatgcgatactgaagttcattgcagagcatggggcctcccatcttctggaacatgtgggccaaatggacaaaatattcaagattccaccacccccaggaaagacaggggtccagtctctccggccactggaagaggacactccaagccccttggctcctgtttcccagcaaggatggcgcagcatccggcttttcatttcatccactttccgagacatgcatggggagcgggacctgctgctgaggtctgtgctgccagcactgcaggcccgagcggcccctcaccgtatcagccttcacggaatcgacctccgctggggcgtcactgaggaggagacccgtaggaacagacaactggaagtgtgccttggggaggtggagaacgcacagctgtttgtggggattctgggctcccgttatggatacattccccccagctacaaccttcctgaccatccacacttccactgggcccagcagtacccttcagggcgctctgtgacagagatggaggtgatgcagttcctgaaccggaaccaacgtctgcagccctctgcccaagctctcatctacttccgggattccagcttcctcagctctgtgccagatgcctggaaatctgactttgtttctgagtctgaagaggccgcacgtcggatctcagaactgaagagctacctaagcagacagaaagggatcacctgccgcagatacccctgtgagtgggggggtgtggcagctggccggccctatgttggcgggctggaggagtttgggcagttggttctgcaggatgtatggaatatgatccagaagctctacctgcagcctggggccctgctggagcagccagtgtccatcccagacgatgacttggtccaggccaccttccagcagctgcagaagccaccgagtcctgcccggccacgccttcttcaggacacagtgcaacggctgatgctgccccacggaaggctgagcctggtgacggggcagtcaggacagggcaagacagccttcctggcatctcttgtgtcagccctgcaggctcctgatggggccaaggtggcatcattagtcttcttccacttttctggggctcgtcctgaccagggtcttgccctcactctgctcagacgcctctgtacctatctgcgtggccaactaaaagagccaggtgccctccccagcacctaccgaagcctggtgtgggagctgcagcagaggctgctgcccaagtctgctgagtccctgcatcctggccagacccaggtcctgatcatcgatggggctgataggttagtggaccagaatgggcagctgatttcagactggatcccaaagaagcttccccggtgtgtacacctggtgctgagtgtgtctagtgatgcaggcctaggggagacccttgagcagagccagggtgcccacgtgctggccttggggcctctggaggcctctgctcgggcccggctggtgagagaggagctggccctgtacgggaagcggctggaggagtcaccatttaacaaccagcgggaatcaggccggccgctctacctgcgcttggtcaccgatcacctgaggctcttcacgctgtatgagcaggtgtctgagagactccggaccctgcctgccactgtccccctgctgctgcagcacatcctgagcacactggagaaggagcacgggcctgatgtccttccccaggccttgactgccctagaagtcacacggagtggtttgactgtggaccagctgcacggagtgctgagtgtgtggcggacactaccgaaggggactaagagctgggaagaagcagtggctgctggtaacagtggagacccctaccccatgggcccgtttgcctgcctcgtccagagtctgcgcagtttgctaggggagggccctctggagcgccctggtgcccggctgtgcctccctgatgggcccctgagaacagcagctaaacgttgctatgggaagaggccagggctagaggacacggcacacatcctcattgcagctcagctctggaagacatgtgacgctgatgcctcaggcaccttccgaagttgccctcctgaggctctgggagacctgccttaccacctgctccagagcgggaaccgtggacttctttcgaagttccttaccaacctccatgtggtggctgcacacttggaattgggtctggtctctcggctcttggaggcccatgccctctatgcttcttcagtccccaaagaggaacaaaagctccccgaggctgacgttgcagtgtttcgcaccttcctgaggcagcaggcttcaatcctcagccagtacccccggctcctgccccagcaggcagccaaccagcccctggactcacctctttgccaccaagcctcgctgctctcccggagatggcacctccaacacacactacgatggcttaataaaccccggaccatgaaaaatcagcaaagctccagcctgtctctggcagtttcctcatcccctactgctgtggccttctccaccaatgggcaaagagcagctgtgggcactgccaatgggacagtttacctgttggacctgagaacttggcaggaggagaagtctgtggtgagtggctgtgatggaatctctgcttgtttgttcctctccgatgatacactctttcttactgccttcgacgggctcctggagctctgggacctgcagcatggttgtcgggtgctgcagactaaggctcaccagtaccaaatcactggctgctgcctgagcccagactgccggctgctagccaccgtgtgcttgggaggatgcctaaagctgtgggacacagtccgtgggcagctggccttccagcacacctaccccaagtccctgaactgtgttgccttccacccagaggggcaggtaatagccacaggcagctgggctggcagcatcagcttcttccaggtggatgggctcaaagtcaccaaggacctgggggcacccggagcctctatccgtaccttggccttcaatgtgcctgggggggttgtggctgtgggccggctggacagtatggtggagctgtgggcctggcgagaaggggcacggctggctgccttccctgcccaccatggctttgttgctgctgcgcttttcctgcatgcgggttgccagttactgacggctggagaggatggcaaggttcaggtgtggtcagggtctctgggtcggccccgtgggcacctgggttccctttctctctctcctgccctctctgtggcactcagcccagatggtgatcgggtggctgttggatatcgagcggatggcattaggatctacaaaatctcttcaggttcccagggggctcagggtcaggcactggatgtggcagtgtccgccctggcctggctaagccccaaggtattggtgagtggtgcagaagatgggtccttgcagggctgggcactcaaggaatgctcccttcagtccctctggctcctgtccagattccagaagcctgtgctaggactggccacttcccaggagctcttggcttctgcctcagaggatttcacagtgcagctgtggccaaggcagctgctgacgcggccacacaaggcagaagactttccctgtggcactgagctgcggggacatgagggccctgtgagctgctgtagtttcagcactgatggaggcagcctggccaccgggggccgggatcggagtctcctctgctgggacgtgaggacacccaaaacccctgttttgatccactccttccctgcctgtcaccgtgactgggtcactggctgtgcctggaccaaagataacctactgatatcctgctccagtgatggctctgtggggctctgggacccagagtcaggacagcggcttggtcagttcctgggtcatcagagtgctgtgagcgctgtggcagctgtggaggagcacgtggtgtctgtgagccgggatgggaccttgaaagtgtgggaccatcaaggcgtggagctgaccagcatccctgctcactcaggacccattagccactgtgcagctgccatggagccccgtgcagctggacagcctgggtcagagcttctggtggtaaccgtcgggctagatggggccacacggttatggcatccactcttggtgtgccaaacccacaccctcctgggacacagcggcccagtccgtgctgctgctgtttcagaaacctcaggcctcatgctgaccgcctctgaggatggttctgtacggctctggcaggttcctaaggaagcagatgacacatgtataccaaggagttctgcagccgtcactgctgtggcttgggcaccagatggttccatggcagtatctggaaatcaagctggggaactaatcttgtggcaggaagctaaggctgtggccacagcacaggctccaggccacattggtgctctgatctggtcctcggcacacaccttttttgtcctcagtgctgatgagaaaatcagcgagtggcaagtgaaactgcggaagggttcggcacccggaaatttgagtcttcacctgaaccgaattctacaggaggacttaggggtgctgacaagtctggattgggctcctgatggtcactttctcatcttggccaaagcagatttgaagttactttgcatgaagccaggggatgctccatctgaaatctggagcagctatacagaaaatcctatgatattgtccacccacaaggagtatggcatatttgtcctgcagcccaaggatcctggagttctttctttcttgaggcaaaaggaatcaggagagtttgaagagaggctgaactttgatataaacttagagaatcctagtaggaccctaatatcgataactcaagccaaacctgaatctgagtcctcatttttgtgtgccagctctgatgggatcctatggaacctggccaaatgcagcccagaaggagaatggaccacaggtaacatgtggcagaaaaaagcaaacactccagaaacccaaactccagggacagacccatctacctgcagggaatctgatgccagcatggatagtgatgccagcatggatagtgagccaacaccacatctaaagacacggcagcgtagaaagccctccatgtgctacctgagttgctggtgacagcttcgaaggacagagatgttaagctatgggagagacccagtatgcagctgctgggcctgttccgatgcgaagggtcagtgagctgcctggaaccttggctgggcgctaactccaccctgcagcttgccgtgggagacgtgcagggcaatgtgtactttctgaattgggaatgaagatgtgccactcgggaataatgataccccttgtgctagagatgcaaagcctgaagacactggtagcttttaataattataaaattaataatttcttgataattataaaaatgaagtgtcaaaaaatctcaagtgtaggcctgcctgtgttctcatgtggatttagaacaggaggatattctatgtgtatgtatatgtacattctaatgtgtgtctcttcttattcaacattaatccttactagaaccacaagaaagtgaatgaaatctttagtaggtactcttttgaaactaggttttagaattcttgcatcactcgcgggccctaggaccctaggatgccattcttgccaggaggaggaatgagagtgatgttggccaacattcaatttgaacagagcatggaagacctttcagttcatcgggaaagaatgagggagggagaataagtcagtcatgcatcagggcatttagaaagagctatgtttctgtcacagagacagcccttttctcagaactacccagaggaggccgggcatggtggctcacgcttgtaatcccagcactttgggaggccgaggtgggcagatcacgaggtcaggagatcaagaccatcctggctaacatagtgaaaccctgtctctactaaaaaatacaaaaagttagccaggtgtggcggcgggcacctgtagtcccagctacttgggaggctgaggcaggagaatggcgtgaacccaggaggcggagcttgcagtgagccgagacaccactgcactccagcctgggcaacagagcgagactctgtct

SEQ ID NO: 190016 - DNA, 2698 bp, Homo sapiens
  Payload ID: 17523
  Gene Symbol: TEP1
  Gene Name: telomerase-associated protein 1
  ENST ID: ENST00000557314
  CDS Start-End: 1-212
ttccccaggccttgactgccctagaagtcacacggagtggtttgactgtggaccagctgcacggagtgctgagtgtgtggcggacactaccgaaggggactaagagctgggaagaagcagtggctgctggtaacagtggagacccctaccccatgggcccgtttgcctgcctcgtccagagtctgcgcagctcagctctggaagacatgtgacgctgatgcctcaggcaccttccgaagttgccctcctgaggctctgggagacctgccttaccacctgctccagagcgggaaccgtggacttctttcgaagttccttaccaacctccatgtggtggctgcacacttggaattgggtctggtctctcggctcttggaggcccatgccctctatgcttcttcagtccccaaagaggaacaaaagctccccgaggctgacgttgcagtgtttcgcaccttcctgaggcagcaggcttcaatcctcagccagtacccccggctcctgccccagcaggcagccaaccagcccctggactcacctctttgccaccaagcctcgctgctctcccggagatggcacctccaacacacactacgatggcttaataaaccccggaccatgaaaaatcagcaaagctccagcctgtctctggcagtttcctcatcccctactgctgtggccttctccaccaatgggcaaagagcagctgtgggcactgccaatgggacagtttacctgttggacctgagaacttggcaggaggagaagtctgtggtgagtggctgtgatggaatctctgcttgtttgttcctctccgatgatacactctttcttactgccttcgacgggctcctggagctctgggacctgcagcatggttgtcgggtgctgcagactaaggctcaccagtaccaaatcactggctgctgcctgagcccagactgccggctgctagccaccgtgtgcttgggaggatgcctaaagctgtgggacacagtccgtgggcagctggccttccagcacacctaccccaagtccctgaactgtgttgccttccacccagaggggcaggtaatagccacaggcagctgggctggcagcatcagcttcttccaggtggatgggctcaaagtcaccaaggacctgggggcacccggagcctctatccgtaccttggccttcaatgtgcctgggggggttgtggctgtgggccggctggacagtatggtggagctgtgggcctggcgagaaggggcacggctggctgccttccctgcccaccatggctttgttgctgctgcgcttttcctgcatgcgggttgccagttactgacggctggagaggatggcaaggttcaggtgtggtcagggtctctgggtcggccccgtgggcacctgggttccctttctctctctcctgccctctctgtggcactcagcccagatggtgatcgggtggctgttggatatcgagcggatggcattaggatctacaaaatctcttcaggttcccagggggctcagggtcaggcactggatgtggcagtgtccgccctggcctggctaagccccaaggtattggtgagtggtgcagaagatgggtccttgcagggctgggcactcaaggaatgctcccttcagtccctctggctcctgtccagattccagaagcctgtgctaggactggccacttcccaggagctcttggcttctgcctcagaggatttcacagtgcagctgtggccaaggcagctgctgacgcggccacacaaggcagaagactttccctgtggcactgagctgcggggacatgagggccctgtgagctgctgtagtttcagcactgatggaggcagcctggccaccgggggccgggatcggagtctcctctgctgggacgtgaggacacccaaaacccctgttttgatccactccttccctgcctgtcaccgtgactgggtcactggctgtgcctggaccaaagataacctactgatatcctgctccagtgatggctctgtggggctctgggacccagagtcaggacagcggcttggtcagttcctgggtcatcagagtgctgtgagcgctgtggcagctgtggaggagcacgtggtgtctgtgagccgggatgggaccttgaaagtgtgggaccatcaaggcgtggagctgaccagcatccctgctcactcaggacccattagccactgtgcagctgccatggagccccgtgcagctggacagcctgggtcagagcttctggtggtaaccgtcgggctagatggggccacacggttatggcatccactcttggtgtgccaaacccacaccctcctgggacacagcggcccagtccgtgctgctgctgtttcagaaacctcaggcctcatgctgaccgcctctgaggatggttctgtacggctctggcaggttcctaaggaagcagatgacacatgtataccaaggagttctgcagccgtcactgctgtggcttgggcaccagatggttccatggcagtatctggaaatcaagctggggaactaatcttgtggcaggaagctaaggctgtggccacagcacagtcttcacctgaaccgaattctacaggaggacttaggggtgctgacaagtctggattgggctcctgatggtcactttctcatcttggccaaagcagatttgaagttactttgcatg

SEQ ID NO: 190017 - DNA, 1055 bp, Homo sapiens
  Payload ID: 17523
  Gene Symbol: TEP1
  Gene Name: telomerase-associated protein 1
  ENST ID: ENST00000556488
  CDS Start-End: 1-309
cgtaccttggccttcaatgtgcctgggggggttgtggctgtgggccggctggacagtatggtggagctgtgggcctggcgagaaggggcacggctggctgccttccctgcccaccatggctttgttgctgctgcgcttttcctgcatgcgggttgccagttactgacggctggagaggatggcaagatggtgatcgggtggctgttggatatcgagcggatggcattaggatctacaaaatctcttcaggttcccagggggctcagggtcaggcactggatgtggcagtgtccgccctggcctggctaagccccaaggtattggtgagtggtgcagaagatgggtccttgcagggctgggcactcaaggaatgctcccttcagtccctctggctcctgtccagattccagaagcctgtgctaggactggccacttcccaggagctcttggcttctgcctcagaggatttcacagtgcagctgtggccaaggcagctgctgacgcggccacacaaggcagaagactttccctgtggcactgagctgcggggacatgagggccctgtgagctgctgtagtttcagcactgatggaggcagcctggccaccgggggccgggatcggagtctcctctgctgggacgtgaggacacccaaaacccctgttttgatccactccttccctgcctgtcaccgtgactgggtcactggctgtgcctggaccaaagataacctactgatatcctgctccagtgatggctctgtggggctctgggacccagagtcaggacagcggcttggtcagttcctgggtcatcagagtgctgtgagcgctgtggcagctgtggaggagcacgtggtgtctgtgagccgggatgggaccttgaaagtgtgggaccatcaaggcgtggagctgaccagcatccctgctcactcaggacccattagccactgtgcagctgccatggagccccgtgcagctggacagcctgggtcagagcttctggtggtaaccgtcgggctagatggggccacacggttatggcatccactcttg

SEQ ID NO: 190018 - DNA, 7832 bp, Homo sapiens
  Payload ID: 17523
  Gene Symbol: TEP1
  Gene Name: telomerase-associated protein 1
  ENST ID: ENST00000555727
  CDS Start-End: 40-4485
aatcggacgccccaggcatatacaagctgagtttcagccatggaaaaactccatgggcatgtgtctgcccatccagacatcctctccttggagaaccggtgcctggctatgctccctgacttacagcccttggagaaactacatcagcatgtatctacccactcagatatcctctccttgaagaaccagtgcctagccacgcttcctgacctgaagaccatggaaaaaccacatggatatgtgtctgcccacccagacatcctctccttggagaaccagtgcctggccacactttctgacctgaagaccatggagaaaccacatggacatgtttctgcccacccagacatcctctccttggagaaccggtgcctggccaccctctctagtctaaagagcactgtgtctgccagccccttgttccagagtctacagatatctcacatgacgcaagctgatttgtaccgtgtgaacaacagcaattgcctgctctctgagcctccaagttggagggctcagcatttctctaagggactagacctttcaacctgccctatagccctgaaatccatctctgccacagagacagctcaggaagcaactttgggtcgttggtttgattcagaagagaagaaaggggcagagacccaaatgccttcttatagtctgagcttgggagaggaggaggaggtggaggatctggccgtgaagctcacctctggagactctgaatctcatccagagcctactgaccatgtccttcaggaaaagaagatggctctactgagcttgctgtgctctactctggtctcagaagtaaacatgaacaatacatctgaccccaccctggctgccatttttgaaatctgtcgtgaacttgccctcctggagcctgagtttatcctcaaggcatctttgtatgccaggcagcagctgaacgtccggaatgtggccaataacatcttggccattgctgctttcttgccggcgtgtcgcccccacctgcgacgatatttctgtgccattgtccagctgccttctgactggatccaggtggctgagctttaccagagcctggctgagggagataagaataagctggtgcccctgcccgcctgtctccgtactgccatgacggacaaatttgcccagtttgacgagtaccagctggctaagtacaaccctcggaagcaccgggccaagagacacccccgccggccaccccgctctccagggatggagcctccattttctcacagatgttttccaaggtacatagggtttctcagagaagagcagagaaagtttgagaaggccggtgatacagtgtcagagaaaaagaatcctccaaggttcaccctgaagaagctggttcagcgactgcacatccacaagcctgcccagcacgttcaagccctgctgggttacagatacccctccaacctacagctcttttctcgaagtcgccttcctgggccttgggattctagcagagctgggaagaggatgaagctgtctaggccagagacctgggagcgggagctgagcctacgggggaacaaagcgtcggtctgggaggaactcattgaaaatgggaagcttcccttcatggccatgcttcggaacctgtgcaacctgctgcgggttggaatcagttcccgccaccatgagctcattctccagagactccagcatgcgaagtcggtgatccacagtcggcagtttccattcagatttcttaacgcccatgatgccattgatgccctcgaggctcaactcagaaatcaagcattgccctttccttcgaatataacactgatgaggcggatactaactagaaatgaaaagaaccgtcccaggcggaggtttctttgccacctaagccgtcagcagcttcggatggcaatgaggatacctgtgttgtatgagcagctcaagagggagaagctgagagtacacaaggccagacagtggaaatatgatggtgagatgctgaacaggtaccgacaggccctagagacagctgtgaacctctctgtgaagcacagcctgcccctgctgccaggccgcactgtcttggtctatctgacagatgctaatgcagacaggctctgtccaaagagcaacccacaagggcccccgctgaactatgcactgctgttgattgggatgatgatcacgagggcggagcaggtggacgtcgtgctgtgtggaggtgacactctgaagactgcagtgcttaaggcagaagaaggcatcctgaagactgccatcaagctccaggctcaagtccaggagtttgatgaaaatgatggatggtccctgaatacttttgggaaatacctgctgtctctggctggccaaagggttcctgtggacagggtcatcctccttggccaaagcatggatgatggaatgataaatgtggccaaacagctttactggcagcgtgtgaattccaagtgcctctttgttggtatcctcctaagaagggtacaatacctgtcaacagatttgaatcccaatgatgtgacactctcaggctgtactgatgcgatactgaagttcattgcagagcatggggcctcccatcttctggaacatgtgggccaaatggacaaaatattcaagattccaccacccccaggaaagacaggggtccagtctctccggccactggaagaggacactccaagccccttggctcctgtttcccagcaaggatggcgcagcatccggcttttcatttcatccactttccgagacatgcatggggagcgggacctgctgctgaggtctgtgctgccagcactgcaggcccgagcggcccctcaccgtatcagccttcacggaatcgacctccgctggggcgtcactgaggaggagacccgtaggaacagacaactggaagtgtgccttggggaggtggagaacgcacagctgtttgtggggattctgggctcccgttatggatacattccccccagctacaaccttcctgaccatccacacttccactgggcccagcagtacccttcagggcgctctgtgacagagatggaggtgatgcagttcctgaaccggaaccaacgtctgcagccctctgcccaagctctcatctacttccgggattccagcttcctcagctctgtgccagatgcctggaaatctgactttgtttctgagtctgaagaggccgcacgtcggatctcagaactgaagagctacctaagcagacagaaagggatcacctgccgcagatacccctgtgagtgggggggtgtggcagctggccggccctatgttggcgggctggaggagtttgggcagttggttctgcaggatgtatggaatatgatccagaagctctacctgcagcctggggccctgctggagcagccagtgtccatcccagacgatgacttggtccaggccaccttccagcagctgcagaagccaccgagtcctgcccggccacgccttcttcaggacacagtgcaacggctgatgctgccccacggaaggctgagcctggtgacggggcagtcaggacagggcaagacagccttcctggcatctcttgtgtcagccctgcaggctcctgatggggccaaggtggcatcattagtcttcttccacttttctggggctcgtcctgaccagggtcttgccctcactctgctcagacgcctctgtacctatctgcgtggccaactaaaagagccaggtgccctccccagcacctaccgaagcctggtgtgggagctgcagcagaggctgctgcccaagtctgctgagtccctgcatcctggccagacccaggtcctgatcatcgatggggctgataggttagtggaccagaatgggcagctgatttcagactggatcccaaagaagcttccccggtgtgtacacctggtgctgagtgtgtctagtgatgcaggcctaggggagacccttgagcagagccagggtgcccacgtgctggccttggggcctctggaggcctctgctcgggcccggctggtgagagaggagctggccctgtacgggaagcggctggaggagtcaccatttaacaaccagatgcgactgctgctggtgaagcgggaatcaggccggccgctctacctgcgcttggtcaccgatcacctgaggctcttcacgctgtatgagcaggtgtctgagagactccggaccctgcctgccactgtccccctgctgctgcagcacatcctgagcacactggagaaggagcacgggcctgatgtccttccccaggccttgactgccctagaagtcacacggagtggtttgactgtggaccagctgcacggagtgctgagtgtgtggcggacactaccgaaggggactaagagctgggaagaagcagtggctgctggtaacagtggagacccctaccccatgggcccgtttgcctgcctcgtccagagtctgcgcagctcagctctggaagacatgtgacgctgatgcctcaggcaccttccgaagttgccctcctgaggctctgggagacctgccttaccacctgctccagagcgggaaccgtggacttctttcgaagttccttaccaacctccatgtggtggctgcacacttggaattgggtctggtctctcggctcttggaggcccatgccctctatgcttcttcagtccccaaagaggaacaaaagctccccgaggctgacgttgcagtgtttcgcaccttcctgaggcagcaggcttcaatcctcagccagtacccccggctcctgccccagcaggcagccaaccagcccctggactcacctctttgccaccaagcctcgctgctctcccggagatggcacctccaacacacactacgatggcttaataaaccccggaccatgaaaaatcagcaaagctccagcctgtctctggcagtttcctcatcccctactgctgtggccttctccaccaatgggcaaagagcagctgtgggcactgccaatgggacagtttacctgttggacctgagaacttggcaggaggagaagtctgtggtgagtggctgtgatggaatctctgcttgtttgttcctctccgatgatacactctttcttactgccttcgacgggctcctggagctctgggacctgcagcatggttgtcgggtgctgcagactaaggctcaccagtaccaaatcactggctgctgcctgagcccagactgccggctgctagccaccgtgtgcttgggaggatgcctaaagctgtgggacacagtccgtgggcagctggccttccagcacacctaccccaagtccctgaactgtgttgccttccacccagaggggcaggtaatagccacaggcagctgggctggcagcatcagcttcttccaggtggatgggctcaaagtcaccaaggacctgggggcacccggagcctctatccgtaccttggccttcaatgtgcctgggggggttgtggctgtgggccggctggacagtatggtggagctgtgggcctggcgagaaggggcacggctggctgccttccctgcccaccatggctttgttgctgctgcgcttttcctgcatgcgggttgccagttactgacggctggagaggatggcaaggttcaggtgtggtcagggtctctgggtcggccccgtgggcacctgggttccctttctctctctcctgccctctctgtggcactcagcccagatggtgatcgggtggctgttggatatcgagcggatggcattaggatctacaaaatctcttcaggttcccagggggctcagggtcaggcactggatgtggcagtgtccgccctggcctggctaagccccaaggtattggtgagtggtgcagaagatgggtccttgcagggctgggcactcaaggaatgctcccttcagtccctctggctcctgtccagattccagaagcctgtgctaggactggccacttcccaggagctcttggcttctgcctcagaggatttcacagtgcagctgtggccaaggcagctgctgacgcggccacacaaggcagaagactttccctgtggcactgagctgcggggacatgagggccctgtgagctgctgtagtttcagcactgatggaggcagcctggccaccgggggccgggatcggagtctcctctgctgggacgtgaggacacccaaaacccctgttttgatccactccttccctgcctgtcaccgtgactgggtcactggctgtgcctggaccaaagataacctactgatatcctgctccagtgatggctctgtggggctctgggacccagagtcaggacagcggcttggtcagttcctgggtcatcagagtgctgtgagcgctgtggcagctgtggaggagcacgtggtgtctgtgagccgggatgggaccttgaaagtgtgggaccatcaaggcgtggagctgaccagcatccctgctcactcaggacccattagccactgtgcagctgccatggagccccgtgcagctggacagcctgggtcagagcttctggtggtaaccgtcgggctagatggggccacacggttatggcatccactcttggtgtgccaaacccacaccctcctgggacacagcggcccagtccgtgctgctgctgtttcagaaacctcaggcctcatgctgaccgcctctgaggatggttctgtacggctctggcaggttcctaaggaagcagatgacacatgtataccaaggagttctgcagccgtcactgctgtggcttgggcaccagatggttccatggcagtatctggaaatcaagctggggaactaatcttgtggcaggaagctaaggctgtggccacagcacaggctccaggccacattggtgctctgatctggtcctcggcacacaccttttttgtcctcagtgctgatgagaaaatcagcgagtggcaagtgaaactgcggaagggttcggcacccggaaatttgagtcttcacctgaaccgaattctacaggaggacttaggggtgctgacaagtctggattgggctcctgatggtcactttctcatcttggccaaagcagatttgaagttactttgcatgaagccaggggatgctccatctgaaatctggagcagctatacagaaaatcctatgatattgtccacccacaaggagtatggcatatttgtcctgcagcccaaggatcctggagttctttctttcttgaggcaaaaggaatcaggagagtttgaagagaggctgaactttgatataaacttagagaatcctagtaggaccctaatatcgataactcaagccaaacctgaatctgagtcctcatttttgtgtgccagctctgatgggatcctatggaacctggccaaatgcagcccagaaggagaatggaccacaggtaacatgtggcagaaaaaagcaaacactccagaaacccaaactccagggacagacccatctacctgcagggaatctgatgccagcatggatagtgatgccagcatggatagtgagccaacaccacatctaaagacacggcagcgtagaaagattcactcgggctctgtcacagccctccatgtgctacctgagttgctggtgacagcttcgaaggacagagatgttaagctatgggagagacccagtatgcagctgctgggcctgttccgatgcgaagggtcagtgagctgcctggaaccttggctgggcgctaactccaccctgcagcttgccgtgggagacgtgcagggcaatgtgtactttctgaattgggaatgaagatgtgccactcgggaataatgataccccttgtgctagagat

SEQ ID NO: 190019 - DNA, 732 bp, Homo sapiens
  Payload ID: 17523
  Gene Symbol: TEP1
  Gene Name: telomerase-associated protein 1
  ENST ID: ENST00000471684
  CDS Start-End: 1-235
acggctggagaggatggcaaggttcaggtgtggtcagggtctctgggtcggccccgtgggcacctgggttccctttctctctctcctgccctctctgtggcactcagcccagatggtgatcgggtggctgttggatatcgagcggatggcattaggatctacaaaatctcttcaggttcccagggggctcagggtcaggcactggatgtggcagtgtccgccctggcctggctaagccccaagtccctctggctcctgtccagattccagaagcctgtgctaggactggccacttcccaggagctcttggcttctgcctcagaggatttcacagtgcagctgtggccaaggcagctgctgacgcggccacacaaggcagaagactttccctgtggcactgagctgcggggacatgagggccctgtgagctgctgtagtttcagcactgatggaggcagcctggccaccgggggccgggatcggagtctcctctgctgggacgtgaggacacccaaaacccctgttttgatccactccttccctgcctgtcaccgtgactgggtcactggctgtgcctggaccaaagataacctactgatatcctgctccagtgatggctctgtggggctctgggacccagagtcaggacagcggcttggtcagttcctgggtcatcagagtgctgtgagcgctgtggcagctgtggaggagcacgtggtgtctgtgagccgg

SEQ ID NO: 190020 - DNA, 581 bp, Homo sapiens
  Payload ID: 17523
  Gene Symbol: TEP1
  Gene Name: telomerase-associated protein 1
  ENST ID: ENST00000556549
  CDS Start-End: 84-581
ctgctgcgggaatcggacgccccaggtcaggcacccagggtttccagccccagtctaaggcatatacaagctgagtttcagccatggaaaaactccatgggcatgtgtctgcccatccagacatcctctccttggagaaccggtgcctggctatgctccctgacttacagcccttggagaaactacatcagcatgtatctacccactcagatatcctctccttgaagaaccagtgcctagccacgcttcctgacctgaagaccatggaaaaaccacatggatatgtgtctgcccacccagacatcctctccttggagaaccagtgcctggccacactttctgacctgaagaccatggagaaaccacatggacatgtttctgcccacccagacatcctctccttggagaaccggtgcctggccaccctctctagtctaaagagcactgtgtctgccagccccttgttccagagtctacagatatctcacatgacgcaagctgatttgtaccgtgtgaacaacagcaattgcctgctctctgagcctccaagttggagggctcagcatttctctaagggacta

SEQ ID NO: 190021 - DNA, 7643 bp, Homo sapiens
  Payload ID: 17523
  Gene Symbol: TEP1
  Gene Name: telomerase-associated protein 1
  ENST ID: ENST00000556935
  CDS Start-End: 41-7600
gaatcggacgccccaggcatatacaagctgagtttcagccatggaaaaactccatgggcatgtgtctgcccatccagacatcctctccttggagaaccggtgcctggctatgctccctgacttacagcccttggagaaactacatcagcatgtatctacccactcagatatcctctccttgaagaaccagtgcctagccacgcttcctgacctgaagaccatggaaaaaccacatggatatgtgtctgcccacccagacatcctctccttggagaaccagtgcctggccacactttctgacctgaagaccatggagaaaccacatggacatgtttctgcccacccagacatcctctccttggagaaccggtgcctggccaccctctctagtctaaagagcactgtgtctgccagccccttgttccagagtctacagatatctcacatgacgcaagctgatttgtaccgtgtgaacaacagcaattgcctgctctctgagcctccaagttggagggctcagcatttctctaagggactagacctttcaacctgccctatagccctgaaatccatctctgccacagagacagctcaggaagcaactttgggtcgttggtttgattcagaagagaagaaaggggcagagacccaaatgccttcttatagtctgagcttgggagaggaggaggaggtggaggatctggccgtgaagctcacctctggagactctgaatctcatccagagcctactgaccatgtccttcaggaaaagaagatggctctactgagcttgctgtgctctactctggtctcagaagtaaacatgaacaatacatctgaccccaccctggctgccatttttgaaatctgtcgtgaacttgccctcctggagcctgagtttatcctcaaggggatggagcctccattttctcacagatgttttccaaggtacatagggtttctcagagaagagcagagaaagtttgagaaggccggtgatacagtgtcagagaaaaagaatcctccaaggttcaccctgaagaagctggttcagcgactgcacatccacaagcctgcccagcacgttcaagccctgctgggttacagatacccctccaacctacagctcttttctcgaagtcgccttcctgggccttgggattctagcagagctgggaagaggatgaagctgtctaggccagagacctgggagcgggagctgagcctacgggggaacaaagcgtcggtctgggaggaactcattgaaaatgggaagcttcccttcatggccatgcttcggaacctgtgcaacctgctgcgggttggaatcagttcccgccaccatgagctcattctccagagactccagcatgcgaagtcggtgatccacagtcggcagtttccattcagatttcttaacgcccatgatgccattgatgccctcgaggctcaactcagaaatcaagcattgccctttccttcgaatataacactgatgaggcggatactaactagaaatgaaaagaaccgtcccaggcggaggtttctttgccacctaagccgtcagcagcttcggatggcaatgaggatacctgtgttgtatgagcagctcaagagggagaagctgagagtacacaaggccagacagtggaaatatgatggtgagatgctgaacaggtaccgacaggccctagagacagctgtgaacctctctgtgaagcacagcctgcccctgctgccaggccgcactgtcttggtctatctgacagatgctaatgcagacaggctctgtccaaagagcaacccacaagggcccccgctgaactatgcactgctgttgattgggatgatgatcacgagggcggagcaggtggacgtcgtgctgtgtggaggtgacactctgaagactgcagtgcttaaggcagaagaaggcatcctgaagactgccatcaagctccaggctcaagtccaggagtttgatgaaaatgatggatggtccctgaatacttttgggaaatacctgctgtctctggctggccaaagggttcctgtggacagggtcatcctccttggccaaagcatggatgatggaatgataaatgtggccaaacagctttactggcagcgtgtgaattccaagtgcctctttgttggtatcctcctaagaagggtacaatacctgtcaacagatttgaatcccaatgatgtgacactctcaggctgtactgatgcgatactgaagttcattgcagagcatggggcctcccatcttctggaacatgtgggccaaatggacaaaatattcaagattccaccacccccaggaaagacaggggtccagtctctccggccactggaagaggacactccaagccccttggctcctgtttcccagcaaggatggcgcagcatccggcttttcatttcatccactttccgagacatgcatggggagcgggacctgctgctgaggtctgtgctgccagcactgcaggcccgagcggcccctcaccgtatcagccttcacggaatcgacctccgctggggcgtcactgaggaggagacccgtaggaacagacaactggaagtgtgccttggggaggtggagaacgcacagctgtttgtggggattctgggctcccgttatggatacattccccccagctacaaccttcctgaccatccacacttccactgggcccagcagtacccttcagggcgctctgtgacagagatggaggtgatgcagttcctgaaccggaaccaacgtctgcagccctctgcccaagctctcatctacttccgggattccagcttcctcagctctgtgccagatgcctggaaatctgactttgtttctgagtctgaagaggccgcacgtcggatctcagaactgaagagctacctaagcagacagaaagggatcacctgccgcagatacccctgtgagtgggggggtgtggcagctggccggccctatgttggcgggctggaggagtttgggcagttggttctgcaggatgtatggaatatgatccagaagctctacctgcagcctggggccctgctggagcagccagtgtccatcccagacgatgacttggtccaggccaccttccagcagctgcagaagccaccgagtcctgcccggccacgccttcttcaggacacagtgcaacggctgatgctgccccacggaaggctgagcctggtgacggggcagtcaggacagggcaagacagccttcctggcatctcttgtgtcagccctgcaggctcctgatggggccaaggtggcatcattagtcttcttccacttttctggggctcgtcctgaccagggtcttgccctcactctgctcagacgcctctgtacctatctgcgtggccaactaaaagagccaggtgccctccccagcacctaccgaagcctggtgtgggagctgcagcagaggctgctgcccaagtctgctgagtccctgcatcctggccagacccaggtcctgatcatcgatggggctgataggttagtggaccagaatgggcagctgatttcagactggatcccaaagaagcttccccggtgtgtacacctggtgctgagtgtgtctagtgatgcaggcctaggggagacccttgagcagagccagggtgcccacgtgctggccttggggcctctggaggcctctgctcgggcccggctggtgagagaggagctggccctgtacgggaagcggctggaggagtcaccatttaacaaccagatgcgactgctgctggtgaagcgggaatcaggccggccgctctacctgcgcttggtcaccgatcacctgaggctcttcacgctgtatgagcaggtgtctgagagactccggaccctgcctgccactgtccccctgctgctgcagcacatcctgagcacactggagaaggagcacgggcctgatgtccttccccaggccttgactgccctagaagtcacacggagtggtttgactgtggaccagctgcacggagtgctgagtgtgtggcggacactaccgaaggggactaagagctgggaagaagcagtggctgctggtaacagtggagacccctaccccatgggcccgtttgcctgcctcgtccagagtctgcgcagtttgctaggggagggccctctggagcgccctggtgcccggctgtgcctccctgatgggcccctgagaacagcagctaaacgttgctatgggaagaggccagggctagaggacacggcacacatcctcattgcagctcagctctggaagacatgtgacgctgatgcctcaggcaccttccgaagttgccctcctgaggctctgggagacctgccttaccacctgctccagagcgggaaccgtggacttctttcgaagttccttaccaacctccatgtggtggctgcacacttggaattgggtctggtctctcggctcttggaggcccatgccctctatgcttcttcagtccccaaagaggaacaaaagctccccgaggctgacgttgcagtgtttcgcaccttcctgaggcagcaggcttcaatcctcagccagtacccccggctcctgccccagcaggcagccaaccagcccctggactcacctctttgccaccaagcctcgctgctctcccggagatggcacctccaacacacactacgatggcttaataaaccccggaccatgaaaaatcagcaaagctccagcctgtctctggcagtttcctcatcccctactgctgtggccttctccaccaatgggcaaagagcagctgtgggcactgccaatgggacagtttacctgttggacctgagaacttggcaggaggagaagtctgtggtgagtggctgtgatggaatctctgcttgtttgttcctctccgatgatacactctttcttactgccttcgacgggctcctggagctctgggacctgcagcatggttgtcgggtgctgcagactaaggctcaccagtaccaaatcactggctgctgcctgagcccagactgccggctgctagccaccgtgtgcttgggaggatgcctaaagctgtgggacacagtccgtgggcagctggccttccagcacacctaccccaagtccctgaactgtgttgccttccacccagaggggcaggtaatagccacaggcagctgggctggcagcatcagcttcttccaggtggatgggctcaaagtcaccaaggacctgggggcacccggagcctctatccgtaccttggccttcaatgtgcctgggggggttgtggctgtgggccggctggacagtatggtggagctgtgggcctggcgagaaggggcacggctggctgccttccctgcccaccatggctttgttgctgctgcgcttttcctgcatgcgggttgccagttactgacggctggagaggatggcaaggttcaggtgtggtcagggtctctgggtcggccccgtgggcacctgggttccctttctctctctcctgccctctctgtggcactcagcccagatggtgatcgggtggctgttggatatcgagcggatggcattaggatctacaaaatctcttcaggttcccagggggctcagggtcaggcactggatgtggcagtgtccgccctggcctggctaagccccaaggtattggtgagtggtgcagaagatgggtccttgcagggctgggcactcaaggaatgctcccttcagtccctctggctcctgtccagattccagaagcctgtgctaggactggccacttcccaggagctcttggcttctgcctcagaggatttcacagtgcagctgtggccaaggcagctgctgacgcggccacacaaggcagaagactttccctgtggcactgagctgcggggacatgagggccctgtgagctgctgtagtttcagcactgatggaggcagcctggccaccgggggccgggatcggagtctcctctgctgggacgtgaggacacccaaaacccctgttttgatccactccttccctgcctgtcaccgtgactgggtcactggctgtgcctggaccaaagataacctactgatatcctgctccagtgatggctctgtggggctctgggacccagagtcaggacagcggcttggtcagttcctgggtcatcagagtgctgtgagcgctgtggcagctgtggaggagcacgtggtgtctgtgagccgggatgggaccttgaaagtgtgggaccatcaaggcgtggagctgaccagcatccctgctcactcaggacccattagccactgtgcagctgccatggagccccgtgcagctggacagcctgggtcagagcttctggtggtaaccgtcgggctagatggggccacacggttatggcatccactcttggtgtgccaaacccacaccctcctgggacacagcggcccagtccgtgctgctgctgtttcagaaacctcaggcctcatgctgaccgcctctgaggatggttctgtacggctctggcaggttcctaaggaagcagatgacacatgtataccaaggagttctgcagccgtcactgctgtggcttgggcaccagatggttccatggcagtatctggaaatcaagctggggaactaatcttgtggcaggaagctaaggctgtggccacagcacaggctccaggccacattggtgctctgatctggtcctcggcacacaccttttttgtcctcagtgctgatgagaaaatcagcgagtggcaagtgaaactgcggaagggttcggcacccggaaatttgagtcttcacctgaaccgaattctacaggaggacttaggggtgctgacaagtctggattgggctcctgatggtcactttctcatcttggccaaagcagatttgaagttactttgcatgaagccaggggatgctccatctgaaatctggagcagctatacagaaaatcctatgatattgtccacccacaaggagtatggcatatttgtcctgcagcccaaggatcctggagttctttctttcttgaggcaaaaggaatcaggagagtttgaagagaggctgaactttgatataaacttagagaatcctagtaggaccctaatatcgataactcaagccaaacctgaatctgagtcctcatttttgtgtgccagctctgatgggatcctatggaacctggccaaatgcagcccagaaggagaatggaccacaggtaacatgtggcagaaaaaagcaaacactccagaaacccaaactccagggacagacccatctacctgcagggaatctgatgccagcatggatagtgatgccagcatggatagtgagccaacaccacatctaaagacacggcagcgtagaaagattcactcgggctctgtcacagccctccatgtgctacctgagttgctggtgacagcttcgaaggacagagatgttaagctatgggagagacccagtatgcagctgctgggcctgttccgatgcgaagggtcagtgagctgcctggaaccttggctgggcgctaactccaccctgcagcttgccgtgggagacgtgcagggcaatgtgtactttctgaattgggaatgaagatgtgccactcgggaataatgataccccttgtgctagagat

SEQ ID NO: 190022 - DNA, 3314 bp, Homo sapiens
  Payload ID: 17524
  Gene Symbol: TELO2
  Gene Name: telomere maintenance 2
  Uniprot ID: Q9Y4R8
  ENST ID: ENST00000262319
  CDS Start-End: 280-2793
gatgcgccctcccgcctggcgtcctccgcagattcgcgctgagaggcccgcggagacccgccccagaggctcaagaaaacccgcgggagcctcgcccggacccaggaactcgtgctcggggccaaccggctgggccgcgatcgcgtttcgtccggggccgcggcggccgtggggaatcggctgcagcgaatcggtggcgcgcggcgcctgagcgcgctgcagtcacccgggagccgggtccaggtcgtcttcccgtgacgcccagatctgtcctgcaggatggagccagcaccctcagaggttcgactcgccgtccgggaagccattcatgccctctcgtcttcggaggatggcggccacatcttctgcaccctggagtccctgaagcggtatctcggtgagatggagcctccagcgctcccgagggagaaggaggagtttgcctcggcccacttctcgcctgtcctcagatgtcttgccagcaggctgagcccagcctggctggagctgctgccccatggccgcctggaggagctgtgggccagcttcttcctggagggcccggcggaccaagccttcctggtgttgatggagaccatcgagggtgctgcgggccccagcttccggctgatgaagatggcgcggctgctggccagattcctgcgcgagggccggctggcagtgctgatggaggcgcagtgtcggcagcagacgcagcccggcttcatcctgctccgggagacgctgctgggcaaggtggtggccctgcccgatcacctgggcaaccgcctgcagcaggagaacttggccgagttcttcccccagaactacttccgcctgctcggcgaggaggtcgtccgggtgctgcaggcggttgtggactctctccaaggtggcctggattcctccgtgtccttcgtgtctcaggtccttgggaaagcctgtgtccacgggaggcagcaggagatcctgggcgtgctggtaccccggctggcagcgctcacccagggcagctacctgcaccagcgcgtctgctggcgcctggtggagcaagtgccggaccgggccatggaggctgtgctgaccgggctggtggaggccgcactggggcctgaggtcctttcgagactgctggggaacctggtggtgaagaacaagaaggcccagtttgtgatgacccagaagcttctgttcttacagtcccggctcacgacgcccatgctgcagagcctgctgggccatctggccatggacagccagcggcgcccgctcctgctgcaggtgctgaaggagctgttggagacgtggggcagcagcagtgccatccgccacactcccctgccgcagcagcgccacgtcagcaaggctgtcctcatctgcctggcgcaactcggggagccggaactgcgggacagccgggatgaactgctggccagcatgatggcgggcgtgaagtgccgcctggacagtagcctgccccccgtgcgacgcctgggcatgatcgtggcagaggtcgttagtgcccggatccaccccgaggggcctcccctgaaattccagtacgaagaggatgaactgagcctcgagctgctggccttggcctccccccagcctgcgggtgacggcgcctcggaggcgggcacgtccctcgttccagccacggcagagccccctgcagagacccccgcagagatcgtggatggcggcgtcccccaagcacagctggcgggctctgactcggacctggacagcgatgatgagtttgtcccctacgacatgtcgggggacagagagctgaagagcagcaaggctcctgcctacgtccgggactgcgtggaagccctgaccacgtctgaggacatagagcgctgggaggcagccctgcgggcccttgagggcctggtctacaggagccccacagccactcgggaggtgagcgtggagctggccaaggtgcttctgcatctggaggagaagacctgtgtggtgggatttgcagggctgcgccagagagccctggtggccgtcacggtcacagacccggccccggtggccgactatctgacctcacagttctatgccctcaactacagcctccggcagcgcatggacatcctggatgtgctgactctggctgcccaggagctgtctaggcctgggtgcctcgggaggactccccaacctggctccccaagtcccaacaccccgtgcctgccagaggcagccgtctctcagcctggcagtgccgtggcgtctgactggcgggtggtggtggaggagcggatcagaagcaagacccagcggctctccaagggtggcccgaggcagggcccggcaggcagccccagcagattcaactccgtggccggccacttcttcttccccctccttcagcgctttgacaggcctctggtgaccttcgacctcttgggagaagaccagctggttctcggaaggctggcgcacaccttaggggccctgatgtgcctggctgttaacaccacggtggctgtggccatgggcaaggccctgctggaattcgtgtgggcccttcgcttccacatcgatgcctacgtgcgccaggggctgttgtcggccgtctcctccgtcctgctcagcctgcctgctgcgcgcctgctggaggacctgatggacgagctgctggaagcccggtcctggctggcggacgtggctgagaaagacccggacgaggactgcaggacgctggcactgagggccctgctgcttctgcagagactcaagaacaggctcctcccacccgcgtctccctagtccctggaggcctccccaggaccaccctcgccgacagcaaggcaggcggctgagcagcggcctggagcagcagagccaggctttgtagcgaggccaggtcttcggccgcatccggtacggagagtgcagatgcaggaaggcccggcctgccgctatttatagtgcagccagtccgctaaaaatacactgggcctgggcactgcccgccgggacatggcagcctggacgtggggctggggctgtgggcgctgctggcggggttgactcttccagtgagggcagaaccaggctggcaggaggggaggacggtgtacctgctgctcagagcccccaaggctctcctctgagagccaccaagcaggacagagcagctcttgtcccaggtccctcgggctgagcgccgtgtcaccaggagaatagtgctcacagcccaggcagggtgtgtggctcctggatgggctcgtggggcgggatgggacagggcacgggctctcagaaaataaactgctttattggaatta

SEQ ID NO: 190023 - DNA, 1667 bp, Homo sapiens
  Payload ID: 17524
  Gene Symbol: TELO2
  Gene Name: telomere maintenance 2
  ENST ID: ENST00000497339
  CDS Start-End: 264-1544
cccgcgcagcgcaggcgcagatgcgccctcccgcctggcgtcctccgcagattcgcgctgagaggcccgcggagacccgccccagaggctcaagaaaacccgcgggagcctcgcccggacccaggaactcgtgctcggggccaaccggctgggccgcgatcgcgtttcgtccggggccgcggcggccgtggggaatcggctgcagcgaatcggtggcgcgcggcgcctgagcgcgctgcagtcacccgggagccgggtccaggatggagccagcaccctcagaggttcgactcgccgtccgggaagccattcatgccctctcgtcttcggaggatggcggccacatcttctgcaccctggagtccctgaagcggtatctcggtgagatggagcctccagcgctcccgagggagaaggaggagtttgcctcggcccacttctcgcctgtcctcagatgtcttgccagcaggctgagcccagcctggctggagctgctgccccatggccgcctggaggagctgtgggccagcttcttcctggagggcccggcggaccaagccttcctggtgttgatggagaccatcgagggtgctgcgggccccagcttccggctgatgaagatggcgcggctgctggccagattcctgcgcgagggccggctggcagtgctgatggaggcgcagtgtcggcagcagacgcagcccggcttcatcctgctccgggagacgctgctgggcaaggtggtggccctgcccgatcacctgggcaaccgcctgcagcaggagaacttggccgagttcttcccccagaactacttccgcctgctcggcgaggaggtcgtccgggtgctgcaggcggttgtggactctctccaaggtggcctggattcctccgtgtccttcgtgtctcaggtccttgggaaagcctgtgtccacgggaggcagcaggagatcctgggcgtgctggtaccccggctggcagcgctcacccagggcagctacctgcaccagcgcgtctgctggcgcctggtggagcaagtgccggaccgggccatggaggctgtgctgaccgggctggtggaggccgcactggggcctgaggtcctttcgagactgctggggaacctggtggtgaagaacaagaaggcccagtttgtgatgacccagaagcttctgttcttacagtcccggctcacgacgcccatgctgcagagcctgctgggccatctggccatggacagccagcggcgcccgctcctgctgcaggtgctgaaggagctgttggagacgtggggcagcagcagtgccatccgccacactcccctgccgcagcagcgccacgtcagcaaggctgtcctcatctgcctggcgcaactcggggagccggaactgcgggacagccgggatgaactgctggccagcatgatggcgggcgtgaagtgccgcctggacagtagcctgccccccgtgcgacgcctgggcatgatcgtgcagattcaactccgtggccggccacttcttcttccccctccttcagcgctttgacaggcctctggtgaccttcgacctcttgggagaagaccagctggttctcggaaggctggcgcacaccttaggggccctgatgtgcctggctgttaacaccacggtggctgtggccatgggcaa

SEQ ID NO: 190024 - DNA, 479 bp, Homo sapiens
  Payload ID: 17524
  Gene Symbol: TELO2
  Gene Name: telomere maintenance 2
  ENST ID: ENST00000567423
  CDS Start-End: 1-479
cctggacagcgatgatgagtttgtcccctacgacatgtcgggggacagagagctgaagagcagcaaggctcctgcctacgtccgggactgcgtggaagccctgaccacgtctgaggacatagagcgctgggaggcagccctgcgggcccttgagggcctggtctacaggagccccacagccactcgggaggtggccgactatctgacctcacagttctatgccctcaactacagcctccggcagcgcatggacatcctggatgtgctgactctggctgcccaggagctgtctaggcctgggtgcctcgggaggactccccaacctggctccccaagtcccaacaccccgtgcctgccagaggcagccgtctctcagcctggcagtgccgtggcgtctgactggcgggtggtggtggaggagcggatcagaagcaagacccagcggctctccaagggtggcccgaggcagggcccggcag

SEQ ID NO: 190025 - DNA, 3268 bp, Homo sapiens
  Payload ID: 17525
  Gene Symbol: TERF1
  Gene Name: telomeric repeat binding factor (NIMA-interacting) 1
  Uniprot ID: P54274
  ENST ID: ENST00000276602
  CDS Start-End: 24-1283
agtacccaagcgagccatttaacatggcggaggatgtttcctcagcggccccgagcccgcggggctgtgcggatggtagggatgccgaccctactgaggagcagatggcagaaacagagagaaacgacgaggagcagttcgaatgccaggaactgctcgagtgccaggtgcaggtgggggcccccgaggaggaggaggaggaggaggaggacgcgggcctggtggccgaggccgaggccgtggctgccggctggatgctcgatttcctctgcctctctctttgccgagctttccgcgacggccgctccgaggacttccgcaggacccgcaacagcgcagaggctattattcatggactatccagtctaacagcttgccagttgagaacgatatacatatgtcagtttttgacaagaattgcagcaggaaaaacccttgatgcacagtttgaaaatgatgaacgaattacacccttggaatcagccctgatgatttggggttcaattgaaaaggaacatgacaaacttcatgaagaaatacagaatttaattaaaattcaggctatagctgtttgtatggaaaatggcaactttaaagaagcagaagaagtctttgaaagaatatttggtgatccaaattctcatatgcctttcaaaagcaaattgcttatgataatctctcagaaagatacatttcattccttttttcaacacttcagctacaaccacatgatggagaaaattaagagttatgtgaattatgtgctaagtgaaaaatcatcaacctttctaatgaaggcagcggcaaaagtagtagaaagcaaaaggacaagaacaataacttctcaagataaacctagtggtaatgatgttgaaatggaaactgaagctaatttggatacaagaaaaaggtctcacaagaatcttttcttatctaagttgcaacatggaacccagcaacaagaccttaataagaaagaaagaagagtaggaactcctcaaagtacaaaaaagaaaaaagaaagcagaagagccactgaaagcagaatacctgtttcaaagagtcagccggtaactcctgaaaaacatcgagctagaaaaagacaggcatggctttgggaagaagacaagaatttgagatctggcgtgaggaaatatggagagggaaactggtctaaaatactgttgcattataaattcaacaaccggacaagtgtcatgttaaaagacagatggaggaccatgaagaaactaaaactgatttcctcagacagcgaagactgattgtgtttgtaaaagcttgatgaaaggacagttaagtattttgatcactgcattttgtttgaaacttgtgtcattgatgtaatttaaaacttttgtttaaagcattacagtatttttctgtgaccatcaattaatgagggtttgtgctaccagagttaaagcatatgctatcattgtattctttaagaaccttattttgataaaatgtaaatttgttgaaccctgccacatttagtatccccacccccaaatcctgttccaatgaaaaaattaaaacctgatacgaaaaaaaaaaaattccagttaacctattttgtgtctgtaggctgacctcaaccctgtaacgtaacccattaaaatgaatttctttttttttaagacagagtttctctctgttgcccaggctggagtgcagtggcgcaatttcagctcactgcaacctctgcctcccaggttcaagtgattctcctgcctcagcctcctgagtagctgggattacaggcacacaccaccacgcccagctaatttttgtatttttagtagaggcggggtttcaccatgctggtcaggatgttctccaactcctgacttcatgatccacccacctcggcctcccaaagtgctgagattacagacgtgagccactgcgtcctgcctaaaatgaattttctagatgattgaataacagtagtcctttgatagaagataatgacttggtttatggccttaatatactacttaattacttaagatgtttattaatagaatgataaatgtacagagtaacctataagcatgacatacttttgctttcagtagtttcatgtaaagaaaaaaacttgaaaatagtaatacctgagtacccatgggaataatagacactggggaggtagggtggggagcgggagcaagagctgaaaaacttacctactggggactgtgctcactacctgggtgacaggatcatacgtaccccaaacctcaacatcacacagtatactcagctaacaaacctgcccatgtgtttcctgaatctaaaataaaaatcgaaataatttttttaaaaaagaaaaagacaatagtattacccatgggacaaaatttgtactattagcaagaatcattttgtgtctcatttagaaacaatttgacttttgttccagtgtttaaactttgacaaaaatggttttgaatagatctttataacctgatgccataaatacaagattctctgataccttcatttaatatatcaatattgggcctaaaacagtattctgtaaagcttaaattggtattaactatgatcatcttgatgtctatgatagataataaacaaggtcatacataccttactaaacaattttggtttttcaccaacattttattctttaaaagatttagactaacagaattatttagcatttcgagtcatgtgctttatttagcaagtgagtaaaaatattggaatattgaagtatttgcataaaaaatcaaatggtggtgttttgtaatctctattgtatttcctattaaggtttcatatattactttcccattgttcctgaatttgttatcctatatataaacagaaacatggatgagtaccatatacttcctgactcctttatcttgttacaccacaagatactgcactatttattggagatattttgatgattagtgccaaggctggcatcatgagccaaaatagacttgttaagtcaacctcattccaaacacctgctatagatcatcaaatctaagttgccattaattgtaagatgtcctgttatttcacacacacaactagaaaagaaaaatcggtatcaattatagtatggtgctttcttattttgaattttacttattagaagagctattttagatgtatttaaacataagatttttatcacataacttgtggatacaaaaaaagagaaattgtaagcaaaataagttgggtaatatattcctaaaacctc

SEQ ID NO: 190026 - DNA, 1677 bp, Homo sapiens
  Payload ID: 17525
  Gene Symbol: TERF1
  Gene Name: telomeric repeat binding factor (NIMA-interacting) 1
  Uniprot ID: P54274
  ENST ID: ENST00000276603
  CDS Start-End: 24-1343
agtacccaagcgagccatttaacatggcggaggatgtttcctcagcggccccgagcccgcggggctgtgcggatggtagggatgccgaccctactgaggagcagatggcagaaacagagagaaacgacgaggagcagttcgaatgccaggaactgctcgagtgccaggtgcaggtgggggcccccgaggaggaggaggaggaggaggaggacgcgggcctggtggccgaggccgaggccgtggctgccggctggatgctcgatttcctctgcctctctctttgccgagctttccgcgacggccgctccgaggacttccgcaggacccgcaacagcgcagaggctattattcatggactatccagtctaacagcttgccagttgagaacgatatacatatgtcagtttttgacaagaattgcagcaggaaaaacccttgatgcacagtttgaaaatgatgaacgaattacacccttggaatcagccctgatgatttggggttcaattgaaaaggaacatgacaaacttcatgaagaaatacagaatttaattaaaattcaggctatagctgtttgtatggaaaatggcaactttaaagaagcagaagaagtctttgaaagaatatttggtgatccaaattctcatatgcctttcaaaagcaaattgcttatgataatctctcagaaagatacatttcattccttttttcaacacttcagctacaaccacatgatggagaaaattaagagttatgtgaattatgtgctaagtgaaaaatcatcaacctttctaatgaaggcagcggcaaaagtagtagaaagcaaaaggacaagaacaataacttctcaagataaacctagtggtaatgatgttgaaatggaaactgaagctaatttggatacaagaaaaagtgttagtgacaaacagtctgcggtaactgaatcctcagagggtacagtatccttattgaggtctcacaagaatcttttcttatctaagttgcaacatggaacccagcaacaagaccttaataagaaagaaagaagagtaggaactcctcaaagtacaaaaaagaaaaaagaaagcagaagagccactgaaagcagaatacctgtttcaaagagtcagccggtaactcctgaaaaacatcgagctagaaaaagacaggcatggctttgggaagaagacaagaatttgagatctggcgtgaggaaatatggagagggaaactggtctaaaatactgttgcattataaattcaacaaccggacaagtgtcatgttaaaagacagatggaggaccatgaagaaactaaaactgatttcctcagacagcgaagactgattgtgtttgtaaaagcttgatgaaaggacagttaagtattttgatcactgcattttgtttgaaacttgtgtcattgatgtaatttaaaacttttgtttaaagcattacagtatttttctgtgaccatcaattaatgagggtttgtgctaccagagttaaagcatatgctatcattgtattctttaagaaccttattttgataaaatgtaaatttgttgaaccctgccacatttagtatccccacccccaaatcctgttccaatgaaaaaattaaaacctgatacgaaaaaaaaaaaattccagttaacctattttgtgtctgtaggctgacctc

SEQ ID NO: 190027 - DNA, 516 bp, Homo sapiens
  Payload ID: 17525
  Gene Symbol: TERF1
  Gene Name: telomeric repeat binding factor (NIMA-interacting) 1
  ENST ID: ENST00000518874
  CDS Start-End: 11-516
gccatttaacatggcggaggatgtttcctcagcggccccgagcccgcggggctgtgcggatggtagggatgccgaccctactgaggagcagatggcagaaacagagagaaacgacgaggagcagttcgaatgccaggaactgctcgagtgccaggtgcaggtgggggcccccgaggaggaggaggaggaggaggaggacgcgggcctggtggccgaggccgaggccgtggctgccggctggatgctcgatttcctctgcctctctctttgccgagctttccgcgacggccgctccgaggacttccgcaggacccgcaacagcgcagaggatgcacagtttgaaaatgatgaacgaattacacccttggaatcagccctgatgatttggggttcaattgaaaaggaacatgacaaacttcatgaagaaatacagaatttaattaaaattcaggctatagctgtttgtatggaaaatggcaactttaaagaagcagaagaagtctttgaaagaatatt

SEQ ID NO: 190028 - DNA, 627 bp, Homo sapiens
  Payload ID: 17525
  Gene Symbol: TERF1
  Gene Name: telomeric repeat binding factor (NIMA-interacting) 1
  ENST ID: ENST00000517390
  CDS Start-End: 69-627
ttaaaaccttcatgggggcagagactggctatctgaagtcatcacctcctaacacaggctggcagtagatgttcactattattcatggactatccagtctaacagcttgccagttgagaacgatatacatatgtcagtttttgacaagaattgcagcaggaaaaacccttgatgcacagtttgaaaatgatgaacgaattacacccttggaatcagccctgatgatttggggttcaattgaaaaggaacatgacaaacttcatgaagaaatacagaatttaattaaaattcaggctatagctgtttgtatggaaaatggcaactttaaagaagcagaagaagtctttgaaagaatatttggtgatccaaattctcatatgcctttcaaaagcaaattgcttatgataatctctcagaaagatacatttcattccttttttcaacacttcagctacaaccacatgatggagaaaattaagagttatgtgaattatgtgctaagtgaaaaatcatcaacctttctaatgaaggcagcggcaaaagtagtagaaagcaaaaggacaagaacaataacttctcaagataaacctagtggtaatgatgttgaaatggaaactgaagctaatt

SEQ ID NO: 190029 - DNA, 2983 bp, Homo sapiens
  Payload ID: 17526
  Gene Symbol: TERF2
  Gene Name: telomeric repeat binding factor 2
  Uniprot ID: Q15554
  ENST ID: ENST00000254942
  CDS Start-End: 18-1646
ggaacgctgtttctatcatggccgcgggagccgggacggcgggccccgcttccggcccgggcgtcgtgcgtgacccagcggcgtcacagccgaggaagcggcccggccgggagggcggggagggcgcgcggcgatcggacacgatggcgggaggaggcgggagtagcgacggcagcgggcgggcagctggcaggcgggcgtcccgcagtagcgggcgggcccggcgggggcgccacgagccggggctggggggcccggcggagcgcggcgcgggggaggcacggctggaagaggcagtcaatcgctgggtgctcaagttctacttccacgaggcgctgcgggcctttcggggtagccggtacggggacttcagacagatccgggacatcatgcaggctttgcttgtcaggcccttggggaaggagcacaccgtgtcccgattgctgcgggttatgcagtgtctgtcgcggattgaagaaggggaaaatttagactgttcctttgatatggaggctgagctcacaccactggaatcagctatcaatgtgctggagatgattaaaacggaatttacactgacagaagcagtggtcgaatccagtagaaaactggtcaaggaagctgctgtcattatttgtatcaaaaacaaagaatttgaaaaggcttcaaaaattttgaaaaaacatatgtccaaggaccccacaactcagaagctgagaaatgatctcctgaatattattcgagaaaagaacttggcccatcctgttatccagaacttttcatatgagaccttccagcagaagatgctgcgcttcctggagagccacctggatgacgccgagccctacctcctcacgatggccaaaaaggctttgaaatctgagtccgctgcctcaagtacagggaaggaagataaacagccagcaccagggcctgtggaaaagccacccagagaacccgcaaggcagctacggaatcctccaaccaccattggaatgatgactctgaaagcagctttcaagactctgtctggtgcacaggattctgaggcagcctttgcaaaactggaccagaaggatctggttcttcctactcaagctctcccagcatcaccagccctcaaaaacaagagacccagaaaagatgaaaacgaaagttcagccccggctgacggtgagggtggctcggaactgcagcccaagaacaagcgcatgacaataagcagattggtcttggaggaggacagccagagtactgagcccagcgcaggcctcaactcctcccaggaggccgcttcagcgccaccatccaagcccaccgttctcaaccaacccctccctggagagaagaatcccaaagtacccaaaggcaagtggaacagctctaatggggttgaagaaaaggagacttgggtggaagaggatgaactgtttcaagttcaggcagcaccagatgaagacagtacaaccaatataacaaaaaagcagaagtggactgtagaagaaagcgagtgggtcaaggctggagtgcagaaatatggggaaggaaactgggctgccatttctaaaaattacccatttgttaaccgaacagctgtgatgattaaggatcgctggcggaccatgaaaagacttggcatgaactgaaacaggctttcatttccacagaattcacaggagcatggttcctaataatagcccctgatagtctgctctttctttctttttcttttttttttttttttgagacagagtctcgctctgtcacccaggctggagtgcagtggcgtgatctcggctcactgcgacctccgtctcccgggctcacgccattctcctgcctcagcctcccgagtagctgggactacaggcgcccgccatcacgcccggctaatgttttgtatttttagtagagacggggtttcaccgtgttagccaggatggtctcgatctcctgacctcgtgatccacccaactcggcctcccaaagtgctgggattacaggcatgagccaccgcgcctggcatctgctgtttctttcagaagctgggctgggatgagaattttgggcaacctccttcgacgtgggggaggtcccatttccacttcatcactgttggagatcatggagctaagaagcagagccaagtccacccatgtccttggcagagatgacaggcacacagcttgtgcagtgccagaatatcattagcgtttcccttctttagtggtttgcttaaatttaaatccctggtaatctgtagaaccttctcctaggaaatggtgaagtctattaggagccacttgtgactccatgacctgttaaaaccagcaatgtgagtattatttggagtaaatttgttccacgtcaagttctggccttctgatgcaaatgcaaaggaacttagtctgttatgaacccaggttgatgacagaccagtccttgtggaataagattccctttaaaaactctttagccagtcgtgacatcaaccctagacctgtctgccttggcatttgctgtcaacatctgctgggctatgtaggcaggttaatcctccacttctcatgtggttgaaccagtgtgttttttggtaaaatggtgattgtagataagattagttccctgatcccctgccccctgtcccctgcctcttttcccaattcccttccttatgctggacttttaaagcttaaaaaaaatccgattgaatataaatgcctaatttcattctttgtgaaatggttgcttcctcctgattccctaattgtgctgtgttcgtgtcttgcactggaattcaacattcccttctccttttgtactgtgttgtgcttgctgtctctcccggacacccttaaagactgtctttttagcaaaaaatttcagtaaagtgttttctgtaatctttttttaaaaggtgagaactaattattgtccatacttgtagcattcttcattaaagtcttgcttctctcaactgtaa

SEQ ID NO: 190030 - DNA, 1129 bp, Homo sapiens
  Payload ID: 17526
  Gene Symbol: TERF2
  Gene Name: telomeric repeat binding factor 2
  Uniprot ID: Q15554
  ENST ID: ENST00000567296
  CDS Start-End: 18-899
ggaacgctgtttctatcatggccgcgggagccgggacggcgggccccgcttccggcccgggcgtcgtgcgtgacccagcggcgtcacagccgaggaagcggcccggccgggagggcggggagggcgcgcggcgatcggacacgatggcgggaggaggcgggagtagcgacggcagcgggcgggcagctggcaggcgggcgtcccgcagtagcgggcgggcccggcgggggcgccacgagccggggctggggggcccggcggagcgcggcgcgggggaggcacggctggaagaggcagtcaatcgctgggtgctcaagttctacttccacgaggcgctgcgggcctttcggggtagccggtacggggacttcagacagatccgggacatcatgcaggctttgcttgtcaggcccttggggaaggagcacaccgtgtcccgattgctgcgggttatgcagtgtctgtcgcggattgaagaaggggaaaatttagactgttcctttgatatggaggctgagctcacaccactggaatcagctatcaatgtgctggagatgattaaaacggaatttacactgacagaagcagtggtcgaatccagtagaaaactggtcaaggaagctgctgtcattatttgtatcaaaaacaaagaatttgaaaaggcttcaaaaattttgaaaaaacatatgtccaaggaccccacaactcagaagctgagaaatgatctcctgaatattattcgagaaaagaacttggcccatcctgttatccagaacttttcatatgagaccttccagcagaagatgctgcgcttcctggagagccacctggatgacgccgagccctacctcctcacggtgcgccttggcccttctcccataaccatggtgtgcccttgaggatgtgcggggaatcagaatatctgaagtgaaaagagttgatgtgtgaaaaagacattgaattgtatgcactagctttcttaattaaatgccttaaaaatgcaaaagcaggccaggcgcaatggctcacgcctgtaatcccagcactttgggaggcccaggggggtggatcacctgaggtcaggagttcgagacctgcctgagcaacatggtgaaaccccatctctact

SEQ ID NO: 190031 - DNA, 917 bp, Homo sapiens
  Payload ID: 17526
  Gene Symbol: TERF2
  Gene Name: telomeric repeat binding factor 2
  ENST ID: ENST00000566750
  CDS Start-End: 69-917
ggggttggagcgccggggaagggggtccgggggaccgggagtcgggactgggggtcgcccagccaacgatgtcttctctcccagctttgcttgtcaggcccttggggaaggagcacaccgtgtcccgattgctgcgggttatgcagtgtctgtcgcggattgaagaaggggaaaatttagactgttcctttgatatggaggctgagctcacaccactggaatcagctatcaatgtgctggagatgattaaaacggaatttacactgacagaagcagtggtcgaatccagtagaaaactggtcaaggaagctgctgtcattatttgtatcaaaaacaaagaatttgaaaaggcttcaaaaattttgaaaaaacatatgtccaaggaccccacaactcagaagctgagaaatgatctcctgaatattattcgagaaaagaacttggcccatcctgttatccagaacttttcatatgagaccttccagcagaagatgctgcgcttcctggagagccacctggatgacgccgagccctacctcctcacgatggccaaaaaggctttgaaatctgagtccgctgcctcaagtacagggaaggaagataaacagccagcaccagggcctgtggaaaagccacccagagaacccgcaaggcagctacggaatcctccaaccaccattggaatgatgactctgaaagcagctttcaagactctgtctggtgcacaggattctgaggcagcctttgcaaaactggaccagaaggatctggttcttcctactcaagctctcccagcatcaccagccctcaaaaacaagagacccagaaaagatgaaaacgaaagttcagccccggctgacggtgagggtggctcggaactgcagcccaagaacaagcgcatgacaataagcagattg

SEQ ID NO: 190032 - DNA, 513 bp, Homo sapiens
  Payload ID: 17526
  Gene Symbol: TERF2
  Gene Name: telomeric repeat binding factor 2
  ENST ID: ENST00000569280
  CDS Start-End: 1-182
cggcggagcgcggcgcgggggaggcacggctggaagaggcagtcaatcgctgggtgctcaagttctacttccacgaggcgctgcgggcctttcggggtagccgctttgcttgtcaggcccttggggaaggagcacaccgtgtcccgattgctgcgggttatgcagtgtctgtcgcggattgaagaaggggaaaatttagactgttcctttgatatggaggctgagctcacaccactggaatcagctatcaatgtgctggagatgattaaaacggaatttacactgacagaagcagtggtcgaatccagtagaaaactggtcaaggaagctgctgtcattatttgtatcaaaaacaaagaatttgaaaaggcttcaaaaattttgaaaaaacatatgtccaaggaccccacaactcagaagctgagaaatgatctcctgaatattattcgagaaaagaacttggcccatcctgttatccagaacttttcatatgagaccttccagcagaagatg

SEQ ID NO: 190033 - DNA, 669 bp, Homo sapiens
  Payload ID: 17526
  Gene Symbol: TERF2
  Gene Name: telomeric repeat binding factor 2
  ENST ID: ENST00000566257
  CDS Start-End: 52-669
aaaagagcttaaaaatgaaaactgtgctttgtcctagactgttcctttgatatggaggctgagctcacaccactggaatcagctatcaatgtgctggagatgattaaaacggaatttacactgacagaagcagtggtcgaatccagtagaaaactggtcaaggaagctgctgtcattatttgtatcaaaaacaaagaatttgaaaaggcttcaaaaattttgaaaaaacatatgtccaaggaccccacaactcagaagctgagaaatgatctcctgaatattattcgagaaaagaacttggcccatcctgttatccagaacttttcatatgagaccttccagcagaagatgctgcgcttcctggagagccacctggatgacgccgagccctacctcctcacgattggatttatggccaaaaaggctttgaaatctgagtccgctgcctcaagtacagggaaggaagataaacagccagcaccagggcctgtggaaaagccacccagagaacccgcaaggcagctacggaatcctccaaccaccattggaatgatgactctgaaagcagctttcaagactctgtctggtgcacaggattctgaggcagcctttgcaaaactggaccagaaggatctggttcttcctactcaagctctcccagcatcacca

SEQ ID NO: 190034 - DNA, 573 bp, Homo sapiens
  Payload ID: 17526
  Gene Symbol: TERF2
  Gene Name: telomeric repeat binding factor 2
  ENST ID: ENST00000564982
  CDS Start-End: 1-300
gctgtcattatttgtatcaaaaacaaagaatttgaaaaggcttcaaaaattttgaaaaaacatatgtccaaggaccccacaactcagaagctgagaaatgatctcctgaatattattcgagaaaagaacttggcccatcctgttatccagaacttttcatatgagaccttccagcagaagatgctgcgcttcctggagagccacctggatgacgccgagccctacctcctcacgattggatttgtaagtgaacttgtttgcatattgagtatattcttggtgaaagaagcagagaattaatgcaattctgtggcctcttcttcctgatgacatccttcctttcccagatggccaaaaaggctttgaaatctgagtccgctgcctcaagtacagggaaggaagataaacagccagcaccagggcctgtggaaaagccacccagagaacccgcaaggcagctacggaatcctccaaccaccattggaatgatgactctgaaagcagctttcaagactctgtctggtgcacaggattctgaggcagcctttgcaaaactggaccagaaggatctgg

SEQ ID NO: 190035 - DNA, 431 bp, Homo sapiens
  Payload ID: 17526
  Gene Symbol: TERF2
  Gene Name: telomeric repeat binding factor 2
  ENST ID: ENST00000569542
  CDS Start-End: 1-431
agatgattaaaacggaatttacactgacagaagcagtggtcgaatccagtagaaaactggtcaaggaagctatggccaaaaaggctttgaaatctgagtccgctgcctcaagtacagggaaggaagataaacagccagcaccagggcctgtggaaaagccacccagagaacccgcaaggcagctacggaatcctccaaccaccattggaatgatgactctgaaagcagctttcaagactctgtctggtgcacaggattctgaggcagcctttgcaaaactggaccagaaggatctggttcttcctactcaagctctcccagcatcaccagccctcaaaaacaagagacccagaaaagatgaaaacgaaagttcagccccggctgacggtgagggtggctcggaactgcagcccaagaacaagcgcatgaca

SEQ ID NO: 190036 - DNA, 791 bp, Homo sapiens
  Payload ID: 17526
  Gene Symbol: TERF2
  Gene Name: telomeric repeat binding factor 2
  ENST ID: ENST00000566051
  CDS Start-End: 1-148
gaacagctctaatggggttgaagaaaaggagacttgggtggaagaggatgaactgtttcaagttcaggaagtggactgtagaagaaagcgagtgggtcaaggctggagtgcagaaatatggggaaggaaactgggctgccatttctaaaaattacccatttgttaaccgaacagctgtgatgattaaggatcgctggcggaccatgaaaagacttggcatgaactgaaacaggctttcatttccacagaattcacaggagcatggttcctaataatagcccctgatagtctgctctttctttctttttcttttttttttttttttgagacagagtctcgctctgtcacccaggctggagtgcagtggcgtgatctcggctcactgcgacctccgtctcccgggctcacgccattctcctgcctcagcctcccgagtagctgggactacaggcgcccgccatcacgcccggctaatgttttgtatttttagtagagacggggtttcaccgtgttagccaggatggtctcgatctcctgacctcgtgatccacccaactcggcctcccaaagtgctgggattacaggcatgagccaccgcgcctggcatctgctgtttctttcagaagctgggctgggatgagaattttgggcaacctccttcgacgtgggggaggtcccatttccacttcatcactgttggagatcatggagctaagaagcagagccaagtccacccatgtccttggcagagatgacaggcacacagcttgtgcagtgccagaatatcatta

SEQ ID NO: 190037 - DNA, 2501 bp, Homo sapiens
  Payload ID: 17526
  Gene Symbol: TERF2
  Gene Name: telomeric repeat binding factor 2
  ENST ID: ENST00000569584
  CDS Start-End: 1-734
accccacaactcagaagctgagaaatgatctcctgaatattattcgagaaaagaacttggcccatcctgttatccagaacttttcatatgagaccttccagcagaagatgctgcgcttcctggagagccacctggatgacgccgagccctacctcctcacgatggccaaaaaggctttgaaatctgagtccgctgcctcaagtacagggaaggaagataaacagccagcaccagggcctgtggaaaagccacccagagaacccgcaaggcagctacggaatcctccaaccaccattggaatgatgactctgaaagcagctttcaagactctgtctggtgcacaggattctgaggcagcctttgcaaaactggaccagaaggatctggttcttcctactcaagctctcccagcatcaccagccctcaaaaacaagagacccagaaaagatgaaaacgaaagttcagccccggctgacggtgagggtggctcggaactgcagcccaagaacaagcgcatgacaataagcagattggtcttggaggaggacagccagagtactgagcccagcgcaggcctcaactcctcccaggaggccgcttcagcgccaccatccaagcccaccgttctcaaccaacccctccctggagagaagaatcccaagtatgaagaccttctttgtagaaattttggggctggttggtggtcctggttgggcctggtattacttccgtgaatgaagtaactttcagctaagttactcaccaccaaggcttgctcagactgctagaacttgacgcaggagtggccagtgacgacgtagccatccctgccggttctgaagccccgcatgtgggcttccaagccttgcactagggcatgagtgggaatggaaaggtttcagagcctcctactcatcgctgctttcatttttagcaaacatctgagtgtcttgacttctaaacattagtcttgtgtgttaaaagaaatttgtttgcattgggccacattatactttgacccttaaaaagagactgatgaatatgtataattttgcacccttctgagcatttgagacttggcaagttcagtgaatacttactaatctcccatgtcctgctaggtactgtggggcagtggctagaatactttaattttgctccccattgtgattctcatcctggctttgagttttgcttccctttgtgtcctgtggtggatcctccctccaggcagactggcctgcttgctctctggaacatgttgtttgtttctaccactgtacttttgcttcctctcattccccacagtggaccgtcatcccttcatcattgcttgtccaaatcccatttgtcctttaaagggaagaaaagccgttgttgatgaagtgctttctgggggcagagcactttcatgtatcatcttactgagtcactacaatcctcactctgtgaggtgatgatatattagccccattacacagaggagaagggctcagaaaagttcttagctcacctgaagtcacacagctaaaagtggcaaagatgggctttggatttttaatccaagtcagtcttgacagaaaagcccatggcctgtataccatatacaacaagttgcctctcttacaattctccttcctcaggctgggtgcgctggctcacacctgtaatcccagcactttgggaggctgaggcaggcagattacctgaggtcaggagtttgagagcagcctggccaacatggtgaaactccgtctctactaaaaatacaaaaattcgccaggcgtggtggtgggcgcctgtagtcccagctacttgggaagctgaggcaggagaattactggaacccgggaggcggaggctgcacagtgagccaagattgcaccactgcactccaggctgggcaacagagtgtgactccgtctcaaaaaaacaaaaacaaaaacaacttctccctcctccacagactcctccctggtcaccactagtgatccaccttatggatctcccaaggccacctctgcctctgctctgtgttgtattatttggggacctgtggtctggcatgcattgtacttggtgccccaaagggctgtggcatctgataagtgatttatcctcaggcacagatttgcactatgtcaccactacttgtatgtagaagtgagtcaccggctggcaaatgggcatagctgctgggcagtggatgcagctccatgcatgttattctcatttgatacaggatctcattggcttctcacagcaatcctgtgcactataggtattgctcccgggaacagatgaggaaacaggagagtgcgagattacagtaattttgtaaatgggaggatttgtgaaggtttcagacatacaccctctctcatatgtcaaggatatgaagtctaatgaatcccctaaagcagcaggggttggcaagctgtggccctggggccaaatcagcctactgcctgtttttgtaaataaagttttattggaacaca

SEQ ID NO: 190038 - DNA, 554 bp, Homo sapiens
  Payload ID: 17526
  Gene Symbol: TERF2
  Gene Name: telomeric repeat binding factor 2
  ENST ID: ENST00000567841
  CDS Start-End: 297-554
gtaagtaaatctaacttttctgcctttcttgtaatttccctccaaagctacttctatcactccactatctctatggattcccaaggagaacagcttcttctcctggggctgggaatacagcaaggaaggggacagattattatggtgtggccctgagactggggcttgtggaagaactgactgaagatgtttccttggccagggagagagagagagagctgtaaaacacccttgtgaaagctttgcttgtcaggcccttggggaaggagcacaccgtgtcccgattgctgcgggttatgcagtgtctgtcgcggattgaagaaggggaaaatttagactgttcctttgatatggaggctgagctcacaccactggaatcagctatcaatgtgctggagatgattaaaacggaatttacactgacagaagcagtggtcgaatccagtagaaaactggtcaaggaagctgctgtcattatttgtatcaaaaacaaagaatttgaaaaggcttcaaaaattttgaaaaaacatatgtccaaggaccccacaactcag

SEQ ID NO: 190039 - DNA, 2118 bp, Homo sapiens
  Payload ID: 17527
  Gene Symbol: TERF2IP
  Gene Name: telomeric repeat binding factor 2, interacting protein
  Uniprot ID: Q9NYB0
  ENST ID: ENST00000300086
  CDS Start-End: 98-1297
gcggcagaggcgtctgcggtgacagctcagtcagttgagctctgtgtgccaggcgctcgcgagggggtagctcttctagtagtgctcggcgtcagacatggcggaggcgatggatttgggcaaagaccccaacgggcccacccattcctcgactctgttcgtgagggacgacggcagctccatgtccttctacgtgcggcccagcccggccaagcgtcggctgtcgacgctcatcctgcacggcggcggcaccgtgtgccgagtgcaggagcccggggccgtgctgctggcccagcccggggaggcgctggccgaggcctcgggtgatttcatctccacgcagtacatcctggactgcgtggagcgcaacgagaggctggagctggaggcctatcggctgggccccgcctcggcggcggacaccggctcggaagcaaagcccggggccctggccgagggcgccgcggagccggagccgcagcggcacgccgggcggatcgccttcacggatgcggacgacgtagccatccttacctacgtgaaggaaaatgcccgctcgcccagctccgtcaccggtaacgccttgtggaaagcgatggagaagagctcgctcacgcagcactcgtggcagtccctgaaggaccgctacctcaagcacctgcggggccaggagcataagtacctgctgggggacgcgccggtgagcccctcctcccagaagctcaagcggaaggcggaggaggacccggaggccgcggatagcggggaaccacagaataagagaactccagatttgcctgaagaagagtatgtgaaggaagaaatccaggagaatgaagaagcagtcaaaaagatgcttgtggaagccacccgggagtttgaggaggttgtggtggatgagagccctcctgattttgaaatacatataactatgtgtgatgatgatccacccacacctgaggaagactcagaaacacagcctgatgaggaggaagaagaagaagaagaaaaagtttctcaaccagaggtgggagctgccattaagatcattcggcagttaatggagaagtttaacttggatctatcaacagttacacaggccttcctaaaaaatagtggtgagctggaggctacttccgccttcttagcgtctggtcagagagctgatggatatcccatttggtcccgacaagatgacatagatttgcaaaaagatgatgaggataccagagaggcattggtcaaaaaatttggtgctcagaatgtagctcggaggattgaatttcgaaagaaataattggcaagataatgagaaaagaaaaaagtcatggtaggtgaggtggttaaaaaaaattgtgaccaatgaactttagagagttcttgcattggaactggcacttattttctgaccatcgctgctgttgctctgtgagtcctagatttttgtagccaagcagagttgtagagggggataaaaagaaaagaaattggatgtatttacagctgtccttgaacaagtatcaatgtgtttatgaaaggaagatctaaatcagacaggagttggtctacatagtagtaatccattgttggaatggaacccttgctatagtagtgacaaagtgaaaggaaatttaggaggcataggccatttcaggcagcataagtaatctcctgtcctttggcagaagctcctttagattgggatagattccaaataaagaatctagaaataggagaagatttaattatgaggccttgaacacggattatccccaaacccttgtcatttcccccagtgagctctgatttctagactgctttgaaaatgctgtattcattttgctaacttagtatttgggtaccctgctctttggctgttctttttttggagcccttctcagtcaagtctgccggatgtctttctttacctacccctcagttttccttaaaacgcgcacacaactctagagagtgttaagaataatgttacttggttaatgtgttatttattgagtattgtttgtgctaagcattgtgttagatttaaaaaattagtggattgactccactttgttgtgttgttttcattgttgaaaataaatataactttgtattcga

SEQ ID NO: 190040 - DNA, 639 bp, Homo sapiens
  Payload ID: 17527
  Gene Symbol: TERF2IP
  Gene Name: telomeric repeat binding factor 2, interacting protein
  ENST ID: ENST00000569234
  CDS Start-End: 1-300
ctcacgcagcactcgtggcagtccctgaaggaccgctacctcaagcacctgcggggccaggagcataagtacctgctgggggacgcgccggtgagcccctcctcccagaagctcaagcggaaggcggaggaggacccggaggccgcggatagcgggggtgaggaggctgagcgcggggcctcgcggatatctgcgcgggtggggttgggatctttctcctggctgcctggcgtccatcttggcatcttcggtagcagcgcttggccccgccccctgttgacatccggaaccacagaataagagaactccagatttgcctgaagaagagtatgtgaaggaagaaatccaggagaatgaagaagcagtcaaaaagatgcttgtggaagccacccgggagtttgaggaggttgtggtggatgagagccctcctgattttgaaatacatataactatgtgtgatgatgatccacccacacctgaggaagactcagaaacacagcctgatgaggaggaagaagaagaagaagaaaaagtttctcaaccagaggtgggagctgccattaagatcattcggcagttaatggagaagtttaacttggatctatcaacagttacacaggccttcctaaaaaatagtgg

SEQ ID NO: 190041 - DNA, 1266 bp, Homo sapiens
  Payload ID: 17527
  Gene Symbol: TERF2IP
  Gene Name: telomeric repeat binding factor 2, interacting protein
  ENST ID: ENST00000564671
  CDS Start-End: 1-369
gtggatgagagccctcctgattttgaaatacatataactatgtgtgatgatgatccacccacacctgaggaagactcagaaacacagcctgatgaggaggaagaagaagaagaagaaaaagtttctcaaccagaggtgtccatctcttcacagtcatggctgatcttgtcatccacttttgggagattctcctgtatctgggcagggtatgccttctctacatcaggatctcattcccatcacccagaatgcagtgctgtggcacgatcacagctctctgcagcctcaatttcccaggctcaagcaattctcccacctcagcctcccgagaagctggaactacaggaatgtgccaccgcatcgggctaatgttttgtatttttggtagagacagggtttagccatgttgcccaggctggtctcgaattcttgggctcaagcaatcctctcacctcagcctcctaaagtgcttggactagaggtgcaaatcaccatgcctgaccctttatctctacttttggccagaagcaatccagttaacactctatcatatattattcctcctactgttttctcctctctaaattcttcagctttggctgtttgcccattagtcactgcctgggagttttcaacttttaaaatttgtgacaacattgttaggtcattaagatgggtcctcatccgatgtaactggcgttcttacaagaagcagggaaatgacgtggcggagacacaggagggggaaataccgcgtgatgatggagttaaagacaggagttatgcagctgcaagccaagaacaccaagggctgctggtgacagcaagcgaggagggagcctggccctgctggcatcttgattcagacttccagcccctaccactctgagagaataaattcctgttgttttaagccacccagtttagggtgctttgttgcagccgccttaagaaaggaatacatcgtatcattcccagaaactgcttgagtcccagggtttgagactggaaagtgctgagcctccctcactaccagatgccaccttggcgagggtgagtaggtaggaaaggctgagcagtgaccccacattcatgtgctatggcacatttgagaacataccaaacaggaaatgaaactgatgtgaaacagaaatttccgtcataaaaacaatttgcatgaaacgttcactgtactaaaaaagtagatgatttaggacaattttaacttttaccctgaaaataaatgtttaaaccattcatgatgaa

SEQ ID NO: 190042 - DNA, 994 bp, Homo sapiens
  Payload ID: 17528
  Gene Symbol: TEN1
  Gene Name: TEN1 CST complex subunit
  Uniprot ID: Q86WV5
  ENST ID: ENST00000397640
  CDS Start-End: 299-670
gccccttctttctccgtggccctttggcgcgtgagtgacagcggcccagacagagggggcgatgtccgcgtcgtggctggggccggtcgcggggcagactaatcccctgctcctggccaggggaggctcccgagcggatcctcgggaaaggggctccgaaggtcaagaaactgccctgctgggcgtccggggagtgggaaaataaagcactttttgtatcccgcccctcccccgtcacgtgaccacgcgaggcggaaagaagaaatccgaggaccggcgacgcctagaacaggagcccatgatgctgcccaaacctgggacctattacctcccctgggaggttagtgcaggccaagttcctgatgggagcacgctgagaacatttggcaggttgtgcctctatgacatgattcagtccagagtaacactgatggctcagcacggatccgatcagcaccaggttcttgtctgtaccaagttggtggagcccttccacgcccaggtgggctccctgtacatcgtcctcggggagctccagcatcagcaggacagaggctccgtggtgaaggcgcgcgtgctgacctgtgtggaggggatgaacctgcccttgttggaacaagccatccgggagcagagactgtacaagcaggagcggggcggcagccagtaggaaacagcagcctagcaacaccctcacctgcttcagagcccgaaccctctggagctgcaggagcccgggagagcacagacgcctccccagcgacggccttgtctggagctcgaaagccgaggggcgggtgatgaatccagccccttcccctactttgggattggctcagcaatgagaacccagaaagcatgccataaatccgacagccccaccccaggagactgcaggtggccgagcttgggcgccggggccgtgcttggtgtggggccatggagggttccagaaggtcctggtgaataaaggcccagggggcgtgctcttgaa

SEQ ID NO: 190043 - DNA, 563 bp, Homo sapiens
  Payload ID: 17528
  Gene Symbol: TEN1
  Gene Name: TEN1 CST complex subunit
  ENST ID: ENST00000586891
  CDS Start-End: 261-563
agagggggcgatgtccgcgtcgtggctggggccggtcgcggggcagactaatcccctgctcctggccaggggaggctcccgagcggatcctcgggaaaggggctccgaaggtcaagaaactgccctgctgggcgtccggggagtgggaaaataaagcactttttgtatcccgcccctcccccgtcacgtgaccacgcgaggcggaaagaagaaatccgaggaccggcgacgcctagaacagaacagttcttcctggcactatgtgcctgagagggtgcaagaggaacgtgttgatgaagagagtcaaattgggcaaggcgcggtggctcatgcctgtaatcccagcactttgggaggccaaggagcccatgatgctgcccaaacctgggacctattacctcccctgggaggttagtgcaggccaagttcctgatgggagcacgctgagaacatttggcaggttgtgcctctatgacatgattcagtccagagtaacactgatggctcagcacggatccgatcagcaccaggttcttgtctgtaccaagttggtggagcccttc

SEQ ID NO: 190044 - DNA, 555 bp, Homo sapiens
  Payload ID: 17528
  Gene Symbol: TEN1
  Gene Name: TEN1 CST complex subunit
  ENST ID: ENST00000590676
  CDS Start-End: 389-555
gacagagggggcgatgtccgcgtcgtggctggggccggtcgcggggcagactaatcccctgctcctggccaggggaggctcccgagcggatcctcgggaaaggggctccgaaggtcaagaaactgccctgctgggcgtccggggagtgggaaaataaagcactttttgtatcccgcccctcccccgtcacgtgaccacgcgaggcggaaagaagaaatccgaggaccggcgacgcctagaacagtagagacgaggttgccctcaaactcctgagctcaagtgatctgcccgcctcagcctcctcaagtgctgggattataggcatgagccactgcacccaaccttgttctgattgttttgaagcatttgtagcttctagcaggagcccatgatgctgcccaaacctgggacctattacctcccctgggaggttagtgcaggccaagttcctgatgggagcacgctgagaacatttggcaggttgtgcctctatgacatgattcagtccagagtaacactgatggctcagcacggatccgatcagcaccaggttct

SEQ ID NO: 190045 - DNA, 862 bp, Homo sapiens
  Payload ID: 17528
  Gene Symbol: TEN1
  Gene Name: TEN1 CST complex subunit
  ENST ID: ENST00000588202
  CDS Start-End: 278-499
ctttggcgcgtgagtgacagcggcccagacagagggggcgatgtccgcgtcgtggctggggccggtcgcggggcagactaatcccctgctcctggccaggggaggctcccgagcggatcctcgggaaaggggctccgaaggtcaagaaactgccctgctgggcgtccggggagtgggaaaataaagcactttttgtatcccgcccctcccccgtcacgtgaccacgcgaggcggaaagaagaaatccgaggaccggcgacgcctagaacaggagcccatgatgctgcccaaacctgggacctattacctcccctgggaggttagtgcaggccaagttcctgatgggagcacgctgagaacatttggcaggttgtgcctctatgacatgattcagtccagagtaacactgatggctcagcacggatccgatcagcaccaggttcttgtctgtaccaagttggtggagcccttccacgcccagacagaggctccgtggtgaaggcgcgcgtgctgacctgtgtggaggggatgaacctgcccttgttggaacaagccatccgggagcagagactgtacaagcaggagcggggcggcagccagtaggaaacagcagcctagcaacaccctcacctgcttcagagcccgaaccctctggagctgcaggagcccgggagagcacagacgcctccccagcgacggccttgtctggagctcgaaagccgaggggcgggtgatgaatccagccccttcccctactttgggattggctcagcaatgagaacccagaaagcatgccataaatccgacagccccaccccaggagactgcaggtggccgagcttgggcgccggggccgtgcttg

SEQ ID NO: 190046 - DNA, 1570 bp, Homo sapiens
  Payload ID: 17529
  Gene Symbol: TEN1-CDK3
  Gene Name: TEN1-CDK3 readthrough (NMD candidate)
  ENST ID: ENST00000448471
  CDS Start-End: 77-994
gcccttcctggccgccatgtgtacccagagcctgggactggctgggctgggcagtgacccaggcagctctgtggccatggatatgttccagaaggtagagaagatcggagagggcacctatggggtggtgtacaaggccaagaacagggagacagggcagctggtggccctgaagaagatcagactggatttggagatggagggggtcccaagcactgccatcagggagatctcgctgctcaaggaactgaagcaccccaacatcgtccgactgctggacgtggtgcacaacgagaggaagctctatctggtgtttgagttcctcagccaggacctgaagaagtacatggactccaccccaggctcagagctccccctgcacctcatcaagagctacctcttccagctgctgcagggggtgagtttctgccactcacatcgggtcatccaccgagacctgaagccccagaacctgctcatcaatgagttgggtgccatcaagctggctgacttcggcctggctcgcgccttcggggtgcccctgcgcacctacacccatgaggtggtgacactgtggtatcgcgcccccgagattctcttgggcagcaagttctataccacagctgtggatatctggagcattggttgcatctttgcagagatggtgactcgaaaagccctgtttcctggtgactctgagattgaccagctctttcgtatctttcgtatgctggggacacccagcgaagacacatggcccggggtcacccagctgcctgactataagggcagcttccctaagtggaccaggaagggactggaagagattgtgcccaatctggagccagagggcagggacctgctcatgcaactcctgcagtatgaccccagccagcggatcacagccaagactgccctggcccacccgtacttctcatcccctgagccctccccagctgcccgccagtatgtgctgcagcgattccgccattgagaatgtcaaggccacactcagatcctttctcgagcagctgctgccccagctgcctcctacccattgccaagagaggatgcatctggggagagcaaagcactaaggaattcagcatcagcctgcagagggctgagtctgggttagtcctgcccgcaggttagcgagatcctgtgttgttttttgggttggacggtgccgtttcaaaatagaggcacagatgctccatgcacgaggggtccccgggcactggaacaagtgccaagttgaaggcagggggcctgccagagctgggtgtgggtattcaggccctcacctgccctgcctgcagggccagaccctgaggaaagggcgccccctgctggtctttttggatttaaaatgtttgggggaagagttgagttccagttcagtcccaagttaaacaggagggagtgagggagaggagagagggcgttccccggatcccaggagagctgggctatgactgcaataaggagttgttccttcacctgagatgtgcttcttttggttcatttctggcttgacaacaataaataaacgtggtatgttcctgag

SEQ ID NO: 190047 - DNA, 7641 bp, Homo sapiens
  Payload ID: 17530
  Gene Symbol: TNC
  Gene Name: tenascin C
  Uniprot ID: P24821
  ENST ID: ENST00000350763
  CDS Start-End: 413-7018
aattcgccaactgaaaaagtgggaaaggatgtctggaggcgaggcgtcccattacagaggaaggagctcgctatataagccagccaaagttggctgcaccggccacagcctgcctactgtcacccgcctctcccgcgcgcagatacacgcccccgcctccgtgggcacaaaggcagcgctgctggggaactcgggggaacgcgcacgtgggaaccgccgcagctccacactccaggtacttcttccaaggacctaggtctctcgcccatcggaaagaaaataattctttcaagaagatcagggacaactgatttgaagtctactctgtgcttctaaatccccaattctgctgaaagtgagataccctagagccctagagccccagcagcacccagccaaacccacctccaccatgggggccatgactcagctgttggcaggtgtctttcttgctttccttgccctcgctaccgaaggtggggtcctcaagaaagtcatccggcacaagcgacagagtggggtgaacgccaccctgccagaagagaaccagccagtggtgtttaaccacgtttacaacatcaagctgccagtgggatcccagtgttcggtggatctggagtcagccagtggggagaaagacctggcaccgccttcagagcccagcgaaagctttcaggagcacacagtggatggggaaaaccagattgtcttcacacatcgcatcaacatcccccgccgggcctgtggctgtgccgcagcccctgatgttaaggagctgctgagcagactggaggagctggagaacctggtgtcttccctgagggagcaatgtactgcaggagcaggctgctgtctccagcctgccacaggccgcttggacaccaggcccttctgtagcggtcggggcaacttcagcactgaaggatgtggctgtgtctgcgaacctggctggaaaggccccaactgctctgagcccgaatgtccaggcaactgtcaccttcgaggccggtgcattgatgggcagtgcatctgtgacgacggcttcacgggcgaggactgcagccagctggcttgccccagcgactgcaatgaccagggcaagtgcgtaaatggagtctgcatctgtttcgaaggctacgccggggctgactgcagccgtgaaatctgcccagtgccctgcagtgaggagcacggcacatgtgtagatggcttgtgtgtgtgccacgatggctttgcaggcgatgactgcaacaagcctctgtgtctcaacaattgctacaaccgtggacgatgcgtggagaatgagtgcgtgtgtgatgagggtttcacgggcgaagactgcagtgagctcatctgccccaatgactgcttcgaccggggccgctgcatcaatggcacctgctactgcgaagaaggcttcacaggtgaagactgcgggaaacccacctgcccacatgcctgccacacccagggccggtgtgaggaggggcagtgtgtatgtgatgagggctttgccggtgtggactgcagcgagaagaggtgtcctgctgactgtcacaatcgtggccgctgtgtagacgggcggtgtgagtgtgatgatggtttcactggagctgactgtggggagctcaagtgtcccaatggctgcagtggccatggccgctgtgtcaatgggcagtgtgtgtgtgatgagggctatactggggaggactgcagccagctacggtgccccaatgactgtcacagtcggggccgctgtgtcgagggcaaatgtgtatgtgagcaaggcttcaagggctatgactgcagtgacatgagctgccctaatgactgtcaccagcacggccgctgtgtgaatggcatgtgtgtttgtgatgacggctacacaggggaagactgccgggatcgccaatgccccagggactgcagcaacaggggcctctgtgtggacggacagtgcgtctgtgaggacggcttcaccggccctgactgtgcagaactctcctgtccaaatgactgccatggccagggtcgctgtgtgaatgggcagtgcgtgtgccatgaaggatttatgggcaaagactgcaaggagcaaagatgtcccagtgactgtcatggccagggccgctgcgtggacggccagtgcatctgccacgagggcttcacaggcctggactgtggccagcactcctgccccagtgactgcaacaacttaggacaatgcgtctcgggccgctgcatctgcaacgagggctacagcggagaagactgctcagaggtgtctcctcccaaagacctcgttgtgacagaagtgacggaagagacggtcaacctggcctgggacaatgagatgcgggtcacagagtaccttgtcgtgtacacgcccacccacgagggtggtctggaaatgcagttccgtgtgcctggggaccagacgtccaccatcatccaggagctggagcctggtgtggagtactttatccgtgtatttgccatcctggagaacaagaagagcattcctgtcagcgccagggtggccacgtacttacctgcacctgaaggcctgaaattcaagtccatcaaggagacatctgtggaagtggagtgggatcctctagacattgcttttgaaacctgggagatcatcttccggaatatgaataaagaagatgagggagagatcaccaaaagcctgaggaggccagagacctcttaccggcaaactggtctagctcctgggcaagagtatgagatatctctgcacatagtgaaaaacaatacccggggccctggcctgaagagggtgaccaccacacgcttggatgcccccagccagatcgaggtgaaagatgtcacagacaccactgccttgatcacctggttcaagcccctggctgagatcgatggcattgagctgacctacggcatcaaagacgtgccaggagaccgtaccaccatcgatctcacagaggacgagaaccagtactccatcgggaacctgaagcctgacactgagtacgaggtgtccctcatctcccgcagaggtgacatgtcaagcaacccagccaaagagaccttcacaacaggcctcgatgctcccaggaatcttcgacgtgtttcccagacagataacagcatcaccctggaatggaggaatggcaaggcagctattgacagttacagaattaagtatgcccccatctctggaggggaccacgctgaggttgatgttccaaagagccaacaagccacaaccaaaaccacactcacaggtctgaggccgggaactgaatatgggattggagtttctgctgtgaaggaagacaaggagagcaatccagcgaccatcaacgcagccacagagttggacacgcccaaggaccttcaggtttctgaaactgcagagaccagcctgaccctgctctggaagacaccgttggccaaatttgaccgctaccgcctcaattacagtctccccacaggccagtgggtgggagtgcagcttccaagaaacaccacttcctatgtcctgagaggcctggaaccaggacaggagtacaatgtcctcctgacagccgagaaaggcagacacaagagcaagcccgcacgtgtgaaggcatccactgaacaagcccctgagctggaaaacctcaccgtgactgaggttggctgggatggcctcagactcaactggaccgcagctgaccaggcctatgagcactttatcattcaggtgcaggaggccaacaaggtggaggcagctcggaacctcaccgtgcctggcagccttcgggctgtggacataccgggcctcaaggctgctacgccttatacagtctccatctatggggtgatccagggctatagaacaccagtgctctctgctgaggcctccacaggggaaactcccaatttgggagaggtcgtggtggccgaggtgggctgggatgccctcaaactcaactggactgctccagaaggggcctatgagtactttttcattcaggtgcaggaggctgacacagtagaggcagcccagaacctcaccgtcccaggaggactgaggtccacagacctgcctgggctcaaagcagccactcattataccatcaccatccgcggggtcactcaggacttcagcacaacccctctctctgttgaagtcttgacagaggaggttccagatatgggaaacctcacagtgaccgaggttagctgggatgctctcagactgaactggaccacgccagatggaacctatgaccagtttactattcaggtccaggaggctgaccaggtggaagaggctcacaatctcacggttcctggcagcctgcgttccatggaaatcccaggcctcagggctggcactccttacacagtcaccctgcacggcgaggtcaggggccacagcactcgaccccttgctgtagaggtcgtcacagaggatctcccacagctgggagatttagccgtgtctgaggttggctgggatggcctcagactcaactggaccgcagctgacaatgcctatgagcactttgtcattcaggtgcaggaggtcaacaaagtggaggcagcccagaacctcacgttgcctggcagcctcagggctgtggacatcccgggcctcgaggctgccacgccttatagagtctccatctatggggtgatccggggctatagaacaccagtactctctgctgaggcctccacagccaaagaacctgaaattggaaacttaaatgtttctgacataactcccgagagcttcaatctctcctggatggctaccgatgggatcttcgagacctttaccattgaaattattgattccaataggttgctggagactgtggaatataatatctctggtgctgaacgaactgcccatatctcagggctaccccctagtactgattttattgtctacctctctggacttgctcccagcatccggaccaaaaccatcagtgccacagccacgacagaggccctgccccttctggaaaacctaaccatttccgacattaatccctacgggttcacagtttcctggatggcatcggagaatgcctttgacagctttctagtaacggtggtggattctgggaagctgctggacccccaggaattcacactttcaggaacccagaggaagctggagcttagaggcctcataactggcattggctatgaggttatggtctctggcttcacccaagggcatcaaaccaagcccttgagggctgagattgttacagaagccgaaccggaagttgacaaccttctggtttcagatgccaccccagacggtttccgtctgtcctggacagctgatgaaggggtcttcgacaattttgttctcaaaatcagagataccaaaaagcagtctgagccactggaaataaccctacttgcccccgaacgtaccagggacataacaggtctcagagaggctactgaatacgaaattgaactctatggaataagcaaaggaaggcgatcccagacagtcagtgctatagcaacaacagccatgggctccccaaaggaagtcattttctcagacatcactgaaaattcggctactgtcagctggagggcacccacagcccaagtggagagcttccggattacctatgtgcccattacaggaggtacaccctccatggtaactgtggacggaaccaagactcagaccaggctggtgaaactcatacctggcgtggagtaccttgtcagcatcatcgccatgaagggctttgaggaaagtgaacctgtctcagggtcattcaccacagctctggatggcccatctggcctggtgacagccaacatcactgactcagaagccttggccaggtggcagccagccattgccactgtggacagttatgtcatctcctacacaggcgagaaagtgccagaaattacacgcacggtgtccgggaacacagtggagtatgctctgaccgacctcgagcctgccacggaatacacactgagaatctttgcagagaaagggccccagaagagctcaaccatcactgccaagttcacaacagacctcgattctccaagagacttgactgctactgaggttcagtcggaaactgccctccttacctggcgacccccccgggcatcagtcaccggttacctgctggtctatgaatcagtggatggcacagtcaaggaagtcattgtgggtccagataccacctcctacagcctggcagacctgagcccatccacccactacacagccaagatccaggcactcaatgggcccctgaggagcaatatgatccagaccatcttcaccacaattggactcctgtaccccttccccaaggactgctcccaagcaatgctgaatggagacacgacctctggcctctacaccatttatctgaatggtgataaggctgaggcgctggaagtcttctgtgacatgacctctgatgggggtggatggattgtgttcctgagacgcaaaaacggacgcgagaacttctaccaaaactggaaggcatatgctgctggatttggggaccgcagagaagaattctggcttgggctggacaacctgaacaaaatcacagcccaggggcagtacgagctccgggtggacctgcgggaccatggggagacagcctttgctgtctatgacaagttcagcgtgggagatgccaagactcgctacaagctgaaggtggaggggtacagtgggacagcaggtgactccatggcctaccacaatggcagatccttctccacctttgacaaggacacagattcagccatcaccaactgtgctctgtcctacaaaggggctttctggtacaggaactgtcaccgtgtcaacctgatggggagatatggggacaataaccacagtcagggcgttaactggttccactggaagggccacgaacactcaatccagtttgctgagatgaagctgagaccaagcaacttcagaaatcttgaaggcaggcgcaaacgggcataaattccagggaccactgggtgagagaggaataaggcccagagcgaggaaaggattttaccaaagcatcaatacaaccagcccaaccatcggtccacacctgggcatttggtgagagtcaaagctgaccatggatccctggggccaacggcaacagcatgggcctcacctcctctgtgatttctttctttgcaccaaagacatcagtctccaacatgtttctgttttgttgtttgattcagcaaaaatctcccagtgacaacatcgcaatagttttttacttctcttaggtggctctgggaatgggagaggggtaggatgtacaggggtagtttgttttagaaccagccgtattttacatgaagctgtataattaattgtcattatttttgttagcaaagattaaatgtgtcattggaagccatccctttttttacatttcatacaacagaaaccagaaaagcaatactgtttccattttaaggatatgattaatattattaatataataatgatgatgatgatgatgaaaactaaggatttttcaagagatctttctttccaaaacatttctggacagtacctgattgtattttttttttaaataaaagcacaagtacttttga

SEQ ID NO: 190048 - DNA, 6786 bp, Homo sapiens
  Payload ID: 17530
  Gene Symbol: TNC
  Gene Name: tenascin C
  ENST ID: ENST00000341037
  CDS Start-End: 130-6189
ttctttcaagaagatcagggacaactgatttgaagtctactctgtgcttctaaatccccaattctgctgaaagtgagataccctagagccctagagccccagcagcacccagccaaacccacctccaccatgggggccatgactcagctgttggcaggtgtctttcttgctttccttgccctcgctaccgaaggtggggtcctcaagaaagtcatccggcacaagcgacagagtggggtgaacgccaccctgccagaagagaaccagccagtggtgtttaaccacgtttacaacatcaagctgccagtgggatcccagtgttcggtggatctggagtcagccagtggggagaaagacctggcaccgccttcagagcccagcgaaagctttcaggagcacacagtggatggggaaaaccagattgtcttcacacatcgcatcaacatcccccgccgggcctgtggctgtgccgcagcccctgatgttaaggagctgctgagcagactggaggagctggagaacctggtgtcttccctgagggagcaatgtactgcaggagcaggctgctgtctccagcctgccacaggccgcttggacaccaggcccttctgtagcggtcggggcaacttcagcactgaaggatgtggctgtgtctgcgaacctggctggaaaggccccaactgctctgagcccgaatgtccaggcaactgtcaccttcgaggccggtgcattgatgggcagtgcatctgtgacgacggcttcacgggcgaggactgcagccagctggcttgccccagcgactgcaatgaccagggcaagtgcgtaaatggagtctgcatctgtttcgaaggctacgccggggctgactgcagccgtgaaatctgcccagtgccctgcagtgaggagcacggcacatgtgtagatggcttgtgtgtgtgccacgatggctttgcaggcgatgactgcaacaagcctctgtgtctcaacaattgctacaaccgtggacgatgcgtggagaatgagtgcgtgtgtgatgagggtttcacgggcgaagactgcagtgagctcatctgccccaatgactgcttcgaccggggccgctgcatcaatggcacctgctactgcgaagaaggcttcacaggtgaagactgcgggaaacccacctgcccacatgcctgccacacccagggccggtgtgaggaggggcagtgtgtatgtgatgagggctttgccggtgtggactgcagcgagaagaggtgtcctgctgactgtcacaatcgtggccgctgtgtagacgggcggtgtgagtgtgatgatggtttcactggagctgactgtggggagctcaagtgtcccaatggctgcagtggccatggccgctgtgtcaatgggcagtgtgtgtgtgatgagggctatactggggaggactgcagccagctacggtgccccaatgactgtcacagtcggggccgctgtgtcgagggcaaatgtgtatgtgagcaaggcttcaagggctatgactgcagtgacatgagctgccctaatgactgtcaccagcacggccgctgtgtgaatggcatgtgtgtttgtgatgacggctacacaggggaagactgccgggatcgccaatgccccagggactgcagcaacaggggcctctgtgtggacggacagtgcgtctgtgaggacggcttcaccggccctgactgtgcagaactctcctgtccaaatgactgccatggccagggtcgctgtgtgaatgggcagtgcgtgtgccatgaaggatttatgggcaaagactgcaaggagcaaagatgtcccagtgactgtcatggccagggccgctgcgtggacggccagtgcatctgccacgagggcttcacaggcctggactgtggccagcactcctgccccagtgactgcaacaacttaggacaatgcgtctcgggccgctgcatctgcaacgagggctacagcggagaagactgctcagaggtgtctcctcccaaagacctcgttgtgacagaagtgacggaagagacggtcaacctggcctgggacaatgagatgcgggtcacagagtaccttgtcgtgtacacgcccacccacgagggtggtctggaaatgcagttccgtgtgcctggggaccagacgtccaccatcatccaggagctggagcctggtgtggagtactttatccgtgtatttgccatcctggagaacaagaagagcattcctgtcagcgccagggtggccacgtacttacctgcacctgaaggcctgaaattcaagtccatcaaggagacatctgtggaagtggagtgggatcctctagacattgcttttgaaacctgggagatcatcttccggaatatgaataaagaagatgagggagagatcaccaaaagcctgaggaggccagagacctcttaccggcaaactggtctagctcctgggcaagagtatgagatatctctgcacatagtgaaaaacaatacccggggccctggcctgaagagggtgaccaccacacgcttggatgcccccagccagatcgaggtgaaagatgtcacagacaccactgccttgatcacctggttcaagcccctggctgagatcgatggcattgagctgacctacggcatcaaagacgtgccaggagaccgtaccaccatcgatctcacagaggacgagaaccagtactccatcgggaacctgaagcctgacactgagtacgaggtgtccctcatctcccgcagaggtgacatgtcaagcaacccagccaaagagaccttcacaacaggcctcgatgctcccaggaatcttcgacgtgtttcccagacagataacagcatcaccctggaatggaggaatggcaaggcagctattgacagttacagaattaagtatgcccccatctctggaggggaccacgctgaggttgatgttccaaagagccaacaagccacaaccaaaaccacactcacaggtctgaggccgggaactgaatatgggattggagtttctgctgtgaaggaagacaaggagagcaatccagcgaccatcaacgcagccacagagttggacacgcccaaggaccttcaggtttctgaaactgcagagaccagcctgaccctgctctggaagacaccgttggccaaatttgaccgctaccgcctcaattacagtctccccacaggccagtgggtgggagtgcagcttccaagaaacaccacttcctatgtcctgagaggcctggaaccaggacaggagtacaatgtcctcctgacagccgagaaaggcagacacaagagcaagcccgcacgtgtgaaggcatccactgaacaagcccctgagctggaaaacctcaccgtgactgaggttggctgggatggcctcagactcaactggaccgcagctgaccaggcctatgagcactttatcattcaggtgcaggaggccaacaaggtggaggcagctcggaacctcaccgtgcctggcagccttcgggctgtggacataccgggcctcaaggctgctacgccttatacagtctccatctatggggtgatccagggctatagaacaccagtgctctctgctgaggcctccacaggggaaactcccaatttgggagaggtcgtggtggccgaggtgggctgggatgccctcaaactcaactggactgctccagaaggggcctatgagtactttttcattcaggtgcaggaggctgacacagtagaggcagcccagaacctcaccgtcccaggaggactgaggtccacagacctgcctgggctcaaagcagccactcattataccatcaccatccgcggggtcactcaggacttcagcacaacccctctctctgttgaagtcttgacagaggatctcccacagctgggagatttagccgtgtctgaggttggctgggatggcctcagactcaactggaccgcagctgacaatgcctatgagcactttgtcattcaggtgcaggaggtcaacaaagtggaggcagcccagaacctcacgttgcctggcagcctcagggctgtggacatcccgggcctcgaggctgccacgccttatagagtctccatctatggggtgatccggggctatagaacaccagtactctctgctgaggcctccacagccaaagaacctgaaattggaaacttaaatgtttctgacataactcccgagagcttcaatctctcctggatggctaccgatgggatcttcgagacctttaccattgaaattattgattccaataggttgctggagactgtggaatataatatctctggtgctgaacgaactgcccatatctcagggctaccccctagtactgattttattgtctacctctctggacttgctcccagcatccggaccaaaaccatcagtgccacagccacgacagaagccgaaccggaagttgacaaccttctggtttcagatgccaccccagacggtttccgtctgtcctggacagctgatgaaggggtcttcgacaattttgttctcaaaatcagagataccaaaaagcagtctgagccactggaaataaccctacttgcccccgaacgtaccagggacataacaggtctcagagaggctactgaatacgaaattgaactctatggaataagcaaaggaaggcgatcccagacagtcagtgctatagcaacaacagccatgggctccccaaaggaagtcattttctcagacatcactgaaaattcggctactgtcagctggagggcacccacagcccaagtggagagcttccggattacctatgtgcccattacaggaggtacaccctccatggtaactgtggacggaaccaagactcagaccaggctggtgaaactcatacctggcgtggagtaccttgtcagcatcatcgccatgaagggctttgaggaaagtgaacctgtctcagggtcattcaccacagctctggatggcccatctggcctggtgacagccaacatcactgactcagaagccttggccaggtggcagccagccattgccactgtggacagttatgtcatctcctacacaggcgagaaagtgccagaaattacacgcacggtgtccgggaacacagtggagtatgctctgaccgacctcgagcctgccacggaatacacactgagaatctttgcagagaaagggccccagaagagctcaaccatcactgccaagttcacaacagacctcgattctccaagagacttgactgctactgaggttcagtcggaaactgccctccttacctggcgacccccccgggcatcagtcaccggttacctgctggtctatgaatcagtggatggcacagtcaaggaagtcattgtgggtccagataccacctcctacagcctggcagacctgagcccatccacccactacacagccaagatccaggcactcaatgggcccctgaggagcaatatgatccagaccatcttcaccacaattggactcctgtaccccttccccaaggactgctcccaagcaatgctgaatggagacacgacctctggcctctacaccatttatctgaatggtgataaggctgaggcgctggaagtcttctgtgacatgacctctgatgggggtggatggattgtgttcctgagacgcaaaaacggacgcgagaacttctaccaaaactggaaggcatatgctgctggatttggggaccgcagagaagaattctggcttgggctggacaacctgaacaaaatcacagcccaggggcagtacgagctccgggtggacctgcgggaccatggggagacagcctttgctgtctatgacaagttcagcgtgggagatgccaagactcgctacaagctgaaggtggaggggtacagtgggacagcaggtgactccatggcctaccacaatggcagatccttctccacctttgacaaggacacagattcagccatcaccaactgtgctctgtcctacaaaggggctttctggtacaggaactgtcaccgtgtcaacctgatggggagatatggggacaataaccacagtcagggcgttaactggttccactggaagggccacgaacactcaatccagtttgctgagatgaagctgagaccaagcaacttcagaaatcttgaaggcaggcgcaaacgggcataaattccagggaccactgggtgagagaggaataaggcccagagcgaggaaaggattttaccaaagcatcaatacaaccagcccaaccatcggtccacacctgggcatttggtgagagtcaaagctgaccatggatccctggggccaacggcaacagcatgggcctcacctcctctgtgatttctttctttgcaccaaagacatcagtctccaacatgtttctgttttgttgtttgattcagcaaaaatctcccagtgacaacatcgcaatagttttttacttctcttaggtggctctgggaatgggagaggggtaggatgtacaggggtagtttgttttagaaccagccgtattttacatgaagctgtataattaattgtcattatttttgttagcaaagattaaatgtgtcattggaagccatccctttttttacatttcatacaacagaaaccagaaaagcaatactgtttccattttaaggatatgattaatattattaatataataatgatgatgatgatgatgaaaactaaggatttttcaagagatctttctttccaaaacatttctggacagtacctgattgtatttttttt

SEQ ID NO: 190049 - DNA, 6281 bp, Homo sapiens
  Payload ID: 17530
  Gene Symbol: TNC
  Gene Name: tenascin C
  ENST ID: ENST00000423613
  CDS Start-End: 284-6070
gtctgctggagttcattttccccaaaaacggacccaccatgggcagacgcaccattagcacagtccccaaaggagatgcccaggactgtgggatggtcttgtgaaggtcgatgcacagatattgcagaggaatgctttaacttctagaaaataattctttcaagaagatcagggacaactgatttgaagtctactctgtgcttctaaatccccaattctgctgaaagtgagataccctagagccctagagccccagcagcacccagccaaacccacctccaccatgggggccatgactcagctgttggcaggtgtctttcttgctttccttgccctcgctaccgaaggtggggtcctcaagaaagtcatccggcacaagcgacagagtggggtgaacgccaccctgccagaagagaaccagccagtggtgtttaaccacgtttacaacatcaagctgccagtgggatcccagtgttcggtggatctggagtcagccagtggggagaaagacctggcaccgccttcagagcccagcgaaagctttcaggagcacacagtggatggggaaaaccagattgtcttcacacatcgcatcaacatcccccgccgggcctgtggctgtgccgcagcccctgatgttaaggagctgctgagcagactggaggagctggagaacctggtgtcttccctgagggagcaatgtactgcaggagcaggctgctgtctccagcctgccacaggccgcttggacaccaggcccttctgtagcggtcggggcaacttcagcactgaaggatgtggctgtgtctgcgaacctggctggaaaggccccaactgctctgagcccgaatgtccaggcaactgtcaccttcgaggccggtgcattgatgggcagtgcatctgtgacgacggcttcacgggcgaggactgcagccagctggcttgccccagcgactgcaatgaccagggcaagtgcgtaaatggagtctgcatctgtttcgaaggctacgccggggctgactgcagccgtgaaatctgcccagtgccctgcagtgaggagcacggcacatgtgtagatggcttgtgtgtgtgccacgatggctttgcaggcgatgactgcaacaagcctctgtgtctcaacaattgctacaaccgtggacgatgcgtggagaatgagtgcgtgtgtgatgagggtttcacgggcgaagactgcagtgagctcatctgccccaatgactgcttcgaccggggccgctgcatcaatggcacctgctactgcgaagaaggcttcacaggtgaagactgcgggaaacccacctgcccacatgcctgccacacccagggccggtgtgaggaggggcagtgtgtatgtgatgagggctttgccggtgtggactgcagcgagaagaggtgtcctgctgactgtcacaatcgtggccgctgtgtagacgggcggtgtgagtgtgatgatggtttcactggagctgactgtggggagctcaagtgtcccaatggctgcagtggccatggccgctgtgtcaatgggcagtgtgtgtgtgatgagggctatactggggaggactgcagccagctacggtgccccaatgactgtcacagtcggggccgctgtgtcgagggcaaatgtgtatgtgagcaaggcttcaagggctatgactgcagtgacatgagctgccctaatgactgtcaccagcacggccgctgtgtgaatggcatgtgtgtttgtgatgacggctacacaggggaagactgccgggatcgccaatgccccagggactgcagcaacaggggcctctgtgtggacggacagtgcgtctgtgaggacggcttcaccggccctgactgtgcagaactctcctgtccaaatgactgccatggccagggtcgctgtgtgaatgggcagtgcgtgtgccatgaaggatttatgggcaaagactgcaaggagcaaagatgtcccagtgactgtcatggccagggccgctgcgtggacggccagtgcatctgccacgagggcttcacaggcctggactgtggccagcactcctgccccagtgactgcaacaacttaggacaatgcgtctcgggccgctgcatctgcaacgagggctacagcggagaagactgctcagaggtgtctcctcccaaagacctcgttgtgacagaagtgacggaagagacggtcaacctggcctgggacaatgagatgcgggtcacagagtaccttgtcgtgtacacgcccacccacgagggtggtctggaaatgcagttccgtgtgcctggggaccagacgtccaccatcatccaggagctggagcctggtgtggagtactttatccgtgtatttgccatcctggagaacaagaagagcattcctgtcagcgccagggtggccacgtacttacctgcacctgaaggcctgaaattcaagtccatcaaggagacatctgtggaagtggagtgggatcctctagacattgcttttgaaacctgggagatcatcttccggaatatgaataaagaagatgagggagagatcaccaaaagcctgaggaggccagagacctcttaccggcaaactggtctagctcctgggcaagagtatgagatatctctgcacatagtgaaaaacaatacccggggccctggcctgaagagggtgaccaccacacgcttggatgcccccagccagatcgaggtgaaagatgtcacagacaccactgccttgatcacctggttcaagcccctggctgagatcgatggcattgagctgacctacggcatcaaagacgtgccaggagaccgtaccaccatcgatctcacagaggacgagaaccagtactccatcgggaacctgaagcctgacactgagtacgaggtgtccctcatctcccgcagaggtgacatgtcaagcaacccagccaaagagaccttcacaacaggcctcgatgctcccaggaatcttcgacgtgtttcccagacagataacagcatcaccctggaatggaggaatggcaaggcagctattgacagttacagaattaagtatgcccccatctctggaggggaccacgctgaggttgatgttccaaagagccaacaagccacaaccaaaaccacactcacaggtctgaggccgggaactgaatatgggattggagtttctgctgtgaaggaagacaaggagagcaatccagcgaccatcaacgcagccacagagttggacacgcccaaggaccttcaggtttctgaaactgcagagaccagcctgaccctgctctggaagacaccgttggccaaatttgaccgctaccgcctcaattacagtctccccacaggccagtgggtgggagtgcagcttccaagaaacaccacttcctatgtcctgagaggcctggaaccaggacaggagtacaatgtcctcctgacagccgagaaaggcagacacaagagcaagcccgcacgtgtgaaggcatccactgaacaagcccctgagctggaaaacctcaccgtgactgaggttggctgggatggcctcagactcaactggaccgcagctgaccaggcctatgagcactttatcattcaggtgcaggaggccaacaaggtggaggcagctcggaacctcaccgtgcctggcagccttcgggctgtggacataccgggcctcaaggctgctacgccttatacagtctccatctatggggtgatccagggctatagaacaccagtgctctctgctgaggcctccacaggggaaactcccaatttgggagaggtcgtggtggccgaggtgggctgggatgccctcaaactcaactggactgctccagaaggggcctatgagtactttttcattcaggtgcaggaggctgacacagtagaggcagcccagaacctcaccgtcccaggaggactgaggtccacagacctgcctgggctcaaagcagccactcattataccatcaccatccgcggggtcactcaggacttcagcacaacccctctctctgttgaagtcttgacagaggaggttccagatatgggaaacctcacagtgaccgaggttagctgggatgctctcagactgaactggaccacgccagatggaacctatgaccagtttactattcaggtccaggaggctgaccaggtggaagaggctcacaatctcacggttcctggcagcctgcgttccatggaaatcccaggcctcagggctggcactccttacacagtcaccctgcacggcgaggtcaggggccacagcactcgaccccttgctgtagaggtcgtcacagaggatctcccacagctgggagatttagccgtgtctgaggttggctgggatggcctcagactcaactggaccgcagctgacaatgcctatgagcactttgtcattcaggtgcaggaggtcaacaaagtggaggcagcccagaacctcacgttgcctggcagcctcagggctgtggacatcccgggcctcgaggctgccacgccttatagagtctccatctatggggtgatccggggctatagaacaccagtactctctgctgaggcctccacagccatgggctccccaaaggaagtcattttctcagacatcactgaaaattcggctactgtcagctggagggcacccacagcccaagtggagagcttccggattacctatgtgcccattacaggaggtacaccctccatggtaactgtggacggaaccaagactcagaccaggctggtgaaactcatacctggcgtggagtaccttgtcagcatcatcgccatgaagggctttgaggaaagtgaacctgtctcagggtcattcaccacagctctggatggcccatctggcctggtgacagccaacatcactgactcagaagccttggccaggtggcagccagccattgccactgtggacagttatgtcatctcctacacaggcgagaaagtgccagaaattacacgcacggtgtccgggaacacagtggagtatgctctgaccgacctcgagcctgccacggaatacacactgagaatctttgcagagaaagggccccagaagagctcaaccatcactgccaagttcacaacagacctcgattctccaagagacttgactgctactgaggttcagtcggaaactgccctccttacctggcgacccccccgggcatcagtcaccggttacctgctggtctatgaatcagtggatggcacagtcaaggaagtcattgtgggtccagataccacctcctacagcctggcagacctgagcccatccacccactacacagccaagatccaggcactcaatgggcccctgaggagcaatatgatccagaccatcttcaccacaattggactcctgtaccccttccccaaggactgctcccaagcaatgctgaatggagacacgacctctggcctctacaccatttatctgaatggtgataaggctgaggcgctggaagtcttctgtgacatgacctctgatgggggtggatggattgtgttcctgagacgcaaaaacggacgcgagaacttctaccaaaactggaaggcatatgctgctggatttggggaccgcagagaagaattctggcttgggctggacaacctgaacaaaatcacagcccaggggcagtacgagctccgggtggacctgcgggaccatggggagacagcctttgctgtctatgacaagttcagcgtgggagatgccaagactcgctacaagctgaaggtggaggggtacagtgggacagcaggtgactccatggcctaccacaatggcagatccttctccacctttgacaaggacacagattcagccatcaccaactgtgctctgtcctacaaaggggctttctggtacaggaactgtcaccgtgtcaacctgatggggagatatggggacaataaccacagtcagggcgttaactggttccactggaagggccacgaacactcaatccagtttgctgagatgaagctgagaccaagcaacttcagaaatcttgaaggcaggcgcaaacgggcataaattccagggaccactgggtgagagaggaataaggcccagagcgaggaaaggattttaccaaagcatcaatacaaccagcccaaccatcggtccacacctgggcatttggtgagagtcaaagctgaccatggatccctggggccaacggcaacagcatgggcctcacctcctctgtgatttctttctttgcaccaaagacatcagtctccaa

SEQ ID NO: 190050 - DNA, 7508 bp, Homo sapiens
  Payload ID: 17530
  Gene Symbol: TNC
  Gene Name: tenascin C
  ENST ID: ENST00000535648
  CDS Start-End: 413-5929
aattcgccaactgaaaaagtgggaaaggatgtctggaggcgaggcgtcccattacagaggaaggagctcgctatataagccagccaaagttggctgcaccggccacagcctgcctactgtcacccgcctctcccgcgcgcagatacacgcccccgcctccgtgggcacaaaggcagcgctgctggggaactcgggggaacgcgcacgtgggaaccgccgcagctccacactccaggtacttcttccaaggacctaggtctctcgcccatcggaaagaaaataattctttcaagaagatcagggacaactgatttgaagtctactctgtgcttctaaatccccaattctgctgaaagtgagataccctagagccctagagccccagcagcacccagccaaacccacctccaccatgggggccatgactcagctgttggcaggtgtctttcttgctttccttgccctcgctaccgaaggtggggtcctcaagaaagtcatccggcacaagcgacagagtggggtgaacgccaccctgccagaagagaaccagccagtggtgtttaaccacgtttacaacatcaagctgccagtgggatcccagtgttcggtggatctggagtcagccagtggggagaaagacctggcaccgccttcagagcccagcgaaagctttcaggagcacacagtggatggggaaaaccagattgtcttcacacatcgcatcaacatcccccgccgggcctgtggctgtgccgcagcccctgatgttaaggagctgctgagcagactggaggagctggagaacctggtgtcttccctgagggagcaatgtactgcaggagcaggctgctgtctccagcctgccacaggccgcttggacaccaggcccttctgtagcggtcggggcaacttcagcactgaaggatgtggctgtgtctgcgaacctggctggaaaggccccaactgctctgagcccgaatgtccaggcaactgtcaccttcgaggccggtgcattgatgggcagtgcatctgtgacgacggcttcacgggcgaggactgcagccagctggcttgccccagcgactgcaatgaccagggcaagtgcgtaaatggagtctgcatctgtttcgaaggctacgccggggctgactgcagccgtgaaatctgcccagtgccctgcagtgaggagcacggcacatgtgtagatggcttgtgtgtgtgccacgatggctttgcaggcgatgactgcaacaagcctctgtgtctcaacaattgctacaaccgtggacgatgcgtggagaatgagtgcgtgtgtgatgagggtttcacgggcgaagactgcagtgagctcatctgccccaatgactgcttcgaccggggccgctgcatcaatggcacctgctactgcgaagaaggcttcacaggtgaagactgcgggaaacccacctgcccacatgcctgccacacccagggccggtgtgaggaggggcagtgtgtatgtgatgagggctttgccggtgtggactgcagcgagaagaggtgtcctgctgactgtcacaatcgtggccgctgtgtagacgggcggtgtgagtgtgatgatggtttcactggagctgactgtggggagctcaagtgtcccaatggctgcagtggccatggccgctgtgtcaatgggcagtgtgtgtgtgatgagggctatactggggaggactgcagccagctacggtgccccaatgactgtcacagtcggggccgctgtgtcgagggcaaatgtgtatgtgagcaaggcttcaagggctatgactgcagtgacatgagctgccctaatgactgtcaccagcacggccgctgtgtgaatggcatgtgtgtttgtgatgacggctacacaggggaagactgccgggatcgccaatgccccagggactgcagcaacaggggcctctgtgtggacggacagtgcgtctgtgaggacggcttcaccggccctgactgtgcagaactctcctgtccaaatgactgccatggccagggtcgctgtgtgaatgggcagtgcgtgtgccatgaaggatttatgggcaaagactgcaaggagcaaagatgtcccagtgactgtcatggccagggccgctgcgtggacggccagtgcatctgccacgagggcttcacaggcctggactgtggccagcactcctgccccagtgactgcaacaacttaggacaatgcgtctcgggccgctgcatctgcaacgagggctacagcggagaagactgctcagaggtgtctcctcccaaagacctcgttgtgacagaagtgacggaagagacggtcaacctggcctgggacaatgagatgcgggtcacagagtaccttgtcgtgtacacgcccacccacgagggtggtctggaaatgcagttccgtgtgcctggggaccagacgtccaccatcatccaggagctggagcctggtgtggagtactttatccgtgtatttgccatcctggagaacaagaagagcattcctgtcagcgccagggtggccacgtacttacctgcacctgaaggcctgaaattcaagtccatcaaggagacatctgtggaagtggagtgggatcctctagacattgcttttgaaacctgggagatcatcttccggaatatgaataaagaagatgagggagagatcaccaaaagcctgaggaggccagagacctcttaccggcaaactggtctagctcctgggcaagagtatgagatatctctgcacatagtgaaaaacaatacccggggccctggcctgaagagggtgaccaccacacgcttggatgcccccagccagatcgaggtgaaagatgtcacagacaccactgccttgatcacctggttcaagcccctggctgagatcgatggcattgagctgacctacggcatcaaagacgtgccaggagaccgtaccaccatcgatctcacagaggacgagaaccagtactccatcgggaacctgaagcctgacactgagtacgaggtgtccctcatctcccgcagaggtgacatgtcaagcaacccagccaaagagaccttcacaacaggcctcgatgctcccaggaatcttcgacgtgtttcccagacagataacagcatcaccctggaatggaggaatggcaaggcagctattgacagttacagaattaagtatgcccccatctctggaggggaccacgctgaggttgatgttccaaagagccaacaagccacaaccaaaaccacactcacaggtctgaggccgggaactgaatatgggattggagtttctgctgtgaaggaagacaaggagagcaatccagcgaccatcaacgcagccacagagttggacacgcccaaggaccttcaggtttctgaaactgcagagaccagcctgaccctgctctggaagacaccgttggccaaatttgaccgctaccgcctcaattacagtctccccacaggccagtgggtgggagtgcagcttccaagaaacaccacttcctatgtcctgagaggcctggaaccaggacaggagtacaatgtcctcctgacagccgagaaaggcagacacaagagcaagcccgcacgtgtgaaggcatccactgccaaagaacctgaaattggaaacttaaatgtttctgacataactcccgagagcttcaatctctcctggatggctaccgatgggatcttcgagacctttaccattgaaattattgattccaataggttgctggagactgtggaatataatatctctggtgctgaacgaactgcccatatctcagggctaccccctagtactgattttattgtctacctctctggacttgctcccagcatccggaccaaaaccatcagtgccacagccacgacagaaccaaagccacagttgggcacgctaatctttagcaatattactccaaaaagcttcaacatgtcatggaccactcaagctgggctttttgcaaagattgttatcaatgtgagtgacgctcactcactgcatgagtcccagcaattcacagtctcaggagatgcaaagcaagctcacatcacaggcttggtggagaacactggctatgacgtcagtgtggcaggaaccaccttggctggggatcccaccagacccctcactgcctttgtcattacagaagccgaaccggaagttgacaaccttctggtttcagatgccaccccagacggtttccgtctgtcctggacagctgatgaaggggtcttcgacaattttgttctcaaaatcagagataccaaaaagcagtctgagccactggaaataaccctacttgcccccgaacgtaccagggacataacaggtctcagagaggctactgaatacgaaattgaactctatggaataagcaaaggaaggcgatcccagacagtcagtgctatagcaacaacagccatgggctccccaaaggaagtcattttctcagacatcactgaaaattcggctactgtcagctggagggcacccacagcccaagtggagagcttccggattacctatgtgcccattacaggaggtacaccctccatggtaactgtggacggaaccaagactcagaccaggctggtgaaactcatacctggcgtggagtaccttgtcagcatcatcgccatgaagggctttgaggaaagtgaacctgtctcagggtcattcaccacagctctggatggcccatctggcctggtgacagccaacatcactgactcagaagccttggccaggtggcagccagccattgccactgtggacagttatgtcatctcctacacaggcgagaaagtgccagaaattacacgcacggtgtccgggaacacagtggagtatgctctgaccgacctcgagcctgccacggaatacacactgagaatctttgcagagaaagggccccagaagagctcaaccatcactgccaagttcacaacagacctcgattctccaagagacttgactgctactgaggttcagtcggaaactgccctccttacctggcgacccccccgggcatcagtcaccggttacctgctggtctatgaatcagtggatggcacagtcaaggaagtcattgtgggtccagataccacctcctacagcctggcagacctgagcccatccacccactacacagccaagatccaggcactcaatgggcccctgaggagcaatatgatccagaccatcttcaccacaattggactcctgtaccccttccccaaggactgctcccaagcaatgctgaatggagacacgacctctggcctctacaccatttatctgaatggtgataaggctgaggcgctggaagtcttctgtgacatgacctctgatgggggtggatggattgtgttcctgagacgcaaaaacggacgcgagaacttctaccaaaactggaaggcatatgctgctggatttggggaccgcagagaagaattctggcttgggctggacaacctgaacaaaatcacagcccaggggcagtacgagctccgggtggacctgcgggaccatggggagacagcctttgctgtctatgacaagttcagcgtgggagatgccaagactcgctacaagctgaaggtggaggggtacagtgggacagcaggtgactccatggcctaccacaatggcagatccttctccacctttgacaaggacacagattcagccatcaccaactgtgctctgtcctacaaaggggctttctggtacaggaactgtcaccgtgtcaacctgatggggagatatggggacaataaccacagtcagggcgttaactggttccactggaagggccacgaacactcaatccagtttgctgagatgaagctgagaccaagcaacttcagaaatcttgaaggcaggcgcaaacgggcataaattccagggaccactgggtgagagaggaataaggcccagagcgaggaaaggattttaccaaagcatcaatacaaccagcccaaccatcggtccacacctgggcatttggtgagagtcaaagctgaccatggatccctggggccaacggcaacagcatgggcctcacctcctctgtgatttctttctttgcaccaaagacatcagtctccaacatgtttctgttttgttgtttgattcagcaaaaatctcccagtgacaacatcgcaatagttttttacttctcttaggtggctctgggaatgggagaggggtaggatgtacaggggtagtttgttttagaaccagccgtattttacatgaagctgtataattaattgtcattatttttgttagcaaagattaaatgtgtcattggaagccatccctttttttacatttcatacaacagaaaccagaaaagcaatactgtttccattttaaggatatgattaatattattaatataataatgatgatgatgatgatgaaaactaaggatttttcaagagatctttctttccaaaacatttctggacagtacctgattgtattttttttttaaataaaagcacaagtacttttgagtttgttattttgctttgaattgttgagtctgaatttcaccaaagccaatcatttgaacaaagcggggaatgttgggataggaaaggtaagtagggatagtggtcaagtgggaggggtggaaaggagactaaagactgggagagagggaagcactttttttaaataaagttgaacacacttgggaaaagcttacaggccaggcctgtaatcccaacactttgggaggccaaggtgggaggatagcttaaccccaggagtttgagaccagcctgagcaacatagtgagaacttgtctctacagaaaaaaaaaaaaaaaaaaatttaattaggcaagcgtggtagtgcgcacctgtcgtcccagctactcaggaggctgaggtaggaaaatcactggagcccaggagttagaggttacagtgagctatgatcacactactgcactccagcctgggcaacagagggagaccctgtctctaaataaaaaaagaaaagaaaaaaaaagcttacaacttgagattcagcatcttgctcagtatttccaagactaatagattatggtttaaaagatgcttttatactcattttctaatgcaactcctagaaactctatgatatagttgaggtaagtattgttaccacacatgggctaagatccccagaggcagactgcctgagttcaattcttggctccaccattcccaagttccctaacctctctatgcctcagtttcctcttctgtaaagtagggacactcatacttctcatttcagaacatttttgtgaagaataaattatgttatccatttgaggcccttagaatggtacccggtgtatattaagtgctagtacatgttagctatcatcattatcactttatatgagatggactggggttcatagaaacccaatgacttgattgtggctactactcaataaataatagaatttggattt

SEQ ID NO: 190051 - DNA, 5517 bp, Homo sapiens
  Payload ID: 17530
  Gene Symbol: TNC
  Gene Name: tenascin C
  ENST ID: ENST00000542877
  CDS Start-End: 1-5517
atgggggccatgactcagctgttggcaggtgtctttcttgctttccttgccctcgctaccgaaggtggggtcctcaagaaagtcatccggcacaagcgacagagtggggtgaacgccaccctgccagaagagaaccagccagtggtgtttaaccacgtttacaacatcaagctgccagtgggatcccagtgttcggtggatctggagtcagccagtggggagaaagacctggcaccgccttcagagcccagcgaaagctttcaggagcacacagtggatggggaaaaccagattgtcttcacacatcgcatcaacatcccccgccgggcctgtggctgtgccgcagcccctgatgttaaggagctgctgagcagactggaggagctggagaacctggtgtcttccctgagggagcaatgtactgcaggagcaggctgctgtctccagcctgccacaggccgcttggacaccaggcccttctgtagcggtcggggcaacttcagcactgaaggatgtggctgtgtctgcgaacctggctggaaaggccccaactgctctgagcccgaatgtccaggcaactgtcaccttcgaggccggtgcattgatgggcagtgcatctgtgacgacggcttcacgggcgaggactgcagccagctggcttgccccagcgactgcaatgaccagggcaagtgcgtaaatggagtctgcatctgtttcgaaggctacgccggggctgactgcagccgtgaaatctgcccagtgccctgcagtgaggagcacggcacatgtgtagatggcttgtgtgtgtgccacgatggctttgcaggcgatgactgcaacaagcctctgtgtctcaacaattgctacaaccgtggacgatgcgtggagaatgagtgcgtgtgtgatgagggtttcacgggcgaagactgcagtgagctcatctgccccaatgactgcttcgaccggggccgctgcatcaatggcacctgctactgcgaagaaggcttcacaggtgaagactgcgggaaacccacctgcccacatgcctgccacacccagggccggtgtgaggaggggcagtgtgtatgtgatgagggctttgccggtgtggactgcagcgagaagaggtgtcctgctgactgtcacaatcgtggccgctgtgtagacgggcggtgtgagtgtgatgatggtttcactggagctgactgtggggagctcaagtgtcccaatggctgcagtggccatggccgctgtgtcaatgggcagtgtgtgtgtgatgagggctatactggggaggactgcagccagctacggtgccccaatgactgtcacagtcggggccgctgtgtcgagggcaaatgtgtatgtgagcaaggcttcaagggctatgactgcagtgacatgagctgccctaatgactgtcaccagcacggccgctgtgtgaatggcatgtgtgtttgtgatgacggctacacaggggaagactgccgggatcgccaatgccccagggactgcagcaacaggggcctctgtgtggacggacagtgcgtctgtgaggacggcttcaccggccctgactgtgcagaactctcctgtccaaatgactgccatggccagggtcgctgtgtgaatgggcagtgcgtgtgccatgaaggatttatgggcaaagactgcaaggagcaaagatgtcccagtgactgtcatggccagggccgctgcgtggacggccagtgcatctgccacgagggcttcacaggcctggactgtggccagcactcctgccccagtgactgcaacaacttaggacaatgcgtctcgggccgctgcatctgcaacgagggctacagcggagaagactgctcagaggtgtctcctcccaaagacctcgttgtgacagaagtgacggaagagacggtcaacctggcctgggacaatgagatgcgggtcacagagtaccttgtcgtgtacacgcccacccacgagggtggtctggaaatgcagttccgtgtgcctggggaccagacgtccaccatcatccaggagctggagcctggtgtggagtactttatccgtgtatttgccatcctggagaacaagaagagcattcctgtcagcgccagggtggccacgtacttacctgcacctgaaggcctgaaattcaagtccatcaaggagacatctgtggaagtggagtgggatcctctagacattgcttttgaaacctgggagatcatcttccggaatatgaataaagaagatgagggagagatcaccaaaagcctgaggaggccagagacctcttaccggcaaactggtctagctcctgggcaagagtatgagatatctctgcacatagtgaaaaacaatacccggggccctggcctgaagagggtgaccaccacacgcttggatgcccccagccagatcgaggtgaaagatgtcacagacaccactgccttgatcacctggttcaagcccctggctgagatcgatggcattgagctgacctacggcatcaaagacgtgccaggagaccgtaccaccatcgatctcacagaggacgagaaccagtactccatcgggaacctgaagcctgacactgagtacgaggtgtccctcatctcccgcagaggtgacatgtcaagcaacccagccaaagagaccttcacaacaggcctcgatgctcccaggaatcttcgacgtgtttcccagacagataacagcatcaccctggaatggaggaatggcaaggcagctattgacagttacagaattaagtatgcccccatctctggaggggaccacgctgaggttgatgttccaaagagccaacaagccacaaccaaaaccacactcacaggtctgaggccgggaactgaatatgggattggagtttctgctgtgaaggaagacaaggagagcaatccagcgaccatcaacgcagccacagagttggacacgcccaaggaccttcaggtttctgaaactgcagagaccagcctgaccctgctctggaagacaccgttggccaaatttgaccgctaccgcctcaattacagtctccccacaggccagtgggtgggagtgcagcttccaagaaacaccacttcctatgtcctgagaggcctggaaccaggacaggagtacaatgtcctcctgacagccgagaaaggcagacacaagagcaagcccgcacgtgtgaaggcatccactgccaaagaacctgaaattggaaacttaaatgtttctgacataactcccgagagcttcaatctctcctggatggctaccgatgggatcttcgagacctttaccattgaaattattgattccaataggttgctggagactgtggaatataatatctctggtgctgaacgaactgcccatatctcagggctaccccctagtactgattttattgtctacctctctggacttgctcccagcatccggaccaaaaccatcagtgccacagccacgacagaaccaaagccacagttgggcacgctaatctttagcaatattactccaaaaagcttcaacatgtcatggaccactcaagctgggctttttgcaaagattgttatcaatgtgagtgacgctcactcactgcatgagtcccagcaattcacagtctcaggagatgcaaagcaagctcacatcacaggcttggtggagaacactggctatgacgtcagtgtggcaggaaccaccttggctggggatcccaccagacccctcactgcctttgtcattacagaagccgaaccggaagttgacaaccttctggtttcagatgccaccccagacggtttccgtctgtcctggacagctgatgaaggggtcttcgacaattttgttctcaaaatcagagataccaaaaagcagtctgagccactggaaataaccctacttgcccccgaacgtaccagggacataacaggtctcagagaggctactgaatacgaaattgaactctatggaataagcaaaggaaggcgatcccagacagtcagtgctatagcaacaacagccatgggctccccaaaggaagtcattttctcagacatcactgaaaattcggctactgtcagctggagggcacccacagcccaagtggagagcttccggattacctatgtgcccattacaggaggtacaccctccatggtaactgtggacggaaccaagactcagaccaggctggtgaaactcatacctggcgtggagtaccttgtcagcatcatcgccatgaagggctttgaggaaagtgaacctgtctcagggtcattcaccacagctctggatggcccatctggcctggtgacagccaacatcactgactcagaagccttggccaggtggcagccagccattgccactgtggacagttatgtcatctcctacacaggcgagaaagtgccagaaattacacgcacggtgtccgggaacacagtggagtatgctctgaccgacctcgagcctgccacggaatacacactgagaatctttgcagagaaagggccccagaagagctcaaccatcactgccaagttcacaacagacctcgattctccaagagacttgactgctactgaggttcagtcggaaactgccctccttacctggcgacccccccgggcatcagtcaccggttacctgctggtctatgaatcagtggatggcacagtcaaggaagtcattgtgggtccagataccacctcctacagcctggcagacctgagcccatccacccactacacagccaagatccaggcactcaatgggcccctgaggagcaatatgatccagaccatcttcaccacaattggactcctgtaccccttccccaaggactgctcccaagcaatgctgaatggagacacgacctctggcctctacaccatttatctgaatggtgataaggctgaggcgctggaagtcttctgtgacatgacctctgatgggggtggatggattgtgttcctgagacgcaaaaacggacgcgagaacttctaccaaaactggaaggcatatgctgctggatttggggaccgcagagaagaattctggcttgggctggacaacctgaacaaaatcacagcccaggggcagtacgagctccgggtggacctgcgggaccatggggagacagcctttgctgtctatgacaagttcagcgtgggagatgccaagactcgctacaagctgaaggtggaggggtacagtgggacagcaggtgactccatggcctaccacaatggcagatccttctccacctttgacaaggacacagattcagccatcaccaactgtgctctgtcctacaaaggggctttctggtacaggaactgtcaccgtgtcaacctgatggggagatatggggacaataaccacagtcagggcgttaactggttccactggaagggccacgaacactcaatccagtttgctgagatgaagctgagaccaagcaacttcagaaatcttgaaggcaggcgcaaacgggcataa

SEQ ID NO: 190052 - DNA, 734 bp, Homo sapiens
  Payload ID: 17530
  Gene Symbol: TNC
  Gene Name: tenascin C
  ENST ID: ENST00000534839
  CDS Start-End: 459-734
ggaaggagctcgctatataagccagccaaagttggctgcaccggccacagcctgcctactgtcacccgcctctcccgcgcgcagatacacgcccccgcctccgtgggcacaaaggcagcgctgctggggaactcgggggaacgcgcacgtgggaaccgccgcagctccacactccaggtacttcttccaaggacctaggtctctcgcccatcggaaagatttctatagacacctagctgtgctttcttacaagaaaacatatccactggaccaaagcgcagcccccttcatgctgaagccacttcagtttgaaacgtaaaaaaaaataattctttcaagaagatcagggacaactgatttgaagtctactctgtgcttctaaatccccaattctgctgaaagtgagataccctagagccctagagccccagcagcacccagccaaacccacctccaccatgggggccatgactcagctgttggcaggtgtctttcttgctttccttgccctcgctaccgaaggtggggtcctcaagaaagtcatccggcacaagcgacagagtggggtgaacgccaccctgccagaagagaaccagccagtggtgtttaaccacgtttacaacatcaagctgccagtgggatcccagtgttcggtggatctggagtcagccagtggggagaaagacctggcaccgccttcagagcccagcgaaagctttcaggagcacacagtg

SEQ ID NO: 190053 - DNA, 4946 bp, Homo sapiens
  Payload ID: 17530
  Gene Symbol: TNC
  Gene Name: tenascin C
  Uniprot ID: P24821
  ENST ID: ENST00000537320
  CDS Start-End: 124-4818
caagaagatcagggacaactgatttgaagtctactctgtgcttctaaatccccaattctgctgaaagtgagataccctagagccctagagccccagcagcacccagccaaacccacctccaccatgggggccatgactcagctgttggcaggtgtctttcttgctttccttgccctcgctaccgaaggtggggtcctcaagaaagtcatccggcacaagcgacagagtggggtgaacgccaccctgccagaagagaaccagccagtggtgtttaaccacgtttacaacatcaagctgccagtgggatcccagtgttcggtggatctggagtcagccagtggggagaaagacctggcaccgccttcagagcccagcgaaagctttcaggagcacacagtggatggggaaaaccagattgtcttcacacatcgcatcaacatcccccgccgggcctgtggctgtgccgcagcccctgatgttaaggagctgctgagcagactggaggagctggagaacctggtgtcttccctgagggagcaatgtactgcaggagcaggctgctgtctccagcctgccacaggccgcttggacaccaggcccttctgtagcggtcggggcaacttcagcactgaaggatgtggctgtgtctgcgaacctggctggaaaggccccaactgctctgagcccgaatgtccaggcaactgtcaccttcgaggccggtgcattgatgggcagtgcatctgtgacgacggcttcacgggcgaggactgcagccagctggcttgccccagcgactgcaatgaccagggcaagtgcgtaaatggagtctgcatctgtttcgaaggctacgccggggctgactgcagccgtgaaatctgcccagtgccctgcagtgaggagcacggcacatgtgtagatggcttgtgtgtgtgccacgatggctttgcaggcgatgactgcaacaagcctctgtgtctcaacaattgctacaaccgtggacgatgcgtggagaatgagtgcgtgtgtgatgagggtttcacgggcgaagactgcagtgagctcatctgccccaatgactgcttcgaccggggccgctgcatcaatggcacctgctactgcgaagaaggcttcacaggtgaagactgcgggaaacccacctgcccacatgcctgccacacccagggccggtgtgaggaggggcagtgtgtatgtgatgagggctttgccggtgtggactgcagcgagaagaggtgtcctgctgactgtcacaatcgtggccgctgtgtagacgggcggtgtgagtgtgatgatggtttcactggagctgactgtggggagctcaagtgtcccaatggctgcagtggccatggccgctgtgtcaatgggcagtgtgtgtgtgatgagggctatactggggaggactgcagccagctacggtgccccaatgactgtcacagtcggggccgctgtgtcgagggcaaatgtgtatgtgagcaaggcttcaagggctatgactgcagtgacatgagctgccctaatgactgtcaccagcacggccgctgtgtgaatggcatgtgtgtttgtgatgacggctacacaggggaagactgccgggatcgccaatgccccagggactgcagcaacaggggcctctgtgtggacggacagtgcgtctgtgaggacggcttcaccggccctgactgtgcagaactctcctgtccaaatgactgccatggccagggtcgctgtgtgaatgggcagtgcgtgtgccatgaaggatttatgggcaaagactgcaaggagcaaagatgtcccagtgactgtcatggccagggccgctgcgtggacggccagtgcatctgccacgagggcttcacaggcctggactgtggccagcactcctgccccagtgactgcaacaacttaggacaatgcgtctcgggccgctgcatctgcaacgagggctacagcggagaagactgctcagaggtgtctcctcccaaagacctcgttgtgacagaagtgacggaagagacggtcaacctggcctgggacaatgagatgcgggtcacagagtaccttgtcgtgtacacgcccacccacgagggtggtctggaaatgcagttccgtgtgcctggggaccagacgtccaccatcatccaggagctggagcctggtgtggagtactttatccgtgtatttgccatcctggagaacaagaagagcattcctgtcagcgccagggtggccacgtacttacctgcacctgaaggcctgaaattcaagtccatcaaggagacatctgtggaagtggagtgggatcctctagacattgcttttgaaacctgggagatcatcttccggaatatgaataaagaagatgagggagagatcaccaaaagcctgaggaggccagagacctcttaccggcaaactggtctagctcctgggcaagagtatgagatatctctgcacatagtgaaaaacaatacccggggccctggcctgaagagggtgaccaccacacgcttggatgcccccagccagatcgaggtgaaagatgtcacagacaccactgccttgatcacctggttcaagcccctggctgagatcgatggcattgagctgacctacggcatcaaagacgtgccaggagaccgtaccaccatcgatctcacagaggacgagaaccagtactccatcgggaacctgaagcctgacactgagtacgaggtgtccctcatctcccgcagaggtgacatgtcaagcaacccagccaaagagaccttcacaacaggcctcgatgctcccaggaatcttcgacgtgtttcccagacagataacagcatcaccctggaatggaggaatggcaaggcagctattgacagttacagaattaagtatgcccccatctctggaggggaccacgctgaggttgatgttccaaagagccaacaagccacaaccaaaaccacactcacaggtctgaggccgggaactgaatatgggattggagtttctgctgtgaaggaagacaaggagagcaatccagcgaccatcaacgcagccacagagttggacacgcccaaggaccttcaggtttctgaaactgcagagaccagcctgaccctgctctggaagacaccgttggccaaatttgaccgctaccgcctcaattacagtctccccacaggccagtgggtgggagtgcagcttccaagaaacaccacttcctatgtcctgagaggcctggaaccaggacaggagtacaatgtcctcctgacagccgagaaaggcagacacaagagcaagcccgcacgtgtgaaggcatccactgccatgggctccccaaaggaagtcattttctcagacatcactgaaaattcggctactgtcagctggagggcacccacagcccaagtggagagcttccggattacctatgtgcccattacaggaggtacaccctccatggtaactgtggacggaaccaagactcagaccaggctggtgaaactcatacctggcgtggagtaccttgtcagcatcatcgccatgaagggctttgaggaaagtgaacctgtctcagggtcattcaccacagctctggatggcccatctggcctggtgacagccaacatcactgactcagaagccttggccaggtggcagccagccattgccactgtggacagttatgtcatctcctacacaggcgagaaagtgccagaaattacacgcacggtgtccgggaacacagtggagtatgctctgaccgacctcgagcctgccacggaatacacactgagaatctttgcagagaaagggccccagaagagctcaaccatcactgccaagttcacaacagacctcgattctccaagagacttgactgctactgaggttcagtcggaaactgccctccttacctggcgacccccccgggcatcagtcaccggttacctgctggtctatgaatcagtggatggcacagtcaaggaagtcattgtgggtccagataccacctcctacagcctggcagacctgagcccatccacccactacacagccaagatccaggcactcaatgggcccctgaggagcaatatgatccagaccatcttcaccacaattggactcctgtaccccttccccaaggactgctcccaagcaatgctgaatggagacacgacctctggcctctacaccatttatctgaatggtgataaggctgaggcgctggaagtcttctgtgacatgacctctgatgggggtggatggattgtgttcctgagacgcaaaaacggacgcgagaacttctaccaaaactggaaggcatatgctgctggatttggggaccgcagagaagaattctggcttgggctggacaacctgaacaaaatcacagcccaggggcagtacgagctccgggtggacctgcgggaccatggggagacagcctttgctgtctatgacaagttcagcgtgggagatgccaagactcgctacaagctgaaggtggaggggtacagtgggacagcaggtgactccatggcctaccacaatggcagatccttctccacctttgacaaggacacagattcagccatcaccaactgtgctctgtcctacaaaggggctttctggtacaggaactgtcaccgtgtcaacctgatggggagatatggggacaataaccacagtcagggcgttaactggttccactggaagggccacgaacactcaatccagtttgctgagatgaagctgagaccaagcaacttcagaaatcttgaaggcaggcgcaaacgggcataaattccagggaccactgggtgagagaggaataaggcccagagcgaggaaaggattttaccaaagcatcaatacaaccagcccaaccatcggtccacacctgggcatttggtgagagtcaaagctgacca

SEQ ID NO: 190054 - DNA, 1844 bp, Homo sapiens
  Payload ID: 17530
  Gene Symbol: TNC
  Gene Name: tenascin C
  ENST ID: ENST00000544972
  CDS Start-End: 1-1844
ccctgagctggaaaacctcaccgtgactgaggttggctgggatggcctcagactcaactggaccgcagctgaccaggcctatgagcactttatcattcaggtgcaggaggccaacaaggtggaggcagctcggaacctcaccgtgcctggcagccttcgggctgtggacataccgggcctcaaggctgctacgccttatacagtctccatctatggggtgatccagggctatagaacaccagtgctctctgctgaggcctccacagccaaagaacctgaaattggaaacttaaatgtttctgacataactcccgagagcttcaatctctcctggatggctaccgatgggatcttcgagacctttaccattgaaattattgattccaataggttgctggagactgtggaatataatatctctggtgctgaacgaactgcccatatctcagggctaccccctagtactgattttattgtctacctctctggacttgctcccagcatccggaccaaaaccatcagtgccacagccacgacagaagccgaaccggaagttgacaaccttctggtttcagatgccaccccagacggtttccgtctgtcctggacagctgatgaaggggtcttcgacaattttgttctcaaaatcagagataccaaaaagcagtctgagccactggaaataaccctacttgcccccgaacgtaccagggacataacaggtctcagagaggctactgaatacgaaattgaactctatggaataagcaaaggaaggcgatcccagacagtcagtgctatagcaacaacagccatgggctccccaaaggaagtcattttctcagacatcactgaaaattcggctactgtcagctggagggcacccacagcccaagtggagagcttccggattacctatgtgcccattacaggaggtacaccctccatggtaactgtggacggaaccaagactcagaccaggctggtgaaactcatacctggcgtggagtaccttgtcagcatcatcgccatgaagggctttgaggaaagtgaacctgtctcagggtcattcaccacagctctggatggcccatctggcctggtgacagccaacatcactgactcagaagccttggccaggtggcagccagccattgccactgtggacagttatgtcatctcctacacaggcgagaaagtgccagaaattacacgcacggtgtccgggaacacagtggagtatgctctgaccgacctcgagcctgccacggaatacacactgagaatctttgcagagaaagggccccagaagagctcaaccatcactgccaagttcacaacagacctcgattctccaagagacttgactgctactgaggttcagtcggaaactgccctccttacctggcgacccccccgggcatcagtcaccggttacctgctggtctatgaatcagtggatggcacagtcaaggaagtcattgtgggtccagataccacctcctacagcctggcagacctgagcccatccacccactacacagccaagatccaggcactcaatgggcccctgaggagcaatatgatccagaccatcttcaccacaattggactcctgtaccccttccccaaggactgctcccaagcaatgctgaatggagacacgacctctggcctctacaccatttatctgaatggtgataaggctgaggcgctggaagtcttctgtgacatgacctctgatgggggtggatggattgtgttcctgagacgcaaaaacggacgcgagaacttctaccaaaactggaaggcatatgctgctggatttggggaccgcagagaag

SEQ ID NO: 190055 - DNA, 69 bp, Homo sapiens
  Payload ID: 17530
  Gene Symbol: TNC
  Gene Name: tenascin C
  ENST ID: ENST00000635336
  CDS Start-End: 1-69
gcctccacagaagccgaaccggaagttgacaaccttctggtttcagatgccaccccagacggtttccgt

SEQ ID NO: 190056 - DNA, 5008 bp, Homo sapiens
  Payload ID: 17531
  Gene Symbol: TNN
  Gene Name: tenascin N
  Uniprot ID: Q9UQP3
  ENST ID: ENST00000239462
  CDS Start-End: 114-4013
aagtaccaaggtctgcggcaggaggagaccggctcacaggagcagcagcattggaagaggcacccagcagcctcccaggcatcctggagggtctgctccctgtctttccaaggatgagtctccaggagatgttccgcttccctatggggctcctgcttggctctgtgctcctggtggcttcggccccagccactctggagcctcccggctgcagcaacaaggagcaacaggtcactgtcagccacacctacaagatcgatgtgcccaagtctgccttggttcaggttgacgctgaccctcagcccctcagtgacgatggggcttcgctcttggccctgggggaggccagggaggaacagaacatcatcttcaggcacaacatccgccttcagacgccacagaaggactgcgagttggcaggcagtgtccaggacctcctggcccgggtgaagaagctggaggaagagatggtggagatgaaggaacagtgtagtgcccagcgctgctgccagggagtcactgatctaagccgccactgcagcggccacgggaccttctccctggagacctgcagctgccactgcgaagagggcagggagggccccgcctgcgagcggctggcctgccccggggcgtgcagcggccacgggcgttgcgtggacgggcgctgcctgtgccatgagccctacgtgggtgccgactgcggctacccggcctgccctgagaactgcagcggacacggcgagtgcgtgcgcggcgtgtgccagtgccacgaagacttcatgtcggaggactgcagcgagaagcgctgtcccggcgactgcagcggccacggcttctgtgacacgggcgagtgctactgcgaggagggcttcacaggcctggactgtgcccaggtggtcaccccacagggcctgcagctgctcaagaacacggaggattctctgctggtgagctgggagccctccagccaggtggatcactacctcctcagctactaccccctggggaaggagctctctgggaagcagatccaagtgcccaaggagcagcacagctatgagattcttggtttgctgcctggaaccaagtacatagtcaccctgcgtaacgtcaagaatgaagtttctagcagcccacagcatctacttgccaccacagaccttgctgtgcttggcactgcctgggtgacagatgagactgagaactcccttgacgtggagtgggaaaacccctcaactgaggtggactactacaagctgcgatatggccccatgacaggacaggaggtagctgaggtcactgtgcccaagagcagtgaccccaagagccgatatgacatcactggtctgcacccggggactgagtataagatcacggtggtgcccatgagaggagagctggagggcaagccgatcctcctgaatggcaggacagaaattgacagtccaaccaatgttgtcactgatcgagtgactgaagacacagcaactgtctcctgggacccagtgcaggctgtcatagacaagtatgtagtgcgctacacttctgctgatggggacaccaaggaaatggcagtgcacaaggatgagagcagcactgtcctgacgggcctgaagccaggagaggcatacaaggtctacgtgtgggctgaaaggggcaaccaggggagcaagaaagctgacaccaatgccctcacagaaattgacagcccagcaaacctggtgactgaccgggtgactgagaataccgccaccatctcctgggacccggtacaggccaccattgacaagtacgtggtgcgctacacctctgctgacgaccaagagaccagagaggttctggtggggaaggagcagagcagcactgtcctgacaggcctgaggccaggtgtggagtacacagtgcatgtctgggcccagaagggggaccgagagagcaagaaggctgacaccaacgccccgacagatattgacagccccaaaaacctggtgactgaccgggtgacagagaatatggccacggtctcctgggacccggtgcaggccgccattgacaagtacgtggtgcgctacacctctgctggtggagagaccagggaggttccggtggggaaggagcagagcagcacagtcctgacaggcctgagaccgggtatggagtacatggtgcacgtgtgggcccagaagggggaccaggagagcaagaaggccgacaccaaggcccagacagacattgacagcccccaaaacctggtgaccgaccgggtgacagagaatatggccactgtctcctgggacccggtgcgggccaccattgacaggtatgtggtgcgctacacctctgccaaggacggagagaccagggaggttccggtggggaaggagcagagtagcactgtcctgacgggcctgaggccgggtgtggagtacacggtgcacgtgtgggcccagaagggggcccaggagagcaagaaggctgacaccaaggcccagacagacattgacagcccccaaaacctggtcactgactgggtgacagagaatacagccactgtctcctgggacccggtgcaggccaccattgacaggtatgtggtgcactacacgtctgccaacggagagaccagggaggttccagtggggaaggagcagagcagcactgtcctgacgggcctgaggccgggcatggagtacacggtgcacgtgtgggcccagaaggggaaccaggagagcaagaaggctgacaccaaggcccagacagaaattgacggccccaaaaacctagtgactgactgggtgacggagaatatggccactgtctcctgggacccggttcaggccaccattgacaagtacatggtgcgctacacctctgctgacggagagaccagggaggttccggtggggaaggagcacagcagcactgtcctgacgggcctgagaccaggcatggagtacatggtgcacgtgtgggcccagaagggggcccaggagagcaagaaggctgacaccaaggcccagacagaactcgaccctcccagaaaccttcgtccatctgctgtaacgcagtctggtggcatattgacctggacgcccccctctgctcagatccacggctacattctgacttaccagttcccagatggcacagttaaggagatgcagctgggacgggaagaccagaggtttgcgttgcaaggccttgagcaaggcgccacctaccctgtctcccttgttgcctttaagggtggtcgccggagcagaaatgtatccaccaccctctccacagttggtgcccgtttcccacacccttcggactgcagtcaggttcagcagaacagcaatgccgccagtggtctgtacaccatctacctgcatggcgatgccagccggcccctgcaggtgtactgtgacatggaaacggacggaggtggctggattgtcttccagaggcggaacactgggcagctggatttcttcaagcgatggaggagctatgtggaaggctttggggaccccatgaaggagttctggcttggacttgacaagctacacaacctcaccaccggcactccagcgcggtatgaggtgagagtggatttacagactgccaatgaatctgcctatgctatatatgatttcttccaagtggcctccagcaaggagcggtataagctgacagttgggaaatacagaggcacggcaggggatgctcttacttaccacaatggatggaagtttacaacttttgacagagacaatgatatcgcactcagcaactgtgccctgacacatcatggtggctggtggtataagaactgccacttggccaaccctaatggcagatatggggagaccaagcacagtgagggggtgaactgggagccttggaaaggacatgaattctccattccttacgtggagttgaaaatccgccctcatggctacagcagggagcctgtcctgggcagaaagaagcggacgctgagaggaaggctgcgaacgttctgatggcccgtgtgagcagtcctcgcaggagacaccaccagctgtggcagcttggggcggggtgggtagtggtcactgcggtctgggagtgctcagatagcccgcagaacaaatcatgtcaccaagcttcaagccatggaggttccttccctctcacctgcatttttgcccgtctttatgagggtcttgaaaatcaaaatagtagttgcacagtatgtgtaggaaagacagtactggaacggcaaggtttctcagcttatcttcagcaacatatatactggattagggcaagagaaggaatcacccagcacttcaccagttggaaatctctggaaatttacatctatgtatttaaagttctgctaatgcaaatcttttctctggaaagaagcacagaggaggagttctgatgacccaggggttagggctgagacaaccggacgtttgtcacctcctttcccattgggtttttaggaaaacagtgtgaacctcccccttttaatttctggtgttatgaggaagaataaaggggataaaaggggctaagatggactcatgtttagctaagttctgacttgtatccagcatgctggagaccaaagctgccgccttactgctatttttaagtgccctcttttcagtcatttgcataattgcgtccatagagctgcatatgttgtgaataaattctcactcatttcaactttgaataatttgactgtcttgataattggttcctcccaaagactcttctgcaactcccattcatgcccaccaggcctcagactccctcttttccccgccctgcactattggagccctgggttttgtgggagtgctcagcaccgtgagtcttactgtttgatcggacagttagcaagatcagatcctttttgcttattttctatcactttggagggttttctgtagcaaaatcagtgaccaatgaagtaacttaaattcctattgaagaaaaaaaataataaaccacttgattt

SEQ ID NO: 190057 - DNA, 4234 bp, Homo sapiens
  Payload ID: 17531
  Gene Symbol: TNN
  Gene Name: tenascin N
  ENST ID: ENST00000621086
  CDS Start-End: 1-3369
atgagtctccaggagatgttccgcttccctatggggctcctgcttggctctgtgctcctggtggcttcggccccagccactctggagcctcccggctgcagcaacaaggagcaacaggtcactgtcagccacacctacaagatcgatgtgcccaagtctgccttggttcaggttgacgctgaccctcagcccctcagtgacgatggggcttcgctcttggccctgggggaggccagggaggaacagaacatcatcttcaggcacaacatccgccttcagacgccacagaaggactgcgagttggcaggcagtgtccaggacctcctggcccgggtgaagaagctggaggaagagatggtggagatgaaggaacagtgtagtgcccagcgctgctgccagggagtcactgatctaagccgccactgcagcggccacgggaccttctccctggagacctgcagctgccactgcgaagagggcagggagggccccgcctgcgagcggctggcctgccccggggcgtgcagcggccacgggcgttgcgtggacgggcgctgcctgtgccatgagccctacgtgggtgccgactgcggctacccggcctgccctgagaactgcagcggacacggcgagtgcgtgcgcggcgtgtgccagtgccacgaagacttcatgtcggaggactgcagcgagaagcgctgtcccggcgactgcagcggccacggcttctgtgacacgggcgagtgctactgcgaggagggcttcacaggcctggactgtgcccaggtggtcaccccacagggcctgcagctgctcaagaacacggaggattctctgctggtgagctgggagccctccagccaggtggatcactacctcctcagctactaccccctggggaaggagctctctgggaagcagatccaagtgcccaaggagcagcacagctatgagattcttggtttgctgcctggaaccaagtacatagtcaccctgcgtaacgtcaagaatgaagtttctagcagcccacagcatctacttgccaccacagaccttgctgtgcttggcactgcctgggtgacagatgagactgagaactcccttgacgtggagtgggaaaacccctcaactgaggtggactactacaagctgcgatatggccccatgacaggacaggaggtagctgaggtcactgtgcccaagagcagtgaccccaagagccgatatgacatcactggtctgcacccggggactgagtataagatcacggtggtgcccatgagaggagagctggagggcaagccgatcctcctgaatggcaggacagaaattgacagtccaaccaatgttgtcactgatcgagtgactgaagacacagcaactgtctcctgggacccagtgcaggctgtcatagacaagtatgtagtgcgctacacttctgctgatggggacaccaaggaaatggcagtgcacaaggatgagagcagcactgtcctgacgggcctgaagccaggagaggcatacaaggtctacgtgtgggctgaaaggggcaaccaggggagcaagaaagctgacaccaatgccctcacagacattgacagcccccaaaacctggtgaccgaccgggtgacagagaatatggccactgtctcctgggacccggtgcgggccaccattgacaggtatgtggtgcgctacacctctgccaaggacggagagaccagggaggttccggtggggaaggagcagagtagcactgtcctgacgggcctgaggccgggtgtggagtacacggtgcacgtgtgggcccagaagggggcccaggagagcaagaaggctgacaccaaggcccagacagacattgacagcccccaaaacctggtcactgactgggtgacagagaatacagccactgtctcctgggacccggtgcaggccaccattgacaggtatgtggtgcactacacgtctgccaacggagagaccagggaggttccagtggggaaggagcagagcagcactgtcctgacgggcctgaggccgggcatggagtacacggtgcacgtgtgggcccagaaggggaaccaggagagcaagaaggctgacaccaaggcccagacagaaattgacggccccaaaaacctagtgactgactgggtgacggagaatatggccactgtctcctgggacccggttcaggccaccattgacaagtacatggtgcgctacacctctgctgacggagagaccagggaggttccggtggggaaggagcacagcagcactgtcctgacgggcctgagaccaggcatggagtacatggtgcacgtgtgggcccagaagggggcccaggagagcaagaaggctgacaccaaggcccagacagaactcgaccctcccagaaaccttcgtccatctgctgtaacgcagtctggtggcatattgacctggacgcccccctctgctcagatccacggctacattctgacttaccagttcccagatggcacagttaaggagatgcagctgggacgggaagaccagaggtttgcgttgcaaggccttgagcaaggcgccacctaccctgtctcccttgttgcctttaagggtggtcgccggagcagaaatgtatccaccaccctctccacagttggtgcccgtttcccacacccttcggactgcagtcaggttcagcagaacagcaatgccgccagtggtctgtacaccatctacctgcatggcgatgccagccggcccctgcaggtgtactgtgacatggaaacggacggaggtggctggattgtcttccagaggcggaacactgggcagctggatttcttcaagcgatggaggagctatgtggaaggctttggggaccccatgaaggagttctggcttggacttgacaagctacacaacctcaccaccggcactccagcgcggtatgaggtgagagtggatttacagactgccaatgaatctgcctatgctatatatgatttcttccaagtggcctccagcaaggagcggtataagctgacagttgggaaatacagaggcacggcaggggatgctcttacttaccacaatggatggaagtttacaacttttgacagagacaatgatatcgcactcagcaactgtgccctgacacatcatggtggctggtggtataagaactgccacttggccaaccctaatggcagatatggggagaccaagcacagtgagggggtgaactgggagccttggaaaggacatgaattctccattccttacgtggagttgaaaatccgccctcatggctacagcagggagcctgtcctgggcagaaagaagcggacgctgagaggaaggctgcgaacgttctgatggcccgtgtgagcagtcctcgcaggagacaccaccagctgtggcagcttggggcggggtgggtagtggtcactgcggtctgggagtgctcagatagcccgcagaacaaatcatgtcaccaagcttcaagccatggaggttccttccctctcacctgcatttttgcccgtctttatgagggtcttgaaaatcaaaatagtagttgcacagtatgtgtaggaaagacagtactggaacggcaaggtttctcagcttatcttcagcaacatatatactggattagggcaagagaaggaatcacccagcacttcaccagttggaaatctctggaaatttacatctatgtatttaaagttctgctaatgcaaatcttttctctggaaagaagcacagaggaggagttctgatgacccaggggttagggctgagacaaccggacgtttgtcacctcctttcccattgggtttttaggaaaacagtgtgaacctcccccttttaatttctggtgttatgaggaagaataaaggggataaaaggggctaagatggactcatgtttagctaagttctgacttgtatccagcatgctggagaccaaagctgccgccttactgctatttttaagtgccctcttttcagtcatttgcataattgcgtccatagagctgcatatgttgtgaataaattctcactcatttcaactttgaataatttgactgtcttgataattggttcctcccaaagactcttctgcaactcccattcatgcccaccaggcctcagactccctcttttccccgccctgcactattggagccctgggttttgtgggagtgctcagcaccgtgagtcttactgtttgatcg

SEQ ID NO: 190058 - DNA, 3719 bp, Homo sapiens
  Payload ID: 17531
  Gene Symbol: TNN
  Gene Name: tenascin N
  ENST ID: ENST00000622870
  CDS Start-End: 31-3399
ctggagggtctgctccctgtctttccaaggatgagtctccaggagatgttccgcttccctatggggctcctgcttggctctgtgctcctggtggcttcggccccagccactctggagcctcccggctgcagcaacaaggagcaacaggtcactgtcagccacacctacaagatcgatgtgcccaagtctgccttggttcaggttgacgctgaccctcagcccctcagtgacgatggggcttcgctcttggccctgggggaggccagggaggaacagaacatcatcttcaggcacaacatccgccttcagacgccacagaaggactgcgagttggcaggcagtgtccaggacctcctggcccgggtgaagaagctggaggaagagatggtggagatgaaggaacagtgtagtgcccagcgctgctgccagggagtcactgatctaagccgccactgcagcggccacgggaccttctccctggagacctgcagctgccactgcgaagagggcagggagggccccgcctgcgagcggctggcctgccccggggcgtgcagcggccacgggcgttgcgtggacgggcgctgcctgtgccatgagccctacgtgggtgccgactgcggctacccggcctgccctgagaactgcagcggacacggcgagtgcgtgcgcggcgtgtgccagtgccacgaagacttcatgtcggaggactgcagcgagaagcgctgtcccggcgactgcagcggccacggcttctgtgacacgggcgagtgctactgcgaggagggcttcacaggcctggactgtgcccaggtggtcaccccacagggcctgcagctgctcaagaacacggaggattctctgctggtgagctgggagccctccagccaggtggatcactacctcctcagctactaccccctggggaaggagctctctgggaagcagatccaagtgcccaaggagcagcacagctatgagattcttggtttgctgcctggaaccaagtacatagtcaccctgcgtaacgtcaagaatgaagtttctagcagcccacagcatctacttgccaccacagaccttgctgtgcttggcactgcctgggtgacagatgagactgagaactcccttgacgtggagtgggaaaacccctcaactgaggtggactactacaagctgcgatatggccccatgacaggacaggaggtagctgaggtcactgtgcccaagagcagtgaccccaagagccgatatgacatcactggtctgcacccggggactgagtataagatcacggtggtgcccatgagaggagagctggagggcaagccgatcctcctgaatggcaggacagaaattgacagtccaaccaatgttgtcactgatcgagtgactgaagacacagcaactgtctcctgggacccagtgcaggctgtcatagacaagtatgtagtgcgctacacttctgctgatggggacaccaaggaaatggcagtgcacaaggatgagagcagcactgtcctgacgggcctgaagccaggagaggcatacaaggtctacgtgtgggctgaaaggggcaaccaggggagcaagaaagctgacaccaatgccctcacagaaattgacagcccagcaaacctggtgactgaccgggtgactgagaataccgccaccatctcctgggacccggtacaggccaccattgacaggtatgtggtgcgctacacctctgccaaggacggagagaccagggaggttccggtggggaaggagcagagtagcactgtcctgacgggcctgaggccgggtgtggagtacacggtgcacgtgtgggcccagaagggggcccaggagagcaagaaggctgacaccaaggcccagacagacattgacagcccccaaaacctggtcactgactgggtgacagagaatacagccactgtctcctgggacccggtgcaggccaccattgacaggtatgtggtgcactacacgtctgccaacggagagaccagggaggttccagtggggaaggagcagagcagcactgtcctgacgggcctgaggccgggcatggagtacacggtgcacgtgtgggcccagaaggggaaccaggagagcaagaaggctgacaccaaggcccagacagaaattgacggccccaaaaacctagtgactgactgggtgacggagaatatggccactgtctcctgggacccggttcaggccaccattgacaagtacatggtgcgctacacctctgctgacggagagaccagggaggttccggtggggaaggagcacagcagcactgtcctgacgggcctgagaccaggcatggagtacatggtgcacgtgtgggcccagaagggggcccaggagagcaagaaggctgacaccaaggcccagacagaactcgaccctcccagaaaccttcgtccatctgctgtaacgcagtctggtggcatattgacctggacgcccccctctgctcagatccacggctacattctgacttaccagttcccagatggcacagttaaggagatgcagctgggacgggaagaccagaggtttgcgttgcaaggccttgagcaaggcgccacctaccctgtctcccttgttgcctttaagggtggtcgccggagcagaaatgtatccaccaccctctccacagttggtgcccgtttcccacacccttcggactgcagtcaggttcagcagaacagcaatgccgccagtggtctgtacaccatctacctgcatggcgatgccagccggcccctgcaggtgtactgtgacatggaaacggacggaggtggctggattgtcttccagaggcggaacactgggcagctggatttcttcaagcgatggaggagctatgtggaaggctttggggaccccatgaaggagttctggcttggacttgacaagctacacaacctcaccaccggcactccagcgcggtatgaggtgagagtggatttacagactgccaatgaatctgcctatgctatatatgatttcttccaagtggcctccagcaaggagcggtataagctgacagttgggaaatacagaggcacggcaggggatgctcttacttaccacaatggatggaagtttacaacttttgacagagacaatgatatcgcactcagcaactgtgccctgacacatcatggtggctggtggtataagaactgccacttggccaaccctaatggcagatatggggagaccaagcacagtgagggggtgaactgggagccttggaaaggacatgaattctccattccttacgtggagttgaaaatccgccctcatggctacagcagggagcctgtcctgggcagaaagaagcggacgctgagaggaaggctgcgaacgttctgatggcccgtgtgagcagtcctcgcaggagacaccaccagctgtggcagcttggggcggggtgggtagtggtcactgcggtctgggagtgctcagatagcccgcagaacaaatcatgtcaccaagcttcaagccatggaggttccttccctctcacctgcatttttgcccgtctttatgagggtcttgaaaatcaaaatagtagttgcacagtatgtgtaggaaagacagtactggaacggcaaggtttctcagcttatcttcagcaacatatatactggattagggcaagagaaggaatcacccagcacttcaccagttgg

SEQ ID NO: 190059 - DNA, 5190 bp, Homo sapiens
  Payload ID: 17532
  Gene Symbol: TNR
  Gene Name: tenascin R
  Uniprot ID: Q92752
  ENST ID: ENST00000263525
  CDS Start-End: 556-4632
ccaggcttcctcctctctttcacgtcagaggcaggaaccgactgtgctaaggctgttggctcaacacccagaggagacgggcagacccagggagagtgagagaagggggtcctctctgacccaaggaattaccactagtggagtgaagccacctgactttttgatcttattttggttgcctcctcattctccttccacccgtagccctgacagcttgggtttcatttctttcgtggagccttgtctcttcctcccagaataggaggaagggaagagaagggaaagaggagggctctctaggtgagcgcatcagctggctccagcctgagcaagcaagaattttcttcccaggaagctcctctcgctccccggccgcccacccccagcctgggtggctgtatcgttttaactgcatagagggcaggtctcttttggaattaggattaaagaaagtgcagtaaagagaaagcatcgaagacaccatcacaaaagattcccacaactccatgctgtgtgctgcaggctggtcctgaacccagatctctggctgagaggatgggggcagatggggaaacagtggttctgaagaacatgctcattggcatcaacctgatccttctgggctccatgatcaagccttcagagtgtcagctggaggtcaccacagaaagggtccagagacagtcagtggaggaggagggaggcattgccaactacaacacatccagcaaagagcagcctgtggtcttcaaccacgtgtacaacattaacgtgcccttggacaacctctgctcctcagggctagaggcctctgctgagcaggaggtgagtgcagaagacgagactctggcagagtacatgggccagacctcagaccacgagagccaggtcacctttacacacaggatcaacttccccaaaaaggcctgtccatgtgccagttcagcccaggtgctgcaggagctgctgagccggatcgagatgctggagagggaggtgtcggtgctgcgagaccagtgcaacgccaactgctgccaagaaagtgctgccacaggacaactggactatatccctcactgcagtggccacggcaactttagctttgagtcctgtggctgcatctgcaacgaaggctggtttggcaagaattgctcggagccctactgcccgctgggttgctccagccggggggtgtgtgtggatggccagtgcatctgtgacagcgagtacagcggggatgactgttccgaactccggtgcccaacagactgcagctcccgggggctctgcgtggacggggagtgtgtctgtgaagagccctacactggcgaggactgcagggaactgaggtgccctggggactgttcggggaaggggagatgtgccaacggtacctgtttatgcgaggagggctacgttggtgaggactgcggccagcggcagtgtctgaatgcctgcagtgggcgaggacaatgtgaggaggggctctgcgtctgtgaagagggctaccagggccctgactgctcagcagttgcccctccagaggacttgcgagtggctggtatcagcgacaggtccattgagctggaatgggacgggccgatggcagtgacggaatatgtgatctcttaccagccgacggccctggggggcctccagctccagcagcgggtgcctggagattggagtggtgtcaccatcacggagctggagccaggtctcacctacaacatcagcgtctacgctgtcattagcaacatcctcagccttcccatcactgccaaggtggccacccatctctccactcctcaagggctacaatttaagacgatcacagagaccaccgtggaggtgcagtgggagcccttctcattttccttcgatgggtgggaaatcagcttcattccaaagaacaatgaagggggagtgattgctcaggtccccagcgatgttacgtcctttaaccagacaggactaaagcctggggaggaatacattgtcaatgtggtggctctgaaagaacaggcccgcagcccccctacctcggccagcgtctccacagtcattgacggccccacgcagatcctggttcgcgatgtctcggacactgtggcttttgtggagtggattccccctcgagccaaagtcgatttcattcttttgaaatatggcctggtgggcggggaaggtgggaggaccaccttccggctgcagcctcccctgagccaatactcagtgcaggccctgcggcctggctcccgatacgaggtgtcagtcagtgccgtccgagggaccaacgagagcgattctgccaccactcagttcacaacagagatcgatgcccccaagaacttgcgagttggttctcgcacagcaaccagccttgacctcgagtgggataacagtgaagccgaagttcaggagtacaaggttgtgtacagcaccctggcgggtgagcaatatcatgaggtactggtccccaggggcattggtccaaccaccagggccaccctgacagatctggtacctggcactgagtatggagttggaatatctgccgtcatgaactcacagcaaagcgtgccagccaccatgaatgccaggactgaacttgacagtccccgagacctcatggtgacagcctcctcggagacctccatctccctcatctggaccaaggccagtggccccattgaccactaccgaattacctttaccccatcctctgggattgcctcagaagtcaccgtacccaaggacaggacctcatacacactaacagatctagagcctggggcagagtacatcatttccgtcactgctgagaggggtcggcagcagagcttggagtccactgtggatgctttcacaggcttccgtcccatctctcatctgcacttttctcatgtgacctcctccagtgtgaacatcacttggagtgatccatctcccccagcagacagactcattcttaactacagccccagggatgaggaggaagagatgatggaggtctccctggatgccaccaagaggcatgctgtcctgatgggcctgcaaccagccacagagtatattgtgaaccttgtggctgtccatggcacagtgacctctgagcccattgtgggctccatcaccacaggaattgatcccccaaaagacatcacaattagcaatgtgaccaaggactcagtgatggtctcctggagccctcctgttgcatctttcgattactaccgagtatcatatcgacccacccaagtgggacgactagacagctcagtggtgcccaacactgtgacagaattcaccatcaccagactgaacccagctaccgaatacgaaatcagcctcaacagcgtgcggggcagggaggaaagcgagcgcatctgtactcttgtgcacacagccatggacaaccctgtggatctgattgctaccaatatcactccaacagaagccctgctgcagtggaaggcaccagtgggtgaggtggagaactacgtcattgttcttacacactttgcagtcgctggagagaccatccttgttgacggagtcagtgaggaatttcggcttgttgacctgcttcctagcacccactatactgccaccatgtatgccaccaatggacctctcaccagtggcaccatcagcaccaacttttctactctcctggaccctccggcaaacctgacagccagtgaagtcaccagacaaagtgccctgatctcctggcagcctcccagggcagagattgaaaattatgtcttgacctacaaatccaccgatggaagccgcaaggagctgattgtggatgcagaagacacctggattcgactggagggcctgttggagaacacagactacacggtgctcctgcaggcagcacaggacaccacgtggagcagcatcacctccaccgctttcaccacaggaggccgggtgttccctcatccccaagactgtgcccagcatttgatgaatggagacactttgagtggggtttaccccatcttcctcaatggggagctgagccagaaattacaagtgtactgtgatatgaccaccgacgggggcggctggattgtattccagaggcggcagaatggccaaactgattttttccggaaatgggctgattaccgtgttggcttcgggaacgtggaggatgagttctggctggggctggacaatatacacaggatcacatcccagggccgctatgagctgcgcgtggacatgcgggatggccaagaggccgccttcgcctcctacgacaggttctctgtcgaggacagcagaaacctgtacaaactccgcataggaagctacaacggcactgcgggggactccctcagctatcatcaaggacgccctttctccacagaggatagagacaatgatgttgcagtgactaactgtgccatgtcgtacaagggagcatggtggtataagaactgccaccggaccaacctcaatgggaagtacggggagtccaggcacagtcagggcatcaactggtaccattggaaaggccatgagttctccatcccctttgtggaaatgaagatgcgcccctacaaccaccgtctcatggcagggagaaaacggcagtccttacagttctgagcagtgggcggctgcaagccaaccaatattttctgtcatttgtttgtattttataatatgaaacaaggggggagggtaatagcaatgtgttttgcaacatattaagagtatgtgaaggaagcagggatgtcgcaggaatccgctggctaacatctgctcttggtttctgctgccctggagcctgaccctcagtctccattctccctcctacccaggcctcctcaaccttcacctcctttcccaccaaggaggagaagtaggaagttttcttaaagggccaattcaaagccaagtcgtggggtgcagattgttatggtgacaggcacacacatttttctacccttcttctgagatgtcctctgccttccaggtatttgtgattttgtcacagcctgacatggccaggttctcacactggcccagagaaaagagcctcagcaagagagttttgccaacaattccccttaaaaggaaacagatcaactacaccgcatcccaacaacccaggttcttttccttccttccttccttcctcccttccttctttcctgccttccc

SEQ ID NO: 190060 - DNA, 12949 bp, Homo sapiens
  Payload ID: 17532
  Gene Symbol: TNR
  Gene Name: tenascin R
  Uniprot ID: Q92752
  ENST ID: ENST00000367674
  CDS Start-End: 710-4786
cactagggggctgcttgtagggggatggaaaaaacggaggcttaaaaaaatcatgctgctgaaatttcagcaagaggggaaaagagagagcgcgtgagagagagagagagagagagagagagagagagagagagagagagacagcaaagcagtcccaggcttcctcctctctttcacgtcagaggcaggaaccgactgtgctaaggctgttggctcaacacccagaggagacgggcagacccagggagagtgagagaagggggtcctctctgacccaaggaattaccactagtggagtgaagccacctgactttttgatcttattttggttgcctcctcattctccttccacccgtagccctgacagcttgggtttcatttctttcgtggagccttgtctcttcctcccagaataggaggaagggaagagaagggaaagaggagggctctctaggtgagcgcatcagctggctccagcctgagcaagcaagaattttcttcccaggaagctcctctcgctccccggccgcccacccccagcctgggtggctgtatcgttttaactgcatagagggcaggtctcttttggaattaggattaaagaaagtgcagtaaagagaaagcatcgaagacaccatcacaaaagattcccacaactccatgctgtgtgctgcaggctggtcctgaacccagatctctggctgagaggatgggggcagatggggaaacagtggttctgaagaacatgctcattggcatcaacctgatccttctgggctccatgatcaagccttcagagtgtcagctggaggtcaccacagaaagggtccagagacagtcagtggaggaggagggaggcattgccaactacaacacatccagcaaagagcagcctgtggtcttcaaccacgtgtacaacattaacgtgcccttggacaacctctgctcctcagggctagaggcctctgctgagcaggaggtgagtgcagaagacgagactctggcagagtacatgggccagacctcagaccacgagagccaggtcacctttacacacaggatcaacttccccaaaaaggcctgtccatgtgccagttcagcccaggtgctgcaggagctgctgagccggatcgagatgctggagagggaggtgtcggtgctgcgagaccagtgcaacgccaactgctgccaagaaagtgctgccacaggacaactggactatatccctcactgcagtggccacggcaactttagctttgagtcctgtggctgcatctgcaacgaaggctggtttggcaagaattgctcggagccctactgcccgctgggttgctccagccggggggtgtgtgtggatggccagtgcatctgtgacagcgagtacagcggggatgactgttccgaactccggtgcccaacagactgcagctcccgggggctctgcgtggacggggagtgtgtctgtgaagagccctacactggcgaggactgcagggaactgaggtgccctggggactgttcggggaaggggagatgtgccaacggtacctgtttatgcgaggagggctacgttggtgaggactgcggccagcggcagtgtctgaatgcctgcagtgggcgaggacaatgtgaggaggggctctgcgtctgtgaagagggctaccagggccctgactgctcagcagttgcccctccagaggacttgcgagtggctggtatcagcgacaggtccattgagctggaatgggacgggccgatggcagtgacggaatatgtgatctcttaccagccgacggccctggggggcctccagctccagcagcgggtgcctggagattggagtggtgtcaccatcacggagctggagccaggtctcacctacaacatcagcgtctacgctgtcattagcaacatcctcagccttcccatcactgccaaggtggccacccatctctccactcctcaagggctacaatttaagacgatcacagagaccaccgtggaggtgcagtgggagcccttctcattttccttcgatgggtgggaaatcagcttcattccaaagaacaatgaagggggagtgattgctcaggtccccagcgatgttacgtcctttaaccagacaggactaaagcctggggaggaatacattgtcaatgtggtggctctgaaagaacaggcccgcagcccccctacctcggccagcgtctccacagtcattgacggccccacgcagatcctggttcgcgatgtctcggacactgtggcttttgtggagtggattccccctcgagccaaagtcgatttcattcttttgaaatatggcctggtgggcggggaaggtgggaggaccaccttccggctgcagcctcccctgagccaatactcagtgcaggccctgcggcctggctcccgatacgaggtgtcagtcagtgccgtccgagggaccaacgagagcgattctgccaccactcagttcacaacagagatcgatgcccccaagaacttgcgagttggttctcgcacagcaaccagccttgacctcgagtgggataacagtgaagccgaagttcaggagtacaaggttgtgtacagcaccctggcgggtgagcaatatcatgaggtactggtccccaggggcattggtccaaccaccagggccaccctgacagatctggtacctggcactgagtatggagttggaatatctgccgtcatgaactcacagcaaagcgtgccagccaccatgaatgccaggactgaacttgacagtccccgagacctcatggtgacagcctcctcggagacctccatctccctcatctggaccaaggccagtggccccattgaccactaccgaattacctttaccccatcctctgggattgcctcagaagtcaccgtacccaaggacaggacctcatacacactaacagatctagagcctggggcagagtacatcatttccgtcactgctgagaggggtcggcagcagagcttggagtccactgtggatgctttcacaggcttccgtcccatctctcatctgcacttttctcatgtgacctcctccagtgtgaacatcacttggagtgatccatctcccccagcagacagactcattcttaactacagccccagggatgaggaggaagagatgatggaggtctccctggatgccaccaagaggcatgctgtcctgatgggcctgcaaccagccacagagtatattgtgaaccttgtggctgtccatggcacagtgacctctgagcccattgtgggctccatcaccacaggaattgatcccccaaaagacatcacaattagcaatgtgaccaaggactcagtgatggtctcctggagccctcctgttgcatctttcgattactaccgagtatcatatcgacccacccaagtgggacgactagacagctcagtggtgcccaacactgtgacagaattcaccatcaccagactgaacccagctaccgaatacgaaatcagcctcaacagcgtgcggggcagggaggaaagcgagcgcatctgtactcttgtgcacacagccatggacaaccctgtggatctgattgctaccaatatcactccaacagaagccctgctgcagtggaaggcaccagtgggtgaggtggagaactacgtcattgttcttacacactttgcagtcgctggagagaccatccttgttgacggagtcagtgaggaatttcggcttgttgacctgcttcctagcacccactatactgccaccatgtatgccaccaatggacctctcaccagtggcaccatcagcaccaacttttctactctcctggaccctccggcaaacctgacagccagtgaagtcaccagacaaagtgccctgatctcctggcagcctcccagggcagagattgaaaattatgtcttgacctacaaatccaccgatggaagccgcaaggagctgattgtggatgcagaagacacctggattcgactggagggcctgttggagaacacagactacacggtgctcctgcaggcagcacaggacaccacgtggagcagcatcacctccaccgctttcaccacaggaggccgggtgttccctcatccccaagactgtgcccagcatttgatgaatggagacactttgagtggggtttaccccatcttcctcaatggggagctgagccagaaattacaagtgtactgtgatatgaccaccgacgggggcggctggattgtattccagaggcggcagaatggccaaactgattttttccggaaatgggctgattaccgtgttggcttcgggaacgtggaggatgagttctggctggggctggacaatatacacaggatcacatcccagggccgctatgagctgcgcgtggacatgcgggatggccaagaggccgccttcgcctcctacgacaggttctctgtcgaggacagcagaaacctgtacaaactccgcataggaagctacaacggcactgcgggggactccctcagctatcatcaaggacgccctttctccacagaggatagagacaatgatgttgcagtgactaactgtgccatgtcgtacaagggagcatggtggtataagaactgccaccggaccaacctcaatgggaagtacggggagtccaggcacagtcagggcatcaactggtaccattggaaaggccatgagttctccatcccctttgtggaaatgaagatgcgcccctacaaccaccgtctcatggcagggagaaaacggcagtccttacagttctgagcagtgggcggctgcaagccaaccaatattttctgtcatttgtttgtattttataatatgaaacaaggggggagggtaatagcaatgtgttttgcaacatattaagagtatgtgaaggaagcagggatgtcgcaggaatccgctggctaacatctgctcttggtttctgctgccctggagcctgaccctcagtctccattctccctcctacccaggcctcctcaaccttcacctcctttcccaccaaggaggagaagtaggaagttttcttaaagggccaattcaaagccaagtcgtggggtgcagattgttatggtgacaggcacacacatttttctacccttcttctgagatgtcctctgccttccaggtatttgtgattttgtcacagcctgacatggccaggttctcacactggcccagagaaaagagcctcagcaagagagttttgccaacaattccccttaaaaggaaacagatcaactacaccgcatcccaacaacccaggttcttttccttccttccttccttcctcccttccttctttcctgccttccctccttccctcctttctttcttgacagtatctcactcttgctcagtctggagtgcagtggtgcaatctcagctcactacagcctcgacttcctgagcttaagtgatcctctcgtctcagcctcttgagtagctgggactacaggcatgagccaccatacctggctgatttttcttttattttttgtagagatgggggtctcactgtgttgtccaggctggtcacaaactcctggccttgaacaatcctcccacctcagcctcccaaaatgctgggattacaggctacagccactgcatccagccccaagtcctttataatgggccaaagattctcatcttctgacactcttattataccagccacatgtcctgttacctttcaagaacagtggctcttttctggccctgatggagtcttttgcctaatcccatcctgtcttagaccccagagcctcaaaagcccaaccagcattttggaatctagttcccaaggcattgcctgctcctggccctgggtggcacagtggctatgtgcctgtgagtcatcagccactgcccccaccctcaggtcagacagacagtcactttctgcaaaggtaggagggggagatggttgtagtttttagcacttttgggtcaagcattgaggaaaggactgaagaagtcaaaatcagggcactgccatagagattatagtttccatgggaaacacagatcttccctagccctgttttctccatttctggtcctatttgtcacagattctttttttctgaattgcaaaccgaaggcctcatatctatcttcacccaagccctccttagtgtaggtggcttaataagagtcaggagaagaaggtatatgcccagagagctatacccctgactgataatcctggaaagaggttgattttttttttcttttttggtcctatgggaaacaggaatgaccttcttaatgaggtgagatcatgagaagcctttccatcttcttttattattctgccttgcaaaggaaaaatgacaatagccaaaggaaattacatccagaaatccaaaggtgaataggtgataactgtgggcctacttcccattttatgagatgcactgtcttcactagcacaatttgatcttaagcccaagagagctagatgctctagaagccgtgacctttcaatttctcctccaaatccaatatcagcaaccatccccgcaacatctgcccagatccatgcccagttccctgagctgtcttctccctttcctctcccattcctcaaggcccagcaccattttctgtagtgcctatgtttgtctgaccagagcagtgtgtacctttgccaaccagttactggatgagccttagtgtcggcaattttctaatggaaatatcctcactcttaccaagctttgagaaccaagatgaaaagtcccttgggctgaccatcaggcctcggacctcatggggatgcagccagccaccattgaatggaggcgcttcccttgccgcaggcttctaggctttgttcactgcggcagtgtggatgtgacaggcataaccctgaaaaacctaggcaccacttgcatttctcagttaaccatgggcttcaacaaactgggaggaggaaaaaacagaaacagatcctttcaacaagcatgtaaattacagaagacttacctagagacggggcaacaatgaatagtaggaagcacattgcatgggaaacttgagggccgaggtacaggccaacagctgtcatcttagctacgacatgacatcggctgggttgtttcacctctctgggccagtttcttcatctgtcagatgagagattagactagaatgagttctaatttccctttcagttttgacggtcaatgatgctaatctgtgatctgaaaacctaagtagaaattggcatggtgggacagcacaattaggtaatgaaaattcactagactccctgtttaatgaggaaagaaggaaagaaggaaggaaggaaggaaggaaagaaggaaggggagggagggagggaaagaaaagagagagattgattcaggagtcataagtaaaacacacacacacacacacacacacacacgaaaatactgcagaaaagatcatgccgagtgagaggctgaactctttttgtccataaaaacagagaccaggtacctgggtggtgccagcacgcccacttcatcaaggaagttgaaatggaaaaagattatgtgttgtcaattcaggtgaaagtcaagaaacatcagtggaaacaaaaatcttccttttattgaaaccattctacactatggaacatttttataaatagtaccagcggcattgcatagctttattttgaagcaagaaagagacttcaaagatcagcttattcaaccctctataaaaggatttatagattccttttatttaatagggtgattttctcatgagttttcaccatgtttaaaagacactgtgccccactctcatcccaaggtctatggtcaacttgactcaatgctcataactttcctcgctgattcctgcttatcctgctcctccaagcacaactgcatttcccaaaggtagatccagtaagcaatactctcaaagcacccaccctatgcacaccagtttccctcaagggactcaaaaggaatcgaggtagacccttctcagaggctgtttaactacagacacatcaggatatgtactaatacccaaaaccaaaaccaccaccaatgactgcaatagattcactgtctagacccaaggtccaggcagtttcccttttttgcatttccccaacatataaagataatttccaacatatcagatgcacattcaccagggttatttctggaaggtgaaggggtcaggtgtagaagaggtggcaagaatgacaagtctgtggaaaactgttggccttgagaccacagtgaactggtggaaggggacttgctaagtgtggccacaaggtggcagtcacctcctgaaaccccgtgtgaaacgtcagcggggttgagaaaggccacgtctccaagtttccaggagagccaaaccaggactcaggaaaaccggccagctgatttgtatgggagattgatttgtaaaagaacaacaacaacatatggcagcaaggaaatgcaaagcaaacatctacaaatatttgaatccacctgtccctcacctaccaacttccccctctactactcataaagtggtaggactcctaatgccccgcttccttccacctgagaaccaaccagcaccctgatatttcaaagccagacctaaagaaccatggttgccaataacctcaatgccaaaccaaacaatcctaatcacatttttacttttcaaatccagtctcagagcagagctgtagattaagggacaaaaagtcattgtggaatcttttcaaatagctcttgtaaaagcatcagttgggaaagagtttatgagttcctctttgtcctctcctctggagaaaagacagaacatgcaagaacactagatacaccaagctatgggtgttgaaatagactagctggtgacctggatttgcaaataccctagggacatgaaaacattttttctttttctttttcttttttgtaacctccacccagaatttcaggaaaggtggggccacatgcccaggatatatggtattctactgcttgctttcttatcaccagaatactagtcaatctgatttcttagttccatgtcttttcttccaaggaggtagggcatggggttgggggacactttccgccttccttgcatctcactgtccactcttaaatttttattaagaaacctctgaaagattcaaaattcagttcagtttcaataatcccaaagaagttgggataatttgttttcacttgcttcaaacttgccacggctgcaggaggagtctcaggacctcagaggaatggggcagatgtgtgaagtctgggagtctgcctcccacccagatgccaggagctgcatactcagctctgcctcacttccctgatggtctgctttcatccaggttaccatgacagagagggtctatcctctaaagaaagctgagttacaggctggcccctggggttgttcctgtagcctctctttgaccacattcctgaagatgtttagctgaatgcctcctcaaacctttgcttcttccataacccaatcctacacatatgtgataaagctttcttcaacaatactgggtcatttggacactaccagtccagatgagaactcacagaccaaatgaaaactttcaaaagcaagcagggaaagtaactcctatatgctttaagatgatgtattggtgtagattcaggtccaatttgaaaaaatgtctctggttctttctaattgtatccactctggatttgtttatgccagttctacattcatcaagccttgagaaacaggtggaaagaagaaaaatataaaattaagaagaagctgatggatcattggagattcaaaacaagccttctaccggtggcaccacactgaaaggcagagacaaggcaggagcggccatgggagaggaagcagcattggcttctcacgttctggcctccagcctcccaccagagcttctgccattcacccacttaacttgaggagaaactaaggcaccaaggcctgtcactgcaccgaaaaccagaagcagaaggactttctttctttgctcaaccagttctgcctggatctgacttttgcgtcaccagtagtcacaagcctgatttgtcatctccagcattctgtttatttttttaaggtcaatctttgcctgaaacatgacttcattgcacctgcagcacttcattgtccaaatgtccttggcaaacctcacagtctttggacagtgttgcattttctccaaaggggaaatcctctctccttcctcaagcttaataaggctcttgcagtgcatccaaataacacagctcttgttcctcagacacactcagccccctctgataacttcataaaacagctccttattgtctgggccatgaagccaggctaatgctaaagttccagttcaaaaacatttaactctattatccttatgaggccagctctcctgggtactggcactcactcactggcaccatggattcaggtcaggtggtgcaaacatcttccctgagaagcaagccatacacccaacaggtctagaacacctaggtcacaagaaagggtttcagtccagatgcactgtcagtaagtgaacacaaggacaagaatgcatgaactgttattttcttcccatcactggtttagcagcccctagggagaccctgtgttgctctttaatattctgacatggagcactaatatgctcaacactgcctccaacaggcaaatgttggaaatacactttcagagctggatgggactcaagatcatctaatataatcctctcattttatttcctctcaaggaaaccaagggcaagaaagtttaggcaatttgctcacattcacacaggcaattagtaacagagctgagttcgggtctggtataggctttttaatttgattctccacaaatgaacactaagataaatagcatttattgcatacccactatttaccagatactgtgcaaagggctttacatatattactttactaaatcctcaccataaactttaagtcaggtttaaccattttatagaagagggaagggagggccaggaaggttaagtaacatgctcaaagtcacacagctactaaatagagccataatctgaacctttgtctaattttgaagcccttgatttttccacttcatgaggctgctctttatatttatttagctgagtgaccaccatcttggattttactaatattcttacaagggggctttgatgccacttcttctgacttttaagaaaaggaaattcttgcattatttttgccatgtactccaggggaccctcaatctcatcatcatggggaataagaaacattctgacatctctttccttttctttctttttaaatttggtagacgagggagagggtccccaacagaatgagagggggaagataagaaccagaacataaacccaataccccccaccccactcttttgggaacatcccaacattagaagagtgggatatccagtcatttttttcaagctggagcaggcagtgtagccaggattgaggaaggagaagccacagaataaacatggcacatgttctcagagcatcaattttactccagaatttgggaagaaaggattatattattagtgtattcaaaccagtatggatagcacaaatgcagatatcctataaattttgaggctaactccagcaggttgtagactgatttaggctacctccttccagactcccaggggtacaaacaccttcacagtcccctgcgggagtacatcagtggaaatatttggggaatgaggctagaaggcaggagatacattcagtttacttatccccctggtttcttttccccactccttacctgccccacatccctagtgggtgggaaggcatcagaagacagttggctacaatatcagctttctctgctactttggggaatttagaaggaaatcagtacttggcaacctggtatttttagctgccaggccaaaactccagacataaaccccttccctttaattgaatgatgtttatatataaaggaatagatctccccaagaaagaaccccagaacactggttccattccagtgtgggggctgcttgggcagcagtgacacctgtgcattagatgcaatagacacttcaattcctgcaaaaatgtcggccaactaagtgctcctttaccaactgcggaggcccagactcacaccatggtcccacagactcaaggtttagaatctatgtgagtctattttggttaacacacaggctcctccttccaatcattcacacacacacacacacacacacacacacacacatgcacacacacacatgcatgcacacatacacaggtgcacatgcacaaacacacacatctaatgattccaacctcgaatactccccaggcccatggggatgcccaagtaccctaagcaaatcactgtgacactgagggggtcattaactggggctccgagcagctgaaacccaccctggtggtctctagattgttgttctgagaaatcataaacaccaaatcctccaatccctttgaatttgagtttgtcattttaacctttaacagccttttcaggtaaaaataacaaagaccaatttattgactttgtagctacaatgagcttgaaaaagcgcttacttaaaagaaagactggaaggaagaaaaaaaaaagaaaatggagtacatactcctcagacgatgcacactttaattagctaaaataaaaataaaaatgtacagaggaagggagaggaaaaaccaacttctctgatcctttcatggcactgtagctcaaagactggaatctctgcttgttaaccattgttaactagtatttttagtcctggttgcttttagcctctgtatagttccttttttaaacacattttctatacgttaataaaagatcctgaaagaaa

SEQ ID NO: 190061 - DNA, 540 bp, Homo sapiens
  Payload ID: 17532
  Gene Symbol: TNR
  Gene Name: tenascin R
  ENST ID: ENST00000422274
  CDS Start-End: 1-540
gatcaacttccccaaaaaggcctgtccatgtgccagttcagcccaggtgctgcaggagctgctgagccggatcgagatgctggagagggaggtgtcggtgctgcgagaccagtgcaacgccaactgctgccaagaaagtgctgccacagttgcccctccagaggacttgcgagtggctggtatcagcgacaggtccattgagctggaatgggacgggccgatggcagtgacggaatatgtgatctcttaccagccgacggccctggggggcctccagctccagcagcgggtgcctggagattggagtggtgtcaccatcacggagctggagccaggtctcacctacaacatcagcgtctacgctgtcattagcaacatcctcagccttcccatcactgccaaggtggccacccatctctccactcctcaagggctacaatttaagacgatcacagagaccaccgtggaggtgcagtgggagcccttctcattttccttcgatgggtgggaaatcagcttcattccaaagaacaatgaagg

SEQ ID NO: 190062 - DNA, 13132 bp, Homo sapiens
  Payload ID: 17533
  Gene Symbol: TNXB
  Gene Name: tenascin XB
  Uniprot ID: P22105
  ENST ID: ENST00000375244
  CDS Start-End: 203-12937
tcctccccttctcctcccctgctcgctgcagactccctcctcactgtcgctgccgagatccacagtcggttgtggctcagcccctgttgcaggggacaagtgagggagacttccctgtcctgccctgagacgccgccctcccggggttggggacagagcaggtgcagaggcactgcagctgctcggttgcccagcctcctgaatgatgccagcccagtatgctctaacctccagcctggttctcctggtgctgctgagcacagccagagcaggccccttctcttcacggtccaatgtgacactgccagccccccggccccctccccagccagggggccacacagtgggggctggagtgggaagcccctcttctcagctttacgagcacacagtggaaggaggggagaagcaggtggtattcacccaccgcattaacctgcccccttccactggctgtggctgtcccccaggcaccgagcccccagtccttgcttcagaggtacaggccctgagggtccgtctagagatcctggaggagttggtgaaggggctcaaggaacagtgcactgggggatgttgtcctgcctctgcccaagctggcacaggtcagacagatgtgcggaccctctgcagtctccatggtgtgtttgatctgagccgctgcacctgttcctgtgagccaggctggggtgggcccacctgctcagaccccacagatgctgagatccctccctcttccccaccctcagcctcggggtcctgcccagatgactgcaatgatcagggtcgctgtgtccgtggtcgttgcgtgtgctttcccggctacactggccccagctgtggctggccatcctgtcccggggactgccaaggccgtgggcgctgcgtgcagggcgtgtgtgtgtgccgggcaggcttctcaggccccgactgcagccagcgctcctgccctcgaggttgcagccagaggggacgctgtgagggtgggcgctgcgtgtgtgacccaggctacactggtgacgactgtggcatgaggagctgccctcgcggttgcagtcagagggggcgctgtgagaatgggcgctgcgtgtgtaaccccggctacactggcgaggactgtggggtgaggagctgccctcggggctgcagccagcggggacgctgcaaggacgggcgctgcgtgtgtgaccccggctacactggcgaggactgtggtacgcggagctgcccctgggactgtggcgagggcgggcgctgcgtggacggccgctgcgtgtgctggcccgggtacacaggcgaggactgcagcacgcggacatgtccgagggactgccggggccgcgggcgctgcgaggacggcgaatgcatttgcgacacgggctacagcggggacgactgcggcgtgcgcagctgccctggcgactgcaaccaaaggggccgctgcgaggacggccgctgcgtgtgctggccggggtacactggaaccgattgcggctcgcgcgcctgcccacgcgactgtagaggtcgcgggcgctgcgagaacggcgtgtgtgtttgcaatgcgggctacagcggcgaggactgcggtgtgcgcagctgtcctggggactgtcgtggccggggccgctgtgagagtggccgctgcatgtgttggccggggtacacaggccgggactgcggcacgcgcgcctgtcctggcgactgtcgcgggcgcgggcgctgcgtggatggccgctgcgtgtgcaacccgggcttcaccggtgaggactgtgggagccgtcgctgtcccggggactgccgtgggcacggcctttgcgaggatggcgtgtgcgtgtgtgacgcaggctactcaggggaagactgcagcacgcgcagctgccccgggggctgccgaggccgcggccagtgcctagatgggcggtgtgtgtgcgaggacggctactctggcgaggattgcggtgtgaggcagtgcccgaatgactgcagccagcacggcgtgtgccaggacggtgtgtgcatctgttgggaaggctacgtgagtgaggactgcagcatccgcacctgcccctccaactgccacgggaggggccgctgtgaggaagggcgctgcctgtgcgacccaggctacaccggccctacctgtgccacccgcatgtgcccggctgactgccggggacgtgggcggtgtgtgcaaggagtgtgcctgtgccacgtgggctatggcggtgaggactgcgggcaggaagagcctccagccagcgcctgccctggaggctgcgggccccgggaactgtgccgggcaggccagtgtgtgtgtgtagagggcttccgaggccctgactgtgccatccagacatgcccaggggactgccgtggccgaggagagtgtcacgatggcagctgtgtctgcaaagatgggtatgctggcgaagactgcggagaagaggtgccaaccattgagggcatgaggatgcatctcttggaggagacaacagttcggacagagtggaccccggctcctggccccgtggatgcctatgaaattcagttcatccccacgacagagggggcgagccccccattcacagcacgggttccaagctctgcctcagcctatgaccagagaggactggcccctggacaggagtaccaggtcactgtccgagcccttcgagggaccagctggggccttcctgcctccaagaccatcaccaccatgatcgatgggccccaggacctccgagtggtggctgtgacaccgacaacactggagcttggctggctgcgtccccaggctgaggtggaccgatttgtggtgtcctacgtcagtgccggcaaccagagggtgaggctggaagtgccccctgaagcagacgggacgctgctgactgacctgatgccaggcgtagaatatgtggtgactgtcacagcggagcggggccgggcagtcagctacccagcttctgtcagggccaacacagggtcctcacccttgggcctcttggggactaccgatgagcctcctccctcaggcccctcgacgacgcaaggggcccaggctcctctcctgcagcagcgcccccaggagctgggagagttgagggtgctgggcagagatgagacagggcgcctccgtgtggtctggaccgcccagcctgacacctttgcctacttccaactgcgcatgcgggtgcccgaggggccgggggcacatgaggaagtgctgccaggggacgtccgccaggctctggtgcctccaccccctcctggaaccccgtatgagctgtcacttcatggggtccctcctgggggcaagccctctgaccccatcatctaccaaggcattatggacaaggatgaggagaagcctgggaagtcctcaggcccaccacgcctgggtgagctgacggtgacagacaggacctccgactccttgctcctgcgctggacggtccccgagggcgagtttgactccttcgtgatccagtacaaagacagggacgggcagccccaggtggtgcccgtggaaggaccccagcgctcggccgtcatcacctccctggatcctggccgcaagtacaaatttgtcctgtatgggtttgttggcaagaagaggcatggtccgctggtggctgaagccaagatcttgcctcagagtgacccaagtccagggactccaccccacctgggaaacctgtgggtgacagaccctaccccagattcactgcacctctcctggactgtccctgagggccagtttgacaccttcatggtccagtacagggacagggatggacggccccaggtggtacctgtggaagggcccgagcgttcatttgttgtctcctcactggaccctgaccacaagtacagattcactctgtttggaattgcgaacaagaagcggtatggccccctcacggccgatggcaccactgctccagagaggaaagaggagcccccccgccctgagttcctggagcagcccctcctgggggaactgacagtgaccggcgtgaccccagactccttgcgtctctcatggacagtggcccagggccccttcgactcattcatggtccagtacaaggatgcacaggggcagccccaggcagtgcctgttgcgggggatgagaatgaggttactgtccccggcctggatcccgaccggaagtataagatgaacctctacgggcttcgtggcaggcagcgtgtggggcccgagtctgtggtggccaagactgctcctcaggaggatgtggacgagacccccagccccacagaactgggcacggaggccccggagtcccccgaggagccgctcctgggggagctgacagtgacaggatcctcccctgattcgctgagcctcttctggaccgtcccccagggcagcttcgactctttcaccgtgcagtacaaggacagggatgggcggccccgggcggtgcgtgttgggggcaaggagagtgaggtcaccgtgggaggcctagagcccgggcacaagtacaagatgcacctgtacggcctccacgaggggcagcgcgtgggcccggtgtccgccgtgggcgtgacagccccacaacaagaagagacccctccagccactgagtccccgctggagccacgcctaggagagctgacagtgacagatgtgacccccaactctgtgggcctctcctggacagtccccgagggccagtttgactccttcatagtccagtacaaggacaaggacgggcagccccaggtggtgccggtggcggcagaccagcgagaggtcacagtctacaacctggagcctgagagaaaatataagatgaacatgtatggactacatgatgggcaacgcatgggccccctgtctgtggtcatcgtgacggctcccctcccaccagccccagccacagaggcctccaagcctcccctggagccacgcctaggggagctgacagtgacggatataacccctgactctgtgggcctctcatggacagtccctgagggtgaattcgactcctttgtggttcagtacaaggacagggacgggcagccccaggtggtgcccgtggctgcagatcagcgggaggtcactatccctgacctggaaccctcccgcaagtacaagttcctgctctttgggatccaggatgggaaacgacgcagcccagtctctgtggaggcaaagacggttgcccgaggtgacgccagcccaggggccccaccccgccttggggagctgtgggtgacagaccccaccccagactcactgcgcctctcctggacggttcctgagggccagttcgactcttttgtggtccagttcaaggacaaagacgggccccaggtggtgcccgtggagggccatgagcgctctgtcactgtcacccctctggatgccggccgcaagtacagattcctcctctatggcctcctgggcaagaagcgccatggccctctcactgccgacggcaccacggaagcccggagtgctatggatgatactggaacaaagcgtcccccaaaaccccgtctgggggaggagctgcaggtgaccaccgtgacccagaactccgtgggcctctcctggacagtccctgagggccagtttgactcctttgtggtccagtacaaagacagggacgggcagccccaggtggtgcccgtggagggcagcctcagggaggtcagcgtgccgggcctggaccctgcccacaggtacaagctgctgctctacgggctgcaccacggcaagcgtgtgggccccatctcggccgtcgccattactgccggcagggaagaaacggaaactgagaccacggccccgacccctccagcgcctgagccccacctcggggagttgacagtggaggaggccacgtcacacaccctgcatctctcctggatggtgactgagggagaatttgactccttcgaaatccagtacacagatagagacgggcaactccaaatggtccgcataggaggtgaccggaatgacatcaccctctctggcctggaatccgaccacagatacctggtgaccctgtatggtttcagtgatgggaagcatgtaggtcctgtccatgtcgaggccctgacagtcccggaggaggagaagccttcagaacctcccaccgcaacccccgagccccccatcaagcctcgcctgggggagctgaccgtgacagatgccacccctgactccctcagcctgtcctggacagttcccgagggacagtttgaccacttcctggtccagtacaggaatggagatgggcagcccaaggcagtgagggtgccagggcacgaggaaggggtcaccatctcgggcctggagccagaccataaatacaagatgaacctgtacggcttccacggtggccagcgcatgggccctgtgtctgtcgtcggggtgacagctgcagaggaagagacccccagccccacagaacccagcatggaggccccggagcccgctgaggagccgctcctgggggagctaacagtgacaggatcctcccctgactcgctgagcctctcctggaccgtcccccagggccgcttcgactccttcaccgtgcagtacaaggacagggacgggcggccccaggtggtgcgtgttgggggcgaggagagtgaagtcaccgtggggggcctggagcctgggcgcaagtacaagatgcacctgtacggcctccacgaggggcggcgcgtgggcccagtgtctgctgtgggcgtcacggcccccgaagaggagtcccctgatgctcctcttgcaaagctgcgcctagggcagatgacagtgagagacatcacctccgactccctcagcctctcctggacagtccccgagggccagtttgaccatttcttggtccagtttaagaatggggacgggcagcccaaggcggtgcgggtgccgggacacgaggatggggtcaccatctcgggcctggagccagaccacaagtacaagatgaacctgtacggcttccacggtggccagcgcgtgggccccgtgtctgctgttggtttaactgccccaggaaaggatgaagaaatggccccagcctcgacagaacctcccacccctgaaccccccatcaagcctcgcctggaggagctgaccgtgacagatgcgacccctgactccctcagcctgtcctggacggttcccgagggacagtttgaccacttcctggtccagtacaagaatggggatgggcagcccaaggcaacacgggtgccaggacatgaggacagggtcaccatctccggcctggagccagacaacaagtacaagatgaacctgtacggcttccacggtggccagcgtgtgggccccgtgtctgccatcggggtgacagctgcagaggaagagacccccagccccacagaacccagcatggaggccccggagccccctgaggagccgctcctgggggagctaacagtgacaggatcctcccctgactcgctgagcctctcctggaccgtcccccagggccgcttcgactccttcaccgtgcagtacaaggacagggacgggcggccccaggtggtgcgtgttgggggcgaggagagcgaggtcaccgtggggggcctggagcctgggcgcaaatacaagatgcacctgtatggcctccacgaggggcggcgcgtgggcccggtgtccaccgtgggcgtgactgccccacaagaggatgtggacgagacccccagccctacagaaccaggcacagaggccccagggccccccgaggagcctctcctgggggagctgacagtgacaggatcctcccctgactcgctgagcctttcctggaccgtcccccagggccgctttgactccttcaccgtgcagtacaaggacagggacgggcggccccaggcggtgcgtgttgggggccaggagagcaaggtcactgtgaggggcctggagcctgggcgcaagtacaagatgcacctgtacggcctccacgaggggcggcgcctgggcccggtgtctgccgtgggcgtcacagaggatgaagccgagaccacccaagcagtgcctaccatgacccctgagccccccatcaagcctcgcctgggggagctgaccatgacagatgccacccctgactccctcagcctgtcctggacggttcccgagggccagtttgaccacttcctggtccagtacaggaatggggatgggcagcccaaggcggtgcgggtgccggggcacgaggacggggtcaccatctcaggcctggagccagaccataaatacaagatgaacctgtacggcttccacggtggccagcgcgtgggccccatctctgtcattggggtgacggctgcagaggaagagacccccagccccacggaactcagcactgaggccccggagccccctgaggagccgctcctgggggagctgacagtgacaggatcctcccctgactcgctgagcctctcctggaccatcccccagggccacttcgactccttcaccgtgcagtacaaggacagggacgggcggccccaggtgatgcgtgtcaggggcgaggagagcgaggtcaccgtggggggcctggagcccgggcgcaaatacaagatgcacctgtacggcctccacgaggggcggcgtgtgggcccggtgtccaccgtgggtgtgacagctccagaggatgaagcagagaccacccaagcagtgcccaccacaacccctgagccccccaacaagcctcgcctcggggagctgaccgtgacagatgccacccctgactccctcagcctgtcctggatggtccccgagggccagtttgaccacttcctggtccagtacaggaatggggatgggcagcccaaggtggtgcgggtgccggggcacgaggacggggtcaccatctcaggcctggagccagaccacaagtacaagatgaacctgtacggcttccacggtggccagcgcgtgggccccatctctgtcattggggtgacagctgcagaggaagaaactcccgcccccacagaacccagcacggaggccccggagccccctgaggagccgctcctgggggagctgacagtgacaggatcctcccctgactcgctgagcctctcctggaccatcccccagggccgcttcgactccttcactgtgcagtacaaggacagggacgggcggccccaggtggtgcgtgtcaggggcgaggagagcgaggtcaccgtggggggcctggagcccgggtgcaaatacaagatgcacctgtacggcctccacgaggggcagcgcgtgggcccagtgtccgctgtgggtgtgacagctccaaaggatgaagccgagaccacccaagcagtgcctaccatgacccctgagccccccatcaagcctcgcctgggggagctgaccgtgacagatgccacccccgactccctcagcctgtcctggatggttcccgagggccagtttgaccacttcctggtccagtacaggaatggggatgggcagcccaaggcggtgcgggtgccggggcacgaggacggggtcaccatctcaggcctggagccagaccataaatacaagatgaacctgtacggcttccacggtggccagcgcgtaggccctgtgtctgccattggggtgacggaggaagagacccccagccccacagaacccagcactgaggccccggaggcccctgaggagccgctcctgggggagttgacagtgacaggatcctcccctgactcgctgagcctctcctggaccgtcccccagggccgcttcgactccttcaccgtgcagtacaaggacagggacgggcagccccaggtggtgcgtgtcaggggcgaggagagcgaggtcaccgtggggggcctggagcccgggcgcaaatacaagatgcatctgtacggcctccacgaggggcagcgcgtgggcccagtgtccaccgtgggcatcacggcgcccctgcccacaccactgccggtggagccccgcctgggggagctggcggtggcggccgtgacctcggactcagtgggcctctcatggacggtggcccagggcccctttgactccttcctggtacagtacagggacgcgcaggggcagccccaggcagtgcctgtgagcggagacctccgagcggtcgccgtctcggggctggacccggcccgcaagtacaagttcctgctctttggactccagaatgggaaacgccacggcccagtccctgtggaggccaggaccgccccagacaccaaaccgtctccccgcctgggggagctgactgtgacagatgcgacccctgactccgtgggcctctcgtggacggtccctgagggcgaattcgactccttcgtggtccagtacaaggataaggatggtcggctccaggtggtgccggtggcagccaaccagcgggaggtcacagtccagggcctggagcccagtaggaaatacaggttcctgctctatggtctgtcaggcaggaaacgactgggccccatctctgctgacagcaccacagctcccctggagaaggagctacctccccacctgggggaactgaccgtggctgaggagacctccagctctctgcgcctgtcctggacggtagcccagggcccctttgactccttcgtggtccagtacagggacacggacgggcagcccagggcagtgcctgtggccgcagaccagcgcacagtcaccgtagaggacctggagcctggcaagaaatacaagtttctgctctacgggctccttgggggaaagcgcctgggcccggtctctgccctgggaatgacagccccagaagaggacacaccagccccagagttagccccagaggcccctgagcctcctgaagagccccgcctaggagtgctgaccgtgaccgacacaaccccagactccatgcgcctctcgtggagcgtggcccagggcccctttgattccttcgtggtccagtatgaggacacgaacgggcagccccaggccttgctcgtggacggcgaccagagcaagatcctcatctcaggcctggagcccagcaccccctacaggttcctcctctatggcctccatgaagggaagcgcctggggcccctctcagctgagggcaccacagggctggctcctgctggtcagacctcagaggagtcaaggccccgcctgtcccagctgtctgtgactgacgtgaccaccagttcactgaggctcaactgggaggccccaccgggggccttcgactccttcctgctccgctttggggttccatcaccaagcactctggagccgcatccgcgtccactgctgcagcgcgagctgatggtgccggggacgcggcactcggccgtgctccgggacctgcgttccgggactctgtacagcctgacactgtatgggctgcgaggaccccacaaggccgacagcatccagggaaccgcccgcaccctcagcccagttctggagagcccccgtgacctccaattcagtgaaatcagggagacctcagccaaggtcaactggatgcccccaccatcccgggcggacagcttcaaagtctcctaccagctggcggacggaggggagcctcagagtgtgcaggtggatggccaggcccggacccagaaactccaggggctgatcccaggcgctcgctatgaggtgaccgtggtctcggtccgaggctttgaggagagtgagcctctcacaggcttcctcaccacggttcctgacggtcccacacagttgcgtgcactgaacttgaccgagggattcgccgtgctgcactggaagcccccccagaatcctgtggacacctatgacgtccaggtcacagcccctggggccccgcctctgcaggcggagaccccaggcagcgcggtggactaccccctgcatgaccttgtcctccacaccaactacaccgccacagtgcgtggcctgcggggccccaacctcacttccccagccagcatcaccttcaccacagggctagaggcccctcgggacttggaggccaaggaagtgaccccccgcaccgccctgctcacttggactgagcccccagtccggcccgcaggctacctgctcagcttccacacccctggtggacagaaccaggagatcctgctcccaggagggatcacatctcaccagctccttggcctctttccctccacctcctacaatgcacggctccaggccatgtggggccagagcctcctgccgcccgtgtccacctctttcaccacgggtgggctgcggatccccttccccagggactgcggggaggagatgcagaacggagccggtgcctccaggaccagcaccatcttcctcaacggcaaccgcgagcggcccctgaacgtgttttgcgacatggagactgatgggggcggctggctggtgttccagcgccgcatggatggacagacagacttctggagggactgggaggactatgcccatggttttgggaacatctctggagagttctggctgggcaatgaggccctgcacagcctgacacaggcaggtgactactccatgcgcgtggacctgcgggctggggacgaggctgtgttcgcccagtacgactccttccacgtagactcggctgcggagtactaccgcctccacttggagggctaccacggcaccgcaggggactccatgagctaccacagcggcagtgtcttctctgcccgtgatcgggaccccaacagcttgctcatctcctgcgctgtctcctaccgaggggcctggtggtacaggaactgccactacgccaacctcaacgggctctacgggagcacagtggaccatcagggagtgagctggtaccactggaagggcttcgagttctcggtgcccttcacggaaatgaagctgagaccaagaaactttcgctccccagcggggggaggctgagctgctgcccacctctctcgcaccccagtatgactgccgagcactgaggggtcgccccgagagaagagccagggtccttcaccacccagccgctggaggaagccttctctgccagcgatctcgcagcactgtgtttacaggggggaggggaggggttcgtacgggagcaataaaggagaaactgaggtacccggc

SEQ ID NO: 190063 - DNA, 13065 bp, Homo sapiens
  Payload ID: 17533
  Gene Symbol: TNXB
  Gene Name: tenascin XB
  ENST ID: ENST00000383159
  CDS Start-End: 203-12871
tcctccccttctcctcccctgctcgctgcagactccctcctcactgtcgctgccgagatccacagtcggttgtggctcagcccctgttgcaggggacaagtgagggagacttccctgtcctgccctgagacgccgccctcccggggttggggacagagcaggtgcagaggcactgcagctgctcggttgcccagcctcctgaatgatgccagcccagtatgctctaacctccagcctggttctcctggtgctgctgagcacagccagagcaggccccttctcttcacggtccaatgtgacactgccagccccccggccccctccccagccagggggccacacagtgggggctggagtgggaagcccctcttctcagctttacgagcacacagtggaaggaggggagaagcaggtggtattcacccaccgcattaacctgcccccttccactggctgtggctgtcccccaggcaccgagcccccagtccttgcttcagaggtacaggccctgagggtccgtctagagatcctggaggagttggtgaaggggctcaaggaacagtgcactgggggatgttgtcctgcctctgcccaagctggcacaggtcagacagatgtgcggaccctctgcagtctccatggtgtgtttgatctgagccgctgcacctgttcctgtgagccaggctggggtgggcccacctgctcagaccccacagatgctgagatccctccctcttccccaccctcagcctcggggtcctgcccagatgactgcaatgatcagggtcgctgtgtccgtggtcgttgcgtgtgctttcccggctacactggccccagctgtggctggccatcctgtcccggggactgccaaggccgtgggcgctgcgtgcagggcgtgtgtgtgtgccgggcaggcttctcaggccccgactgcagccagcgctcctgccctcgaggttgcagccagaggggacgctgtgagggtgggcgctgcgtgtgtgacccaggctacactggtgacgactgtggcatgaggagctgccctcgcggttgcagtcagagggggcgctgtgagaatgggcgctgcgtgtgtaaccccggctacgctggcgaggactgtggggtgaggagctgccctcggggctgcagccagcggggacgctgcaaggacgggcgctgcgtgtgtgaccccggctacactggcgaggactgtggtacgcggagctgcccctgggactgtggcgagggcgggcgctgcgtggacggccgctgcgtgtgctggcccgggtacacaggcgaggactgcagcacgcggacatgtccgagggactgccggggccgcgggcgctgcgaggacggcgaatgcatttgcgacacgggctacagcggggacgactgcggcgtgcgcagctgccctggcgactgcaaccaaaggggccgctgcgaggacggccgctgcgtgtgctggccggggtacactggaaccgattgcggctcgcgcgcctgcccacgcgactgtagaggtcgcgggcgctgcgagaacggcgtgtgtgtttgcaatgcgggctacagcggcgaggactgcggtgtgcgcagctgtcctggggactgtcgtggccggggccgctgtgagagtggccgctgcatgtgttggccggggtacacaggccgggactgcggcacgcgcgcctgtcctggcgactgtcgcgggcgcgggcgctgcgtggatggccgctgcgtgtgcaacccgggcttcaccggtgaggactgtgggagccgtcgctgtcccggggactgccgtgggcacggcctttgcgaggatggcgtgtgcgtgtgtgacgcaggctactcaggggaagactgcagcacgcgcagctgccccgggggctgccgaggccgcggccagtgcctagatgggcggtgtgtgtgcgaggacggctactctggcgaggattgcggtgtgaggcagtgcccgaatgactgcagccagcacggcgtgtgccaggacggtgtgtgcatctgttgggaaggctacgtgagtgaggactgcagcatccgcacctgcccctccaactgccacgggaggggccgctgtgaggaagggcgctgcctgtgcgacccaggctacaccggccctacctgtgccacccgcatgtgcccggctgactgccggggacgtgggcggtgtgtgcaaggagtgtgcctgtgccacgtgggctatggcggtgaggactgcgggcaggaagagcctccagccagcgcctgccctggaggctgcgggccccgggaactgtgccgggcaggccagtgtgtgtgtgtagagggcttccgaggccctgactgtgccatccagacatgcccaggggactgccgtggccgaggagagtgtcacgatggcagctgtgtctgcaaagatgggtatgctggcgaagactgcggagaagaggtgccaaccattgagggcatgaggatgcatctcttggaggagacaacagttcggacagagtggaccccggctcctggccccgtggatgcctatgaaattcagttcatccccacgacagagggggcgagccccccattcacagcacgggttccaagctctgcctcagcctatgaccagagaggactggcccctggacaggagtaccaggtcactgtccgagcccttcgagggaccagctggggccttcctgcctccaagaccatcaccaccatgatcgatgggccccaggacctccgagtggtggctgtgacaccgacaacactggagcttggctggctgcgtccccaggctgaggtggaccgatttgtggtgtcctacgtcagtgccggcaaccagagggtgaggctggaagtgccccctgaagcagacgggacgctgctgactgacctgatgccaggcgtagaatatgtggtgactgtcacagcggagcggggccgggcagtcagctacccagcttctgtcagggccaacacagggtcctcacccttgggcctcttggggactaccgatgagcctcctccctcaggcccctcgacgacgcaaggggcccaggctcctctcctgcagcagcgcccccaggagctgggagagttgagggtgctgggcagagatgagacagggcgcctccgtgtggtctggaccgcccagcctgacacctttgcctacttccaactgcgcatgcgggtgcccgaggggccgggggcacatgaggaagtgctgccaggggacgtccgccaggctctggtgcctccaccccctcctggaaccccgtatgagctgtcacttcatggggtccctcctgggggcaagccctctgaccccatcatctaccaaggcattatggacaaggatgaggagaagcctgggaagtcctcaggcccaccacgcctgggtgagctgacggtgacagacaggacctccgactccttgctcctgcgctggacggtccccgagggcgagtttgactccttcgtgatccagtacaaagacagggacgggcagccccaggtggtgcccgtggaaggaccccagcgctcggccgtcatcacctccctggatcctggccgcaagtacaaatttgtcctgtatgggtttgttggcaagaagaggcatggtccgctggtggctgaagccaagatcttgcctcagagtgacccaagtccagggactccaccccacctgggaaacctgtgggtgacagaccctaccccagattcactgcacctctcctggactgtccctgagggccagtttgacaccttcatggtccagtacagggacagggatggacggccccaggtggtacctgtggaagggcccgagcgttcatttgttgtctcctcactggaccctgaccacaagtacagattcactctgtttggaattgcgaacaagaagcggtatggccccctcacggccgatggcaccactgctccagagaggaaagaggagcccccccgccctgagttcctggagcagcccctcctgggggaactgacagtgaccggcgtgaccccagactccttgcgtctctcatggacagtggcccagggccccttcgactcattcatggtccagtacaaggatgcacaggggcagccccaggcagtgcctgttgcgggggatgagaatgaggttactgtccccggcctggatcccgaccggaagtataagatgaacctctacgggcttcgtggcaggcagcgtgtggggcccgagtctgtggtggccaagactgctcctcaggaggatgtggacgagacccccagccccacagaactgggcacggaggccccggagtcccccgaggagccgctcctgggggagctgacagtgacaggatcctcccctgattcgctgagcctcttctggaccgtcccccagggcagcttcgactctttcaccgtgcagtacaaggacagggatgggcggccccgggcggtgcgtgttgggggcaaggagagtgaggtcaccgtgggaggcctagagcccgggcacaagtacaagatgcacctgtacggcctccacgaggggcagcgcgtgggcccggtgtccgccgtgggcgtgacagccccacaacaagaagagacccctccagccactgagtccccgctggagccacgcctaggagagctgacagtgacagatgtgacccccaactctgtgggcctctcctggacagtccccgagggccagtttgactccttcatagtccagtacaaggacaaggacgggcagccccaggtggtgccggtggcggcagaccagcgagaggtcacagtctacaacctggagcctgagagaaaatataagatgaacatgtatggactacatgatgggcaacgcatgggccccctgtctgtggtcatcgtgacggctcccctcccaccagccccagccacagaggcctccaagcctcccctggagccacgcctaggggagctgacagtgacggatataacccctgactctgtgggcctctcatggacagtccctgagggtgaattcgactcctttgtggttcagtacaaggacagggacgggcagccccaggtggtgcccgtggctgcagatcagcgggaggtcactatccctgacctggaaccctcccgcaagtacaagttcctgctctttgggatccaggatgggaaacgacgcagcccagtctctgtggaggcaaagacggttgcccgaggtgacgccagcccaggggccccaccccgccttggggagctgtgggtgacagaccccaccccagactcactgcgcctctcctggacggttcctgagggccagttcgactcttttgtggtccagttcaaggacaaagacgggccccaggtggtgcccgtggagggccatgagcgctctgtcactgtcacccctctggatgccggccgcaagtacagattcctcctctatggcctcctgggcaagaagcgccatggccctctcactgccgacggcaccacggaagcccggagtgctatggatgatactggaacaaagcgtcccccaaaaccccgtctgggggaggagctgcaggtgaccaccgtgacccagaactccgtgggcctctcctggacagtccctgagggccagtttgactcctttgtggtccagtacaaagacagggacgggcagccccaggtggtgcccgtggagggcagcctcagggaggtcagcgtgccgggcctggaccctgcccacaggtacaagctgctgctctacgggctgcaccacggcaagcgtgtgggccccatctcggccgtcgccattactgccggcagggaagaaacggaaactgagaccacggccccgacccctccagcgcctgagccccacctcggggagttgacagtggaggaggccacgtcacacaccctgcatctctcctggatggtgactgagggagaatttgactccttcgaaatccagtacacagatagagacgggcaactccaaatggtccgcataggaggtgaccggaatgacatcaccctctctggcctggaatccgaccacagatacctggtgaccctgtatggtttcagtgatgggaagcatgtaggtcctgtccatgtcgaggccctgacagtcccggaggaggagaagccttcagaacctcccaccgcaacccccgagccccccatcaagcctcgcctgggggagctgaccgtgacagatgccacccctgactccctcagcctgtcctggacagttcccgagggacagtttgaccacttcctggtccagtacaggaatggagatgggcagcccaaggcagtgagggtgccagggcacgaggaaggggtcaccatctcgggcctggagccagaccataaatacaagatgaacctgtacggcttccacggtggccagcgcatgggccctgtgtctgtcgtcggggtgacagctgcagaggaagagacccccagccccacagaacccagcatggaggccccggagcccgctgaggagccactcctgggggagctaacagtgacaggatcctcccctgactcgctgagcctctcctggaccgtcccccagggccgcttcgactccttcaccgtgcagtacaaggacagggacgggcggccccaggtggtgcgtgttgggggcgaggagagtgaagtcaccgtggggggcctggagcctgggcgcaagtacaagatgcacctgtacggcctccacgaggggcggcgcgtgggcccagtgtctgctgtgggcgtcacggcccccgaagaggagtcccctgatgctcctcttgcaaagctgcgcctagggcagatgacagtgagagacatcacctccgactccctcagcctctcctggacagtccccgagggccagtttgaccatttcttggtccagtttaagaatggggacgggcagcccaaggcggtgcgggtgccgggacacgaggatggggtcaccatctcgggcctggagccagaccacaagtacaagatgaacctgtacggcttccacggtggccagcgcgtgggccccgtgtctgctgttggtttaactgccccaggaaaggatgaagaaatggccccagcctcgacagaacctcccacccctgaaccccccatcaagcctcgcctggaggagctgaccgtgacagatgcgacccctgactccctcagcctgtcctggacggttcccgagggacagtttgaccacttcctggtccagtacaagaatggggatgggcagcccaaggcaacacgggtgccaggacatgaggacagggtcaccatctccggcctggagccagacaacaagtacaagatgaacctgtacggcttccacggtggccagcgtgtgggccccgtgtctgccatcggggtgacagctgcagaggaagagacccccagccccacagaacccagcatggaggccccggagccccctgaggagccgctcctgggggagctaacagtgacaggatcctcccctgactcgctgagcctctcctggaccgtcccccagggccgcttcgactccttcaccgtgcagtacaaggacagggacgggcggccccaggtggtgcgtgttgggggcgaggagagcgaggtcaccgtggggggcctggagcctgggcgcaaatacaagatgcacctgtacggcctccacgaggggcggcgtgtgggcccggtgtccaccgtgggcgtgactgccccacaagaggatgtggacgagacccccagccctacagaaccaggcacagaggccccagagccccccgaggagcctctcctgggggagctgacagtgacaggatcctcccctgactcgctgagcctttcctggaccgtcccccagggccgctttgactccttcaccgtgcagtacaaggacagggacgggcggccccaggcggtgcgtgttgggggccaggagagcaaggtcactgtgaggggcctggagcctgggcgcaagtacaagatgcacctgtacggcctccacgaggggcggcgcctaggcccggtgtctgccgtgggcgtcacagaggatgaagccgagaccacccaagcagtgcctaccatgacccctgagccccccatcaagcctcgcctgggggagctgaccatgacagatgccacccctgactccctcagcctgtcctggacggttcccgagggccagtttgaccacttcctggtccagtacaggaatggggatgggcagcccaaggcggtgcgggtgccggggcacgaggacggggtcaccatctcaggcctggagccagaccataaatacaagatgaacctgtacggcttccacggtggccagcgcgtgggccccatctctgtcattggggtgacggctgcagaggaagagacccccagccccacggaactcagcactgaggccccggagccccctgaggagccgctcctgggggagctgacagtgacaggatcctcccctgactcgctgagcctctcctggaccatcccccagggccacttcgactccttcaccgtgcagtacaaggacagggacgggcggccccaggtgatgcgtgtcaggggcgaggagagcgaggtcaccgtggggggcctggagcccgggcgcaaatacaagatgcacctgtacggcctccacgaggggcggcgtgtgggcccggtgtccaccgtgggtgtgacagtgcccaccacaacccctgagccccccaacaagcctcgcctcggggagctgaccgtgacagatgccacccctgactccctcagcctgtcctggatggtccccgagggccagtttgaccacttcctggtccagtacaggaatggggatgggcagcccaaggtggtgcgggtgccggggcacgaggacggggtcaccatctcaggcctggagccagaccacaagtacaagatgaacctgtacggcttccacggtggccagcgcgtgggccccatctctgtcattggggtgacagctgcagaggaagaaactcccgcccccacagaacccagcacggaggccccggagccccctgaggagccgctcctgggggagctgacagtgacaggatcctcccctgactcgctgagcctctcctggaccatcccccagggccgcttcgactccttcactgtgcagtacaaggacagggacgggcggccccaggtggtgcgtgtcaggggcgaggagagcgaggtcaccgtggggggcctggagcccgggtgcaaatacaagatgcacctgtacggcctccacgaggggcagcgcgtgggcccagtgtccgctgtgggtgtgacagtgcctaccatgacccctgagccccccatcaagcctcgcctgggggagctgaccgtgacagatgccacccccgactccctcagcctgtcctggatggttcccgagggccagtttgaccacttcctggtccagtacaggaatggggatgggcagcccaaggcggtgcgggtgccggggcacgaggacggggtcaccatctcaggcctggagccagaccataaatacaagatgaacctgtacggcttccacggtggccagcgcgtaggccctgtgtctgccattggggtgacggaggaagagacccccagccccacagaacccagcactgaggccccggaggcccctgaggagccgctcctgggggagttgacagtgacaggatcctcccctgactcgctgagcctctcctggaccgtcccccagggccgcttcgactccttcaccgtgcagtacaaggacagggacgggcagccccaggtggtgcgtgtcaggggcgaggagagcgaggtcaccgtggggggcctggagcccgggcgcaaatacaagatgcatctgtacggcctccacgaggggcagcgcgtgggcccagtgtccaccgtgggcatcacggcgcccctgcccacaccactgccggtggagccccgcctgggggagctggcggtggcggccgtgacctcggactcagtgggcctctcatggacggtggcccagggcccctttgactccttcctggtacagtacagggacgcgcaggggcagccccaggcagtgcctgtgagcggagacctccgagcggtcgccgtctcggggctggacccggcccgcaagtacaagttcctgctctttggactccagaatgggaaacgccacggcccagtccctgtggaggccaggaccgccccagacaccaaaccgtctccccgcctgggggagctgactgtgacagatgcgacccctgactccgtgggcctctcgtggacggtccctgagggcgaattcgactccttcgtggtccagtacaaggataaggatggtcggctccaggtggtgccggtggcagccaaccagcgggaggtcacagtccagggcctggagcccagtaggaaatacaggttcctgctctatggtctgtcaggcaggaaacgactgggccccatctctgctgacagcaccacagctcccctggagaaggagctacctccccacctgggggaactgaccgtggctgaggagacctccagctctctgcgcctgtcctggacggtagcccagggcccctttgactccttcgtggtccagtacagggacacggacgggcagcccagggcagtgcctgtggccgcagaccagcgcacagtcaccgtagaggacctggagcctggcaagaaatacaagtttctgctctacgggctccttgggggaaagcgcctgggcccggtctctgccctgggaatgacagccccagaagaggacacaccagccccagagttagccccagaggcccctgagcctcctgaagagccccgcctaggagtgctgaccgtgaccgacacaaccccagactccatgcgcctctcgtggagcgtggcccagggcccctttgattccttcgtggtccagtatgaggacacgaacgggcagccccaggccttgctcgtggacggcgaccagagcaagatcctcatctcaggcctggagcccagcaccccctacaggttcctcctctatggcctccatgaagggaagcgcctggggcccctctcagctgagggcaccacagggctggctcctgctggtcagacctcagaggagtcaaggccccgcctgtcccagctgtctgtgactgacgtgaccaccagttcactgaggctcaactgggaggccccaccgggggccttcgactccttcctgctccgctttggggttccatcaccaagcactctggagccgcatccgcgtccactgctgcagcgcgagctgatggtgccggggacgcggcactcggccgtgctccgggacctgcgttccgggactctgtacagcctgacactgtatgggctgcgaggaccccacaaggccgacagcatccagggaaccgcccgcaccctcagcccagttctggagagcccccgtgacctccaattcagtgaaatcagggagacctcagccaaggtcaactggatgcccccaccatcccgggcggacagcttcaaagtctcctaccagctggcggacggaggggagcctcagagtgtgcaggtggatggccaggcccggacccagaaactccaggggctgatcccaggcgctcgctatgaggtgaccgtggtctcggtccgaggctttgaggagagtgagcctctcacaggcttcctcaccacggttcctgacggtcccacacagttgcgtgcactgaacttgaccgagggattcgccgtgctgcactggaagcccccccagaatcctgtggacacctatgacgtccaggtcacagcccctggggccccgcctctgcaggcggagaccccaggcagcgcggtggactaccccctgcatgaccttgtcctccacaccaactacaccgccacagtgcgtggcctgcggggccccaacctcacttccccagccagcatcaccttcaccacagggctagaggcccctcgggacttggaggccaaggaagtgaccccccgcaccgccctgctcacttggactgagcccccagtccggcccgcaggctacctgctcagcttccacacccctggtggacagaaccaggagatcctgctcccaggagggatcacatctcaccagctccttggcctctttccctccacctcctacaatgcacggctccaggccatgtggggccagagcctcctgccgcccgtgtccacctctttcaccacgggtgggctgcggatccccttccccagggactgcggggaggagatgcagaacggagccggtgcctccaggaccagcaccatcttcctcaacggcaaccgcgagcggcccctgaacgtgttttgcgacatggagactgatgggggcggctggctggtgttccagcgccgcatggatggacagacagacttctggagggactgggaggactatgcccatggttttgggaacatctctggagagttctggctgggcaatgaggccctgcacagcctgacacaggcaggtgactactccatgcgcgtggacctgcgggctggggacgaggctgtgttcgcccagtacgactccttccacgtagactcggctgcggagtactaccgcctccacttggagggctaccacggcaccgcaggggactccatgagctaccacagcggcagtgtcttctctgcccgtgatcgggaccccaacagcttgctcatctcctgcgctgtctcctaccgaggggcctggtggtacaggaactgccactacgccaacctcaacgggctctacgggagcacagtggaccatcagggagtgagctggtaccactggaagggcttcgagttctcggtgcccttcacggaaatgaagctgagaccaagaaactttcgctccccagcggggggaggctgagctgctgcccacctctctcgcaccccagtatgactgccgagcactgaggggtcgccccgagagaagagccagggtccttcaccacccagccgctggaggaagccttctctgccagcgatctcgcagcactgtgtttacaggggggaggggaggggttcgtacaggagcaataaaggagaaactgaggtacccgg

SEQ ID NO: 190064 - DNA, 10084 bp, Homo sapiens
  Payload ID: 17533
  Gene Symbol: TNXB
  Gene Name: tenascin XB
  ENST ID: ENST00000424713
  CDS Start-End: 1-9890
ggtcctcacccttgggcctcttggggactaccgatgagcctcctccctcaggcccctcgacgacgcaaggggcccaggctcctctcctgcagcagcgcccccaggagctgggagagttgagggtgctgggcagagatgagacagggcgcctccgtgtggtctggaccgcccagcctgacacctttgcctacttccaactgcgcatgcgggtgcccgaggggccgggggcacatgaggaagtgctgccaggggacgtccgccaggctctggtgcctccaccccctcctggaaccccgtatgagctgtcacttcatggggtccctcctgggggcaagccctctgaccccatcatctaccaaggcattatggacaaggatgaggagaagcctgggaagtcctcaggcccaccacgcctgggtgagctgacggtgacagacaggacctccgactccttgctcctgcgctggacggtccccgagggcgagtttgactccttcgtgatccagtacaaagacagggacgggcagccccaggtggtgcccgtggaaggaccccagcgctcggccgtcatcacctccctggatcctggccgcaagtacaaatttgtcctgtatgggtttgttggcaagaagaggcatggtccgctggtggctgaagccaagatcttgcctcagagtgacccaagtccagggactccaccccacctgggaaacctgtgggtgacagaccctaccccagattcactgcacctctcctggactgtccctgagggccagtttgacaccttcatggtccagtacagggacagggatggacggccccaggtggtacctgtggaagggcccgagcgttcatttgttgtctcctcactggaccctgaccacaagtacagattcactctgtttggaattgcgaacaagaagcggtatggccccctcacggccgatggcaccactgctccagagaggaaagaggagcccccccgccctgagttcctggagcagcccctcctgggggaactgacagtgaccggcgtgaccccagactccttgcgtctctcatggacagtggcccagggccccttcgactcattcatggtccagtacaaggatgcacaggggcagccccaggcagtgcctgttgcgggggatgagaatgaggttactgtccccggcctggatcccgaccggaagtataagatgaacctctacgggcttcgtggcaggcagcgtgtggggcccgagtctgtggtggccaagactgctcctcaggaggatgtggacgagacccccagccccacagaactgggcacggaggccccggagtcccccgaggagccgctcctgggggagctgacagtgacaggatcctcccctgattcgctgagcctcttctggaccgtcccccagggcagcttcgactctttcaccgtgcagtacaaggacagggatgggcggccccaggcggtgcgtgttgggggcaaggagagtgaggtcaccgtgggaggcctagagcccgggcacaagtacaagatgcacctgtacggcctccacgaggggcagcgcgtgggcccggtgtccgccgtgggcgtgacagccccacaacaagaagagacccctccagccactgagtccccgctggagccacgcctaggagagctgacagtgacagatgtgacccccaactctgtgggcctctcctggacagtccccgagggccagtttgactccttcatagtccagtacaaggacaaggacgggcagccccaggtggtgccggtggcggcagaccagcgagaggtcacagtctacaacctggagcctgagagaaaatataagatgaacatgtatggactacatgatgggcaacgcatgggccccctgtctgtggtcatcgtgacggctcccctcccaccagccccagccacagaggcctccaagcctcccctggagccacgcctaggggagctgacagtgacggatataacccctgactctgtgggcctctcatggacagtccctgagggtgaattcgactcctttgtggttcagtacaaggacagggacgggcagccccaggtggtgcccgtggctgcagatcagcgggaggtcactatccctgacctggaaccctcccgcaagtacaagttcctgctctttgggatccaggatgggaaacgacgcagcccagtctctgtggaggcaaagacggttgcccgaggtgacgccagcccaggggccccaccccgccttggggagctgtgggtgacagaccccaccccagactcactgcgcctctcctggacggttcctgagggccagttcgactcttttgtggtccagttcaaggacaaagacgggccccaggtggtgcccgtggagggccatgagcgctctgtcactgtcacccctctggatgccggccgcaagtacagattcctcctctatggcctcctgggcaagaagcgccatggccctctcactgccgacggcaccacggaagcccggagtgctatggatgatactggaacaaagcgtcccccaaaaccccgtctgggggaggagctgcaggtgaccaccgtgacccagaactccgtgggcctctcctggacagtccctgagggccagtttgactcctttgtggtccagtacaaagacagggacgggcagccccaggtggtgcccgtggagggcagcctcagggaggtcagcgtgccgggcctggaccctgcccacaggtacaagctgctgctctacgggctgcaccacggcaagcgtgtgggccccatctcggccgtcgccattactgccggcagggaagaaacggaaactgagaccacggccccgacccctccagcgcctgagccccacctcggggagttgacagtggaggaggccacgtcacacaccctgcatctctcctggatggtgactgagggagaatttgactccttcgaaatccagtacacagatagagacgggcaactccaaatggtccgcataggaggtgaccggaatgacatcaccctctctggcctggaatccgaccacagatacctggtgaccctgtatggtttcagtgatgggaagcatgtaggtcctgtccatgtcgaggccctgacagtcccggaggaggagaagccttcagaacctcccaccgcaacccccgagccccccatcaagcctcgcctgggggagctgaccgtgacagatgccacccctgactccctcagcctgtcctggacagttcccgagggacagtttgaccacttcctggtccagtacaggaatggagatgggcagcccaaggcagtgagggtgccagggcacgaggaaggggtcaccatctcgggcctggagccagaccataaatacaagatgaacctgtacggcttccacggtggccagcgcatgggccctgtgtctgtcgtcggggtgacagctgcagaggaagagacccccagccccacagaacccagcatggaggccccggagcccgctgaggagccgctcctgggggagctaacagtgacaggatcctcccctgactcgctgagcctctcctggaccgtcccccagggccgcttcgactccttcaccgtgcagtacaaggacagggacgggcggccccaggtggtgcgtgttgggggcgaggagagtgaagtcaccgtggggggcctggagcctgggcgcaagtacaagatgcacctgtacggcctccacgaggggcggcgcgtgggcccagtgtctgctgtgggcgtcacggcccccgaagaggagtcccctgatgctcctcttgcaaagctgcgcctagggcagatgacagtgagagacatcacctccgactccctcagcctctcctggacagtccccgagggccagtttgaccatttcttggtccagtttaagaatggggacgggcagcccaaggcggtgcgggtgccgggacacgaggatggggtcaccatctcgggcctggagccagaccacaagtacaagatgaacctgtacggcttccacggtggccagcgcgtgggccccgtgtctgctgttggtttaactgccccaggaaaggatgaagaaatggccccagcctcgacagaacctcccacccctgaaccccccatcaagcctcgcctggaggagctgaccgtgacagatgcgacccctgactccctcagcctgtcctggacggttcccgagggacagtttgaccacttcctggtccagtacaagaatggggatgggcagcccaaggcaacacgggtgccaggacatgaggacagggtcaccatctccggcctggagccagacaacaagtacaagatgaacctgtacggcttccacggtggccagcgtgtgggccccgtgtctgccatcggggtgacagctgcagaggaagagacccccagccccacagaacccagcatggaggccccggagccccctgaggagccgctcctgggggagctaacagtgacaggatcctcccctgactcgctgagcctctcctggaccgtcccccagggccgcttcgactccttcaccgtgcagtacaaggacagggacgggcggccccaggtggtgcgtgttgggggcgaggagagcgaggtcaccgtggggggcctggagcctgggcgcaaatacaagatgcacctgtatggcctccacgaggggcggcgcgtgggcccggtgtccaccgtgggcgtgactgccccacaagaggatgtggacgagacccccagccctacagaaccaggcacagaggccccagggccccccgaggagcctctcctgggggagctgacagtgacaggatcctcccctgactcgctgagcctttcctggaccgtcccccagggccgctttgactccttcaccgtgcagtacaaggacagggacgggcggccccaggcggtgcgtgttgggggccaggagagcaaggtcactgtgaggggcctggagcctgggcgcaagtacaagatgcacctgtacggcctccacgaggggcggcgcctgggcccggtgtctgccgtgggcgtcacagaggatgaagccgagaccacccaagcagtgcctaccatgacccctgagccccccatcaagcctcgcctgggggagctgaccatgacagatgccacccctgactccctcagcctgtcctggacggttcccgagggccagtttgaccacttcctggtccagtacaggaatggggatgggcagcccaaggcggtgcgggtgccggggcacgaggacggggtcaccatctcaggcctggagccagaccataaatacaagatgaacctgtacggcttccacggtggccagcgcgtgggccccatctctgtcattggggtgacggctgcagaggaagagacccccagccccacggaactcagcactgaggccccggagccccctgaggagccgctcctgggggagctgacagtgacaggatcctcccctgactcgctgagcctctcctggaccatcccccagggccacttcgactccttcaccgtgcagtacaaggacagggacgggcggccccaggtgatgcgtgtcaggggcgaggagagcgaggtcaccgtggggggcctggagcccgggcgcaaatacaagatgcacctgtacggcctccacgaggggcggcgtgtgggcccggtgtccaccgtgggtgtgacagtgcccaccacaacccctgagccccccaacaagcctcgcctcggggagctgaccgtgacagatgccacccctgactccctcagcctgtcctggatggtccccgagggccagtttgaccacttcctggtccagtacaggaatggggatgggcagcccaaggtggtgcgggtgccggggcacgaggacggggtcaccatctcaggcctggagccagaccacaagtacaagatgaacctgtacggcttccacggtggccagcgcgtgggccccatctctgtcattggggtgacagctgcagaggaagaaactcccgcccccacagaacccagcacggaggccccggagccccctgaggagccgctcctgggggagctgacagtgacaggatcctcccctgactcgctgagcctctcctggaccatcccccagggccgcttcgactccttcactgtgcagtacaaggacagggacgggcggccccaggtggtgcgtgtcaggggcgaggagagcgaggtcaccgtggggggcctggagcccgggtgcaaatacaagatgcacctgtacggcctccacgaggggcagcgcgtgggcccagtgtccgctgtgggtgtgacagtgcctaccatgacccctgagccccccatcaagcctcgcctgggggagctgaccgtgacagatgccacccccgactccctcagcctgtcctggatggttcccgagggccagtttgaccacttcctggtccagtacaggaatggggatgggcagcccaaggcggtgcgggtgccggggcacgaggacggggtcaccatctcaggcctggagccagaccataaatacaagatgaacctgtacggcttccacggtggccagcgcgtaggccctgtgtctgccattggggtgacggaggaagagacccccagccccacagaacccagcactgaggccccggaggcccctgaggagccgctcctgggggagttgacagtgacaggatcctcccctgactcgctgagcctctcctggaccgtcccccagggccgcttcgactccttcaccgtgcagtacaaggacagggacgggcagccccaggtggtgcgtgtcagggtcgaggagagcgaggtcaccgtggggggcctggagcccgggcgcaaatacaagatgcatctgtacggcctccacgaggggcagcgcgtgggcccagtgtccaccgtgggcatcacggcgcccctgcccacaccactgccggtggagccccgcctgggggagctggcggtggcggccgtgacctcggactcagtgggcctctcatggacggtggcccagggcccctttgactccttcctggtacagtacagggacgcgcaggggcagccccaggcagtgcctgtgagcggagacctccgagcggtcgccgtctcggggctggacccggcccgcaagtacaagttcctgctctttggactccagaatgggaaacgccacggcccagtccctgtggaggccaggaccgccccagacaccaaaccgtctccccgcctgggggagctgactgtgacagatgcgacccctgactccgtgggcctctcgtggacggtccctgagggcgaattcgactccttcgtggtccagtacaaggataaggatggtcggctccaggtggtgccggtggcagccaaccagcgggaggtcacagtccagggcctggagcccagtaggaaatacaggttcctgctctatggtctgtcaggcaggaaacgactgggccccatctctgctgacagcaccacagctcccctggagaaggagctacctccccacctgggggaactgaccgtggctgaggagacctccagctctctgcgcctgtcctggacggtagcccagggcccctttgactccttcgtggtccagtacagggacacggacgggcagcccagggcagtgcctgtggccgcagaccagcgcacagtcaccgtagaggacctggagcctggcaagaaatacaagtttctgctctacgggctccttgggggaaagcgcctgggcccggtctctgccctgggaatgacagccccagaagaggacacaccagccccagagttagccccagaggcccctgagcctcctgaagagccccgcctaggagtgctgaccgtgaccgacacaaccccagactccatgcgcctctcgtggagcgtggcccagggcccctttgattccttcgtggtccagtatgaggacacgaacgggcagccccaggccttgctcgtggacggcgaccagagcaagatcctcatctcaggcctggagcccagcaccccctacaggttcctcctctatggcctccatgaagggaagcgcctggggcccctctcagctgagggcaccacagggctggctcctgctggtcagacctcagaggagtcaaggccccgcctgtcccagctgtctgtgactgacgtgaccaccagttcactgaggctcaactgggaggccccaccgggggccttcgactccttcctgctccgctttggggttccatcaccaagcactctggagccgcatccgcgtccactgctgcagcgcgagctgatggtgccggggacgcggcactcggccgtgctccgggacctgcgttccgggactctgtacagcctgacactgtatgggctgcgaggaccccacaaggccgacagcatccagggaaccgcccgcaccctcagcccagttctggagagcccccgtgacctccaattcagtgaaatcagggagacctcagccaaggtcaactggatgcccccaccatcccgggcggacagcttcaaagtctcctaccagctggcggacggaggggagcctcagagtgtgcaggtggatggccaggcccggacccagaaactccaggggctgatcccaggcgctcgctatgaggtgaccgtggtctcggtccgaggctttgaggagagtgagcctctcacaggcttcctcaccacggttcctgacggtcccacacagttgcgtgcactgaacttgaccgagggattcgccgtgctgcactggaagcccccccagaatcctgtggacacctatgacgtccaggtcacagcccctggggccccgcctctgcaggcggagaccccaggcagcgcggtggactaccccctgcatgaccttgtcctccacaccaactacaccgccacagtgcgtggcctgcggggccccaacctcacttccccagccagcatcaccttcaccacagggctagaggcccctcgggacttggaggccaaggaagtgaccccccgcaccgccctgctcacttggactgagcccccagtccggcccgcaggctacctgctcagcttccacacccctggtggacagaaccaggagatcctgctcccaggagggatcacatctcaccagctccttggcctctttccctccacctcctacaatgcacggctccaggccatgtggggccagagcctcctgccgcccgtgtccacctctttcaccacgggtgggctgcggatccccttccccagggactgcggggaggagatgcagaacggagccggtgcctccaggaccagcaccatcttcctcaacggcaaccgcgagcggcccctgaacgtgttttgcgacatggagactgatgggggcggctggctggtgttccagcgccgcatggatggacagacagacttctggagggactgggaggactatgcccatggttttgggaacatctctggagagttctggctgggcaatgaggccctgcacagcctgacacaggcaggtgactactccatgcgcgtggacctgcgggctggggacgaggctgtgttcgcccagtacgactccttccacgtagactcggctgcggagtactaccgcctccacttggagggctaccacggcaccgcaggggactccatgagctaccacagcggcagtgtcttctctgcccgtgatcgggaccccaacagcttgctcatctcctgcgctgtctcctaccgaggggcctggtggtacaggaactgccactacgccaacctcaacgggctctacgggagcacagtggaccatcagggagtgagctggtaccactggaagggcttcgagttctcggtgcccttcacggaaatgaagctgagaccaagaaactttcgctccccagcggggggaggctgagctgctgcccacctctctcgcaccccagtatgactgccgagcactgaggggtcgccccgagagaagagccagggtccttcaccacccagccgctggaggaagccttctctgccagcgatctcgcagcactgtgtttacaggggggaggggaggggttcgtacaggagcaataaaggagaaactgaggtacccgg

SEQ ID NO: 190065 - DNA, 13065 bp, Homo sapiens
  Payload ID: 17533
  Gene Symbol: TNXB
  Gene Name: tenascin XB
  ENST ID: ENST00000440248
  CDS Start-End: 203-12871
tcctccccttctcctcccctgctcgctgcagactccctcctcactgtcgctgccgagatccacagtcggttgtggctcagcccctgttgcaggggacaagtgagggagacttccctgtcctgccctgagacgccgccctcccggggttggggacagagcaggtgcagaggcactgcagctgctcggttgcccagcctcctgaatgatgccagcccagtatgctctaacctccagcctggttctcctggtgctgctgagcacagccagagcaggccccttctcttcacggtccaatgtgacactgccagccccccggccccctccccagccagggggccacacagtgggggctggagtgggaagcccctcttctcagctttacgagcacacagtggaaggaggggagaagcaggtggtattcacccaccgcattaacctgcccccttccactggctgtggctgtcccccaggcaccgagcccccagtccttgcttcagaggtacaggccctgagggtccgtctagagatcctggaggagttggtgaaggggctcaaggaacagtgcactgggggatgttgtcctgcctctgcccaagctggcacaggtcagacagatgtgcggaccctctgcagtctccatggtgtgtttgatctgagccgctgcacctgttcctgtgagccaggctggggtgggcccacctgctcagaccccacagatgctgagatccctccctcttccccaccctcagcctcggggtcctgcccagatgactgcaatgatcagggtcgctgtgtccgtggtcgttgcgtgtgctttcccggctacactggccccagctgtggctggccatcctgtcccggggactgccaaggccgtgggcgctgcgtgcagggcgtgtgtgtgtgccgggcaggcttctcaggccccgactgcagccagcgctcctgccctcgaggttgcagccagaggggacgctgtgagggtgggcgctgcgtgtgtgacccaggctacactggtgacgactgtggcatgaggagctgccctcgcggttgcagtcagagggggcgctgtgagaatgggcgctgcgtgtgtaaccccggctacactggcgaggactgtggggtgaggagctgccctcggggctgcagccagcggggacgctgcaaggacgggcgctgcgtgtgtgaccccggctacactggcgaggactgtggtacgcggagctgcccctgggactgtggcgagggcgggcgctgcgtggacggccgctgcgtgtgctggcccgggtacacaggcgaggactgcagcacgcggacatgtccgagggactgccggggccgcgggcgctgcgaggacggcgaatgcatttgcgacacgggctacagcggggacgactgcggcgtgcgcagctgccctggcgactgcaaccaaaggggccgctgcgaggacggccgctgcgtgtgctggccggggtacactggaaccgattgcggctcgcgcgcctgcccacgcgactgtagaggtcgcgggcgctgcgagaacggcgtgtgtgtttgcaatgcgggctacagcggcgaggactgcggtgtgcgcagctgtcctggggactgtcgtggccggggccgctgtgagagtggccgctgcatgtgttggccggggtacacaggccgggactgcggcacgcgcgcctgtcctggcgactgtcgcgggcgcgggcgctgcgtggatggccgctgcgtgtgcaacccgggcttcaccggtgaggactgtgggagccgtcgctgtcccggggactgccgtgggcacggcctttgcgaggatggcgtgtgcgtgtgtgacgcaggctactcaggggaagactgcagcacgcgcagctgccccgggggctgccgaggccgcggccagtgcctagatgggcggtgtgtgtgcgaggacggctactctggcgaggattgcggtgtgaggcagtgcccgaatgactgcagccagcacggcgtgtgccaggacggtgtgtgcatctgttgggaaggctacgtgagtgaggactgcagcatccgcacctgcccctccaactgccacgggaggggccgctgtgaggaagggcgctgcctgtgcgacccaggctacaccggccctacctgtgccacccgcatgtgcccggctgactgccggggacgtgggcggtgtgtgcaaggagtgtgcctgtgccacgtgggctatggcggtgaggactgcgggcaggaagagcctccagccagcgcctgccctggaggctgcgggccccgggaactgtgccgggcaggccagtgtgtgtgtgtagagggcttccgaggccctgactgtgccatccagacatgcccaggggactgccgtggccgaggagagtgtcacgatggcagctgtgtctgcaaagatgggtatgctggcgaagactgcggagaagaggtgccaaccattgagggcatgaggatgcatctcttggaggagacaacagttcggacagagtggaccccggctcctggccccgtggatgcctatgaaattcagttcatccccacgacagagggggcgagccccccattcacagcacgggttccaagctctgcctcagcctatgaccagagaggactggcccctggacaggagtaccaggtcactgtccgagcccttcgagggaccagctggggccttcctgcctccaagaccatcaccaccatgatcgatgggccccaggacctccgagtggtggctgtgacaccgacaacactggagcttggctggctgcgtccccaggctgaggtggaccgatttgtggtgtcctacgtcagtgccggcaaccagagggtgaggctggaagtgccccctgaagcagacgggacgctgctgactgacctgatgccaggcgtagaatatgtggtgactgtcacagcggagcggggccgggcagtcagctacccagcttctgtcagggccaacacagggtcctcacccttgggcctcttggggactaccgatgagcctcctccctcaggcccctcgacgacgcaaggggcccaggctcctctcctgcagcagcgcccccaggagctgggagagttgagggtgctgggcagagatgagacagggcgcctccgtgtggtctggaccgcccagcctgacacctttgcctacttccaactgcgcatgcgggtgcccgaggggccgggggcacatgaggaagtgctgccaggggacgtccgccaggctctggtgcctccaccccctcctggaaccccgtatgagctgtcacttcatggggtccctcctgggggcaagccctctgaccccatcatctaccaaggcattatggacaaggatgaggagaagcctgggaagtcctcaggcccaccacgcctgggtgagctgacggtgacagacaggacctccgactccttgctcctgcgctggacggtccccgagggcgagtttgactccttcgtgatccagtacaaagacagggacgggcagccccaggtggtgcccgtggaaggaccccagcgctcggccgtcatcacctccctggatcctggccgcaagtacaaatttgtcctgtatgggtttgttggcaagaagaggcatggtccgctggtggctgaagccaagatcttgcctcagagtgacccaagtccagggactccaccccgcctgggaaacctgtgggtgacagaccctaccccagattcactgcacctctcctggactgtccctgagggccagtttgacaccttcatggtccagtacagggacagggatggacggccccaggtggtacctgtggaagggcccgagcgttcatttgttgtctcctcactggaccctgaccacaagtacagattcactctgtttggaattgcgaacaagaagcggtatggccccctcacggccgatggcaccactgctccagagaggaaagaggagcccccccaccctgagttcctggagcagcccctcctgggggaactgacagtgaccggcgtgaccccagactccttgcgtctctcatggacagtggcccagggccccttcgactcattcatggtccagtacaaggatgcacaggggcagccccaggcagtgcctgttgcgggggatgagaatgaggttactgtccccggcctggatcccgaccggaagtataagatgaacctctacgggcttcgtggcaggcagcgtgtggggcccgagtctgtggtggccaagactgctcctcaggaggatgtggacgagacccccagccccacagaactgggcacggaggccccggagtcccccgaggagccgctcctgggggagctgacagtgacaggatcctcccctgattcgctgagcctcttctggaccgtcccccagggcagcttcgactctttcaccgtgcagtacaaggacagggatgggcggccccgggcggtgcgtgttgggggcaaggagagtgaggtcaccgtgggaggcctagagcccgggcacaagtacaagatgcacctgtacggcctccacgaggggcagcgcgtgggcccggtgtccgccgtgggcgtgacagccccacaacaagaagagacccctccagccactgagtccccgctggagccacgcctaggagagctgacagtgacagatgtgacccccaactctgtgggcctctcctggacagtccccgagggccagtttgactccttcatagtccagtacaaggacaaggacgggcagccccaggtggtgccggtggcggcagaccagcgagaggtcacagtctacaacctggagcctgagagaaaatataagatgaacatgtatggactacatgatgggcaacgcatgggccccctgtctgtggtcatcgtgacggctcccctcccaccagccccagccacagaggcctccaagcctcccctggagccacgcctaggggagctgacagtgacggatataacccctgactctgtgggcctctcatggacagtccctgagggtgaattcgactcctttgtggttcagtacaaggacagggacgggcagccccaggtggtgcccgtggctgcagatcagcgggaggtcactatccctgacctggaaccctcccgcaagtacaagttcctgctctttgggatccaggatgggaaacgacgcagcccagtctctgtggaggcaaagacggttgcccgaggtgacgccagcccaggggccccaccccgccttggggagctgtgggtgacagaccccaccccagactcactgcgcctctcctggacggttcctgagggccagttcgactcttttgtggtccagttcaaggacaaagacgggccccaggtggtgcccgtggagggccatgagcgctctgtcactgtcacccctctggatgccggccgcaagtacagattcctcctctatggcctcctgggcaagaagcgccatggccctctcactgccgacggcaccacggaagcccggagtgctatggatgatactggaacaaagcgtcccccaaaaccccgtctgggggaggagctgcaggtgaccaccgtgacccagaactccgtgggcctctcctggacagtccctgagggccagtttgactcctttgtggtccagtacaaagacagggacgggcagccccaggtggtgcccgtggagggcagcctcagggaggtcagcgtgccgggcctggaccctgcccacaggtacaagctgctgctctacgggctgcaccacggcaagcgtgtgggccccatctcggccgtcgccattactgccggcagggaagaaacggaaactgagaccacggccccgacccctccagcgcctgagccccacctcggggagttgacagtggaggaggccacgtcacacaccctgcatctctcctggatggtgactgagggagaatttgactccttcgaaatccagtacacagatagagacgggcaactccaaatggtccgcataggaggtgaccggaatgacatcaccctctctggcctggaatccgaccacagatacctggtgaccctgtatggtttcagtgatgggaagcatgtaggtcctgtccatgtcgaggccctgacagtcccggaggaggagaagccttcagaacctcccaccgcaacccccgagccccccatcaagcctcgcctgggggagctgaccgtgacagatgccacccctgactccctcagcctgtcctggacagttcccgagggacagtttgaccacttcctggtccagtacaggaatggagatgggcagcccaaggcagtgagggtgccagggcacgaggaaggggtcaccatctcgggcctggagccagaccataaatacaagatgaacctgtacggcttccacggtggccagcgcatgggccctgtgtctgtcgtcggggtgacagctgcagaggaagagacccccagccccacagaacccagcatggaggccccggagcccgctgaggagccgctcctgggggagctaacagtgacaggatcctcccctgactcgctgagcctctcctggaccgtcccccagggccgcttcgactccttcaccgtgcagtacaaggacagggacgggcggccccaggtggtgcgtgttgggggcgaggagagtgaagtcaccgtggggggcctggagcctgggcgcaagtacaagatgcacctgtacggcctccacgaggggcggcgcgtgggcccagtgtctgctgtgggcgtcacggcccccgaagaggagtcccctgatgctcctcttgcaaagctgcgcctagggcagatgacagtgagagacatcacctccgactccctcagcctctcctggacagtccccgagggccagtttgaccatttcttggtccagtttaagaatggggatgggcagcccaaggcggtgcgggtgccgggacacgaggatggggtcaccatctcgggcctggagccagaccacaagtacaagatgaacctgtacggcttccacggtggccagcgcgtgggccccgtgtctgctgttggtttaactgccccaggaaaggatgaagaaatggccccagcctcgacagaacctcccacccctgaaccccccatcaagcctcgcctggaggagctgaccgtgacagatgcgacccctgactccctcagcctgtcctggacggttcccgagggacagtttgaccacttcctggtccagtacaagaatggggatgggcagcccaaggcaacacgggtgccaggacatgaggacagggtcaccatctccggcctggagccagacaacaagtacaagatgaacctgtacggcttccacggtggccagcgtgtgggccccgtgtctgccatcggggtgacagctgcagaggaagagacccccagccccacagaacccagcatggaggccccggagccccctgaggagccgctcctgggggagctgacagtgacaggatcctcccctgactcgctgagcctctcctggaccgtcccccagggccgcttcgactccttcaccgtgcagtacaaggacagggacgggcggccccaggtggtgcgtgttgggggcgaggagagcgaggtcaccgtggggggcctggagcctgggcgcaaatacaagatgcacctgtacggcctccacgaggggcggcgcgtgggcccggtgtccaccgtgggcgtgactgccccacaagaggatgtggacgagacccccagccctacagaaccaggcacagaggccccagagccccccgaggagcctctcctgggggagctgacagtgacaggatcctcccctgactcgctgagcctttcctggaccgtcccccagggccgctttgactccttcaccgtgcagtacaaggacagggatgggcggccccaggcggtgcgtgttgggggccaggagagcaaggtcactgtgaggggcctggagcctgggcgcaagtacaagatgcacctgtacggcctccacgaggggcggcgcctgggcccggtgtctgccgtgggcgtcacagaggatgaagccgagaccacccaagcagtgcctaccatgacccctgagccccccatcaagcctcgcctgggggagctgaccatgacagatgccacccctgactccctcagcctgtcctggacggttcccgagggccagtttgaccacttcctggtccagtacaggaatggggatgggcagcccaaggcggtgcgggtgccggggcacgaggacggggtcaccatctcaggcctggagccagaccataaatacaagatgaacctgtacggcttccacggtggccagcgcgtgggccccatctctgtcattggggtgacggctgcagaggaagagacccccagccccacggaactcagcactgaggccccggagccccctgaggagccgctcctgggggagctgacagtgacaggatcctcccctgactcgctgagcctctcctggaccatcccccagggccacttcgactccttcaccgtgcagtacaaggacagggacgggcggccccaggtgatgcgtgtcaggggcgaggagagcgaggtcaccgtggggggcctggagcccgggcgcaaatacaagatgcacctgtacggcctccacgaggggcggcgtgtgggcccggtgtccaccgtgggtgtgacagtgcccaccacaacccctgagccccccaacaagcctcgcctcggggagctgaccgtgacagatgccacccctgactccctcagcctgtcctggatggtccccgagggccagtttgaccacttcctggtccagtacaggaatggggatgggcagcccaaggtggtgcgggtgccggggcacgaggacggggtcaccatctcaggcctggagccagaccacaagtacaagatgaacctgtacggcttccacggtggccagcgcgtgggccccatctctgtcattggggtgacagctgcagaggaagaaactcccgcccccacagaacccagcacggaggccccggagccccctgaggagccgctcctgggggagctgacagtgacaggatcctcccctgactcgctgagcctctcctggaccatcccccagggccgcttcgactccttcactgtgcagtacaaggacagggacgggcggccccaggtggtgcgtgtcaggggcgaggagagcgaggtcaccgtggggggcctggagcccgggtgcaaatacaagatgcacctgtacggcctccacgaggggcagcgcgtgggcccagtgtccgctgtgggtgtgacagtgcctaccatgacccctgagccccccatcaagcctcgcctgggggagctgaccgtgacagatgccacccccgactccctcagcctgtcctggatggttcccgagggccagtttgaccacttcctggtccagtacaggaatggggatgggcagcccaaggcggtgcgggtgccggggcacgaggacggggtcaccatctcaggcctggagccagaccataaatacaagatgaacctgtacggcttccacggtggccagcgcgtaggccctgtgtctgccattggggtgacggaggaagagacccccagccccacagaacccagcactgaggccccggaggcccctgaggagccgctcctgggggagttgacagtgacaggatcctcccctgactcgctgagcctctcctggaccatcccccagggccgcttcgactccttcaccgtgcagtacaaggacagggacgggcagccccaggtggtgcgtgtcaggggcgaggagagcgaggtcaccgtggggggcctggagcccgggcgcaaatacaagatgcatctgtacggcctccacgaggggcagcgcgtgggcccagtgtccaccgtgggcatcacggcgcccctgcccacaccactgccggtggagccccgcctgggggagctggcggtggcggccgtgacctcggactcagtgggcctctcatggacggtggcccagggcccctttgactccttcctggtacagtacagggacgcgcaggggcagccccaggcagtgcctgtgagcggagacctccgagcggtcgccgtctcggggctggacccggcccgcaagtacaagttcctgctctttggactccagaatgggaaacgccacggcccagtccctgtggaggccaggaccgccccagacaccaaaccgtctccccgcctgggggagctgactgtgacagatgcgacccctgactccgtgggcctctcgtggacggtccctgagggcgaattcgactccttcgtggtccagtacaaggataaggatggtcggctccaggtggtgccggtggcagccaaccagcgggaggtcacagtccagggcctggagcccagtaggaaatacaggttcctgctctatggtctgtcaggcaggaaacgactgggccccatctctgctgacagcaccacagctcccctggagaaggagctacctccccacctgggggaactgaccgtggctgaggagacctccagctctctgcgcctgtcctggacggtagcccagggcccctttgactccttcgtggtccagtacagggacacggacgggcagcccagggcagtgcctgtggccgcagaccagcgcacagtcaccgtagaggacctggagcctggcaagaaatacaagtttctgctctacgggctccttgggggaaagcgcctgggcccggtctctgccctgggaatgacagccccagaagaggacacaccagccccagagttagccccagaggcccctgagcctcctgaagagccccgcctaggagtgctgaccgtgaccgacacaaccccagactccatgcgcctctcgtggagcgtggcccagggcccctttgattccttcgtggtccagtatgaggacacgaacgggcagccccaggccttgctcgtggacggcgaccagagcaagatcctcatctcaggcctggagcccagcaccccctacaggttcctcctctatggcctccatgaagggaagcgcctggggcccctctcagctgagggcaccacagggctggctcctgctggtcagacctcagaggagtcaaggccccgcctgtcccagctgtctgtgactgacgtgaccaccagttcactgaggctcaactgggaggccccaccgggggccttcgactccttcctgctccgctttggggttccatcaccaagcactctggagccgcatccgcgtccactgctgcagcgcgagctgatggtgccggggacgcggcactcggccgtgctccgggacctgcgttccgggactctgtacagcctgacactgtatgggctgcgaggaccccacaaggccgacagcatccagggaaccgcccgcaccctcagcccagttctggagagcccccgtgacctccaattcagtgaaatcagggagacctcagccaaggtcaactggatgcccccaccatcccgggcggacagcttcaaagtctcctaccagctggcggacggaggggagcctcagagtgtgcaggtggatggccaggcccggacccagaaactccaggggctgatcccaggcgctcgctatgaggtgaccgtggtctcggtccgaggctttgaggagagtgagcctctcacaggcttcctcaccacggttcctgacggtcccacacagttgcgtgcactgaacttgaccgagggattcgccgtgctgcactggaagcccccccagaatcctgtagacacctatgacatccaggtcacagcccctggggccccgcctctgcaggcggagaccccaggcagcgcggtggactaccccctgcatgaccttgtcctccacaccaactacaccgccacagtgcgtggcctgcggggccccaacctcacttccccagccagcatcaccttcaccacagggctagaggcccctcgggacttggaggccaaggaagtgaccccccgcaccgccctgctcacttggactgagcccccagtccggcccgcaggctacctgctcagcttccacacccctggtggacagacccaggagatcctgctcccaggagggatcacatctcaccagctccttggcctctttccctccacctcctacaatgcacggctccaggccacgtggggccagagcctcctgccgcccgtgtccacctctttcaccacgggtgggctgcggatccccttccccagggactgcggggaggagatgcagaacggagccggtgcctccaggaccagcaccatcttcctcaacggcaaccgcgagcggcccctgaacgtgttttgcgacatggagactgatgggggcggctggctggtgttccagcgccgcatggatggacagacagacttctggagggactgggaggactatgcccatggttttgggaacatctctggagagttctggctgggcaatgaggccctgcacagcctgacacaggcaggtgactactccatgcgcgtggacctgcgggctggggacgaggctgtgttcgcccagtacgactccttccacgtagactcggctgcggagtactaccgcctccacttggagggctaccacggcaccgcaggggactccatgagctaccacagcggcagtgtcttctctgcccgtgatcgggaccccaacagcttgctcatctcctgcgctgtctcctaccgaggggcctggtggtacaggaactgccactacgccaacctcaacgggctctacgggagcacagtggaccatcagggagtgagctggtaccactggaagggcttcgagttctcggtgcccttcacggaaatgaagctgagaccaagaaactttcgctccccagcggggggaggctgagctgctgcccacctctctcgcaccccagtatgactgccgagcactgaggggtcgccccgagagaagagccagggtccttcaccacccagccgctggaggaagccttctctgccagcgatctcgcagcactgtgtttacaggggggaggggaggggttcgtacgggagcaataaaggagaaactgaggtacccgg

SEQ ID NO: 190066 - DNA, 372 bp, Homo sapiens
  Payload ID: 17533
  Gene Symbol: TNXB
  Gene Name: tenascin XB
  ENST ID: ENST00000448391
  CDS Start-End: 350-372
agttcaggtttatgtgtgtgcatttcttttttattattattaaataaacaacttggagggagttgaaggaatggtggctgccttcctggctcgtgatggggagtttgggggaaagtggcttttccagagccagcatcaaagaatcaagcactgaagacatagctggctctgaggtggggtgggtgcgggatcacagaccgcatgtcatccccttgcccccacccctgcaactctggggtatatctgtgtctagcaacgatgtctcatggcgtgacagactagaggatacgcatccctggaatgtgagtcaacaggaaagatggggccccacgcccttcaggcctcctgaatgatgccagcccagtatgctct

SEQ ID NO: 190067 - DNA, 1902 bp, Homo sapiens
  Payload ID: 17533
  Gene Symbol: TNXB
  Gene Name: tenascin XB
  ENST ID: ENST00000433037
  CDS Start-End: 1-1902
ggtcctcacccttgggcctcttggggactaccgatgagcctcctccctcaggcccctcgacgacgcaaggggcccaggctcctctcctgcagcagcgcccccaggagctgggagagttgagggtgctgggcagagatgagacagggcgcctccgtgtggtctggaccgcccagcctgacacctttgcctacttccaactgcgcatgcgggtgcccgaggggccgggggcacatgaggaagtgctgccaggggacgtccgccaggctctggtgcctccaccccctcctggaaccccgtatgagctgtcacttcatggggtccctcctgggggcaagccctctgaccccatcatctaccaaggcattatggacaaggatgaggagaagcctgggaagtcctcaggcccaccacgcctgggtgagctgacggtgacagacaggacctccgactccttgctcctgcgctggacggtccccgagggcgagtttgactccttcgtgatccagtacaaagacagggacgggcagccccaggtggtgcccgtggaaggaccccagcgctcggccgtcatcacctccctggatcctggccgcaagtacaaatttgtcctgtatgggtttgttggcaagaagaggcatggtccgctggtggctgaagccaagatcttgcctcagagtgacccaagtccagggactccaccccgcctgggaaacctgtgggtgacagaccctaccccagattcactgcacctctcctggactgtccctgagggccagtttgacaccttcatggtccagtacagggacagggatggacggccccaggtggtacctgtggaagggcccgagcgttcatttgttgtctcctcactggaccctgaccacaagtacagattcactctgtttggaattgcgaacaagaagcggtatggccccctcacggccgatggcaccactgctccagagaggaaagaggagcccccccgccctgagttcctggagcagcccctcctgggggaactgacagtgaccggcgtgaccccagactccttgcgtctctcatggacagtggcccagggccccttcgactcattcatggtccagtacaaggatgcacaggggcagccccaggcagtgcctgttgcgggggatgagaatgaggttactgtccccggcctggatcccgaccggaagtataagatgaacctctacgggcttcgtggcaggcagcgtgtggggcccgagtctgtggtggccaagactgctcctcaggaggatgtggacgagacccccagccccacagaactgggcacggaggccccggagtcccccgaggagccgctcctgggggagctgacagtgacaggatcctcccctgattcgctgagcctcttctggaccgtcccccagggcagcttcgactctttcaccgtgcagtacaaggacagggatgggcggccccgggcggtgcgtgttgggggcaaggagagtgaggtcaccgtgggaggcctagagcccgggcacaagtacaagatgcacctgtacggcctccacgaggggcagcgcgtgggcccggtgtccgccgtgggcgtgacagccccacaacaagaagagacccctccagccactgagtccccgctggagccacgcctaggagagctgacagtgacagatgtgacccccaactctgtgggcctctcctggacagtccccgagggccagtttgactccttcatagtccagtacaaggacaaggacgggcagccccaggtggtgccggtggcggcagaccagcgagaggtcacagtctacaacctggagcctgagagaaaatataagatgaacatgtatggactacatgatgggcaacgcatgggccccctgtctgtggtcatcgtgacgg

SEQ ID NO: 190068 - DNA, 372 bp, Homo sapiens; identical to SEQ ID NO: 190066
  Payload ID: 17533
  Gene Symbol: TNXB
  Gene Name: tenascin XB
  ENST ID: ENST00000442721
  CDS Start-End: 350-372

SEQ ID NO: 190069 - DNA, 6849 bp, Homo sapiens
  Payload ID: 17533
  Gene Symbol: TNXB
  Gene Name: tenascin XB
  ENST ID: ENST00000451159
  CDS Start-End: 9-6849
cctcctgaatgatgccagcccagtatgctctaacctccagcctggttctcctggtgctgctgagcacagccagagcaggccccttctcttcacggtccaatgtgacactgccagccccccggccccctccccagccagggggccacacagtgggggctggagtgggaagcccctcttctcagctttacgagcacacagtggaaggaggggagaagcaggtggtattcacccaccgcattaacctgcccccttccactggctgtggctgtcccccaggcaccgagcccccagtccttgcttcagaggtacaggccctgagggtccgtctagagatcctggaggagttggtgaaggggctcaaggaacagtgcactgggggatgttgtcctgcctctgcccaagctggcacaggtcagacagatgtgcggaccctctgcagtctccatggtgtgtttgatctgagccgctgcacctgttcctgtgagccaggctggggtgggcccacctgctcagaccccacagatgctgagatccctccctcttccccaccctcagcctcggggtcctgcccagatgactgcaatgatcagggtcgctgtgtccgtggtcgttgcgtgtgctttcccggctacactggccccagctgtggctggccatcctgtcccggggactgccaaggccgtgggcgctgcgtgcagggcgtgtgtgtgtgccgggcaggcttctcaggccccgactgcagccagcgctcctgccctcgaggttgcagccagaggggacgctgtgagggtgggcgctgcgtgtgtgacccaggctacactggtgacgactgtggcatgaggagctgccctcgcggttgcagtcagagggggcgctgtgagaatgggcgctgcgtgtgtaaccccggctacactggcgaggactgtggggtgaggagctgccctcggggctgcagccagcggggacgctgcaaggacgggcgctgcgtgtgtgaccccggctacactggcgaggactgtggtacgcggagctgcccctgggactgtggcgagggcgggcgctgcgtggacggccgctgcgtgtgctggcccgggtacacaggcgaggactgcagcacgcggacatgtccgagggactgccggggccgcgggcgctgcgaggacggcgaatgcatttgcgacacgggctacagcggggacgactgcggcgtgcgcagctgccctggcgactgcaaccaaaggggccgctgcgaggacggccgctgcgtgtgctggccggggtacactggaaccgattgcggctcgcgcgcctgcccacgcgactgtagaggtcgcgggcgctgcgagaacggcgtgtgtgtttgcaatgcgggctacagcggcgaggactgcggtgtgcgcagctgtcctggggactgtcgtggccggggccgctgtgagagtggccgctgcatgtgttggccggggtacacaggccgggactgcggcacgcgcgcctgtcctggcgactgtcgcgggcgcgggcgctgcgtggatggccgctgcgtgtgcaacccgggcttcaccggtgaggactgtgggagccgtcgctgtcccggggactgccgtgggcacggcctttgcgaggatggcgtgtgcgtgtgtgacgcaggctactcaggggaagactgcagcacgcgcagctgccccgggggctgccgaggccgcggccagtgcctagatgggcggtgtgtgtgcgaggacggctactctggcgaggattgcggtgtgaggcagtgcccgaatgactgcagccagcacggcgtgtgccaggacggtgtgtgcatctgttgggaaggctacgtgagtgaggactgcagcatccgcacctgcccctccaactgccacgggaggggccgctgtgaggaagggcgctgcctgtgcgacccaggctacaccggccctacctgtgccacccgcatgtgcccggctgactgccggggacgtgggcggtgtgtgcaaggagtgtgcctgtgccacgtgggctatggcggtgaggactgcgggcaggaagagcctccagccagcgcctgccctggaggctgcgggccccgggaactgtgccgggcaggccagtgtgtgtgtgtagagggcttccgaggccctgactgtgccatccagacatgcccaggggactgccgtggccgaggagagtgtcacgatggcagctgtgtctgcaaagatgggtatgctggcgaagactgcggagaagaggtgccaaccattgagggcatgaggatgcatctcttggaggagacaacagttcggacagagtggaccccggctcctggccccgtggatgcctatgaaattcagttcatccccacgacagagggggcgagccccccattcacagcacgggttccaagctctgcctcagcctatgaccagagaggactggcccctggacaggagtaccaggtcactgtccgagcccttcgagggaccagctggggccttcctgcctccaagaccatcaccaccatgatcgatgggccccaggacctccgagtggtggctgtgacaccgacaacactggagcttggctggctgcgtccccaggctgaggtggaccgatttgtggtgtcctacgtcagtgccggcaaccagagggtgaggctggaagtgccccctgaagcagacgggacgctgctgactgacctgatgccaggcgtagaatatgtggtgactgtcacagcggagcggggccgggcagtcagctacccagcttctgtcagggccaacacagggtcctcacccttgggcctcttggggactaccgatgagcctcctccctcaggcccctcgacgacgcaaggggcccaggctcctctcctgcagcagcgcccccaggagctgggagagttgagggtgctgggcagagatgagacagggcgcctccgtgtggtctggaccgcccagcctgacacctttgcctacttccaactgcgcatgcgggtgcccgaggggccgggggcacatgaggaagtgctgccaggggacgtccgccaggctctggtgcctccaccccctcctggaaccccgtatgagctgtcacttcatggggtccctcctgggggcaagccctctgaccccatcatctaccaaggcattatggacaaggatgaggagaagcctgggaagtcctcaggcccaccacgcctgggtgagctgacggtgacagacaggacctccgactccttgctcctgcgctggacggtccccgagggcgagtttgactccttcgtgatccagtacaaagacagggacgggcagccccaggtggtgcccgtggaaggaccccagcgctcggccgtcatcacctccctggatcctggccgcaagtacaaatttgtcctgtatgggtttgttggcaagaagaggcatggtccgctggtggctgaagccaagatcttgcctcagagtgacccaagtccagggactccaccccacctgggaaacctgtgggtgacagaccctaccccagattcactgcacctctcctggactgtccctgagggccagtttgacaccttcatggtccagtacagggacagggatggacggccccaggtggtacctgtggaagggcccgagcgttcatttgttgtctcctcactggaccctgaccacaagtacagattcactctgtttggaattgcgaacaagaagcggtatggccccctcacggccgatggcaccactgctccagagaggaaagaggagcccccccgccctgagttcctggagcagcccctcctgggggaactgacagtgaccggcgtgaccccagactccttgcgtctctcatggacagtggcccagggccccttcgactcattcatggtccagtacaaggatgcacaggggcagccccaggcagtgcctgttgcgggggatgagaatgaggttactgtccccggcctggatcccgaccggaagtataagatgaacctctacgggcttcgtggcaggcagcgtgtggggcccgagtctgtggtggccaagactgctcctcaggaggatgtggacgagacccccagccccacagaactgggcacggaggccccggagtcccccgaggagccgctcctgggggagctgacagtgacaggatcctcccctgattcgctgagcctcttctggaccgtcccccagggcagcttcgactctttcaccgtgcagtacaaggacagggatgggcggccccgggcggtgcgtgttgggggcaaggagagtgaggtcaccgtgggaggcctagagcccgggcacaagtacaagatgcacctgtacggcctccacgaggggcagcgcgtgggcccggtgtccgccgtgggcgtgacagccccacaacaagaagagacccctccagccactgagtccccgctggagccacgcctaggagagctgacagtgacagatgtgacccccaactctgtgggcctctcctggacagtccccgagggccagtttgactccttcatagtccagtacaaggacaaggacgggcagccccaggtggtgccggtggcggcagaccagcgagaggtcacagtctacaacctggagcctgagagaaaatataagatgaacatgtatggactacatgatgggcaacgcatgggccccctgtctgtggtcatcgtgacggctcccctcccaccagccccagccacagaggcctccaagcctcccctggagccacgcctaggggagctgacagtgacggatataacccctgactctgtgggcctctcatggacagtccctgagggtgaattcgactcctttgtggttcagtacaaggacagggacgggcagccccaggtggtgcccgtggctgcagatcagcgggaggtcactatccctgacctggaaccctcccgcaagtacaagttcctgctctttgggatccaggatgggaaacgacgcagcccagtctctgtggaggcaaagacggttgcccgaggtgacgccagcccaggggccccaccccgccttggggagctgtgggtgacagaccccaccccagactcactgcgcctctcctggacggttcctgagggccagttcgactcttttgtggtccagttcaaggacaaagacgggccccaggtggtgcccgtggagggccatgagcgctctgtcactgtcacccctctggatgccggccgcaagtacagattcctcctctatggcctcctgggcaagaagcgccatggccctctcactgccgacggcaccacggaagcccggagtgctatggatgatactggaacaaagcgtcccccaaaaccccgtctgggggaggagctgcaggtgaccaccgtgacccagaactccgtgggcctctcctggacagtccctgagggccagtttgactcctttgtggtccagtacaaagacagggacgggcagccccaggtggtgcccgtggagggcagcctcagggaggtcagcgtgccgggcctggaccctgcccacaggtacaagctgctgctctacgggctgcaccacggcaagcgtgtgggccccatctcggccgtcgccattactgccggcagggaagaaacggaaactgagaccacggccccgacccctccagcgcctgagccccacctcggggagttgacagtggaggaggccacgtcacacaccctgcatctctcctggatggtgactgagggagaatttgactccttcgaaatccagtacacagatagagacgggcaactccaaatggtccgcataggaggtgaccggaatgacatcaccctctctggcctggaatccgaccacagatacctggtgaccctgtatggtttcagtgatgggaagcatgtaggtcctgtccatgtcgaggccctgacagtcccggaggaggagaagccttcagaacctcccaccgcaacccccgagccccccatcaagcctcgcctgggggagctgaccgtgacagatgccacccctgactccctcagcctgtcctggacagttcccgagggacagtttgaccacttcctggtccagtacaggaatggagatgggcagcccaaggcagtgagggtgccagggcacgaggaaggggtcaccatctcgggcctggagccagaccataaatacaagatgaacctgtacggcttccacggtggccagcgcatgggccctgtgtctgtcgtcggggtgacagctgcagaggaagagacccccagccccacagaacccagcatggaggccccggagcccgctgaggagccgctcctgggggagctaacagtgacaggatcctcccctgactcgctgagcctctcctggaccgtcccccagggccgcttcgactccttcaccgtgcagtacaaggacagggacgggcggccccaggtggtgcgtgttgggggcgaggagagtgaagtcaccgtggggggcctggagcctgggcgcaagtacaagatgcacctgtacggcctccacgaggggcggcgcgtgggcccagtgtctgctgtgggcgtcacggcccccgaagaggagtcccctgatgctcctcttgcaaagctgcgcctagggcagatgacagtgagagacatcacctccgactccctcagcctctcctggacagtccccgagggccagtttgaccatttcttggtccagtttaagaatggggacgggcagcccaaggcggtgcgggtgccgggacacgaggatggggtcaccatctcgggcctggagccagaccacaagtacaagatgaacctgtacggcttccacggtggccagcgcgtgggccccgtgtctgctgttggtttaactg

SEQ ID NO: 190070 - DNA, 13065 bp, Homo sapiens
  Payload ID: 17533
  Gene Symbol: TNXB
  Gene Name: tenascin XB
  ENST ID: ENST00000424718
  CDS Start-End: 203-12871
tcctccccttctcctcccctgctcgctgcagactccctcctcactgtcgctgccgagatccacagtcggttgtggctcagcccctgttgcaggggacaagtgagggagacttccctgtcctgccctgagacgccgccctcccggggttggggacagagcaggtgcagaggcactgcagctgctcggttgcccagcctcctgaatgatgccagcccagtatgctctaacctccagcctggttctcctggtgctgctgagcacagccagagcaggccccttctcttcacggtccaatgtgacactgccagccccccggccccctccccagccagggggccacacagtgggggctggagtgggaagcccctcttctcagctttacgagcacacagtggaaggaggggagaagcaggtggtattcacccaccgcattaacctgcccccttccactggctgtggctgtcccccaggcaccgagcccccagtccttgcttcagaggtacaggccctgagggtccgtctagagatcctggaggagttggtgaaggggctcaaggaacagtgcactgggggatgttgtcctgcctctgcccaagctggcacaggtcagacagatgtgcggaccctctgcagtctccatggtgtgtttgatctgagccgctgcacctgttcctgtgagccaggctggggtgggcccacctgctcagaccccacagatgctgagatccctccctcttccccaccctcagcctcggggtcctgcccagatgactgcaatgatcagggtcgctgtgtccgtggtcgttgcgtgtgctttcccggctacactggccccagctgtggctggccatcctgtcccggggactgccaaggccgtgggcgctgcgtgcagggcgtgtgtgtgtgccgggcaggcttctcaggccccgactgcagccagcgctcctgccctcgaggttgcagccagaggggacgctgtgagggtgggcgctgcgtgtgtgacccaggctacactggtgacgactgtggcatgaggagctgccctcgcggttgcagtcagagggggcgctgtgagaatgggcgctgcgtgtgtaaccccggctacactggcgaggactgtggggtgaggagctgccctcggggctgcagccagcggggacgctgcaaggacgggcgctgcgtgtgtgaccccggctacactggcgaggactgtggtacgcggagctgcccctgggactgtggcgagggcgggcgctgcgtggacggccgctgcgtgtgctggcccgggtacacaggcgaggactgcagcacgcggacatgtccgagggactgccggggccgcgggcgctgcgaggacggcgaatgcatttgcgacacgggctacagcggggacgactgcggcgtgcgcagctgccctggcgactgcaaccaaaggggccgctgcgaggacggccgctgcgtgtgctggccggggtacactggaaccgattgcggctcgcgcgcctgcccacgcgactgtagaggtcgcgggcgctgcgagaacggcgtgtgtgtttgcaatgcgggctacagcggcgaggactgcggtgtgcgcagctgtcctggggactgtcgtggccggggccgctgtgagagtggccgctgcatgtgttggccggggtacacaggccgggactgcggcacgcgcgcctgtcctggcgactgtcgcgggcgcgggcgctgcgtggatggccgctgcgtgtgcaacccgggcttcaccggtgaggactgtgggagccgtcgctgtcccggggactgccgtgggcacggcctttgcgaggatggcgtgtgcgtgtgtgacgcaggctactcaggggaagactgcagcacgcgcagctgccccgggggctgccgaggccgcggccagtgcctagatgggcggtgtgtgtgcgaggacggctactctggcgaggattgcggtgtgaggcagtgcccgaatgactgcagccagcacggcgtgtgccaggacggtgtgtgcatctgttgggaaggctacgtgagtgaggactgcagcatccgcacctgcccctccaactgccacgggaggggccgctgtgaggaagggcgctgcctgtgcgacccaggctacaccggccctacctgtgccacccgcatgtgcccggctgactgccggggacgtgggcggtgtgtgcaaggagtgtgcctgtgccacgtgggctatggcggtgaggactgcgggcaggaagagcctccagccagcgcctgccctggaggctgcgggccccgggaactgtgccgggcaggccagtgtgtgtgtgtagagggcttccgaggccctgactgtgccatccagacatgcccaggggactgccgtggccgaggagagtgtcacgatggcagctgtgtctgcaaagatgggtatgctggcgaagactgcggagaagaggtgccaaccattgagggcatgaggatgcatctcttggaggagacaacagttcggacagagtggaccccggctcctggccccgtggatgcctatgaaattcagttcatccccacgacagagggggcgagccccccattcacagcacgggttccaagctctgcctcagcctatgaccagagaggactggcccctggacaggagtaccaggtcactgtccgagcccttcgagggaccagctggggccttcctgcctccaagaccatcaccaccatgatcgatgggccccaggacctccgagtggtggctgtgacaccgacaacactggagcttggctggctgcgtccccaggctgaggtggaccgatttgtggtgtcctacgtcagtgccggcaaccagagggtgaggctggaagtgccccctgaagcagacgggacgctgctgactgacctgatgccaggcgtagaatatgtggtgactgtcacagcggagcggggccgggcagtcagctacccagcttctgtcagggccaacacagggtcctcacccttgggcctcttggggactaccgatgagcctcctccctcaggcccctcgacgacgcaaggggcccaggctcctctcctgcagcagcgcccccaggagctgggagagttgagggtgctgggcagagatgagacagggcgcctccgtgtggtctggaccgcccagcctgacacctttgcctacttccaactgcgcatgcgggtgcccgaggggccgggggcacatgaggaagtgctgccaggggacgtccgccaggctctggtgcctccaccccctcctggaaccccgtatgagctgtcacttcatggggtccctcctgggggcaagccctctgaccccatcatctaccaaggcattatggacaaggatgaggagaagcctgggaagtcctcaggcccaccacgcctgggtgagctgacggtgacagacaggacctccgactccttgctcctgcgctggacggtccccgagggcgagtttgactccttcgtgatccagtacaaagacagggacgggcagccccaggtggtgcccgtggaaggaccccagcgctcggccgtcatcacctccctggatcctggccgcaagtacaaatttgtcctgtatgggtttgttggcaagaagaggcatggtccgctggtggctgaagccaagatcttgcctcagagtgacccaagtccagggactccaccccgcctgggaaacctgtgggtgacagaccctaccccagattcactgcacctctcctggactgtccctgagggccagtttgacaccttcatggtccagtacagggacagggatggacggccccaggtggtacctgtggaagggcccgagcgttcatttgttgtctcctcactggaccctgaccacaagtacagattcactctgtttggaattgcgaacaagaagcggtatggccccctcacggccgatggcaccactgctccagagaggaaagaggagcccccccgccctgagttcctggagcagcccctcctgggggaactgacagtgaccggcgtgaccccagactccttgcgtctctcatggacagtggcccagggccccttcgactcattcatggtccagtacaaggatgcacaggggcagccccaggcagtgcctgttgcgggggatgagaatgaggttactgtccccggcctggatcccgaccggaagtataagatgaacctctacgggcttcgtggcaggcagcgtgtggggcccgagtctgtggtggccaagactgctcctcaggaggatgtggacgagacccccagccccacagaactgggcacggaggccccggagtcccccgaggagccgctcctgggggagctgacagtgacaggatcctcccctgattcgctgagcctcttctggaccgtcccccagggcagcttcgactctttcaccgtgcagtacaaggacagggatgggcggccccgggcggtgcgtgttgggggcaaggagagtgaggtcaccgtgggaggcctagagcccgggcacaagtacaagatgcacctgtacggcctccacgaggggcagcgcgtgggcccggtgtccgccgtgggcgtgacagccccacaacaagaagagacccctccagccactgagtccccgctggagccacgcctaggagagctgacagtgacagatgtgacccccaactctgtgggcctctcctggacagtccccgagggccagtttgactccttcatagtccagtacaaggacaaggacgggcagccccaggtggtgccggtggcggcagaccagcgagaggtcacagtctacaacctggagcctgagagaaaatataagatgaacatgtatggactacatgatgggcaacgcatgggccccctgtctgtggtcatcgtgacggctcccctcccaccagccccagccacagaggcctccaagcctcccctggagccacgcctaggggagctgacagtgacggatataacccctgactctgtgggcctctcatggacagtccctgagggtgaattcgactcctttgtggttcagtacaaggacagggacgggcagccccaggtggtgcccgtggctgcagatcagcgggaggtcactatccctgacctggaaccctcccgcaagtacaagttcctgctctttgggatccaggatgggaaacgacgcagcccagtctctgtggaggcaaagacggttgcccgaggtgacgccagcccaggggccccaccccgccttggggagctgtgggtgacagaccccaccccagactcactgcgcctctcctggacggttcctgagggccagttcgactcttttgtggtccagttcaaggacaaagacgggccccaggtggtgcccgtggagggccatgagcgctctgtcactgtcacccctctggatgccggccgcaagtacagattcctcctctatggcctcctgggcaagaagcgccatggccctctcactgccgacggcaccacggaagcccggagtgctatggatgatactggaacaaagcgtcccccaaaaccccgtctgggggaggagctgcaggtgaccaccgtgacccagaactccgtgggcctctcctggacagtccctgagggccagtttgactcctttgtggtccagtacaaagacagggacgggcagccccaggtggtgcccgtggagggcagcctcagggaggtcagcgtgccgggcctggaccctgcccacaggtacaagctgctgctctacgggctgcaccacggcaagcgtgtgggccccatctcggccgtcgccattactgccggcagggaagaaacggaaactgagaccacggccccgacccctccagcgcctgagccccacctcggggagttgacagtggaggaggccacgtcacacaccctgcatctctcctggatggtgactgagggagaatttgactccttcgaaatccagtacacagatagagacgggcaactccaaatggtccgcataggaggtgaccggaatgacatcaccctctctggcctggaatccgaccacagatacctggtgaccctgtatggtttcagtgatgggaagcatgtaggtcctgtccatgtcgaggccctgacagtcccggaggaggagaagccttcagaacctcccaccgcaacccccgagccccccatcaagcctcgcctgggggagctgaccgtgacagatgccacccctgactccctcagcctgtcctggacagttcccgagggacagtttgaccacttcctggtccagtacaggaatggagatgggcagcccaaggcagtgagggtgccagggcacgaggaaggggtcaccatctcgggcctggagccagaccataaatacaagatgaacctgtacggcttccacggtggccagcgcatgggccctgtgtctgtcgtcggggtgacagctgcagaggaagagacccccagccccacagaacccagcatggaggccccggagcccgctgaggagccgctcctgggggagctaacagtgacaggatcctcccctgactcgctgagcctctcctggaccgtcccccagggccgcttcgactccttcaccgtgcagtacaaggacagggacgggcggccccaggtggtgcgtgttgggggcgaggagagtgaagtcaccgtggggggcctggagcctgggcgcaagtacaagatgcacctgtacggcctccacgaggggcggcgcgtgggcccagtgtctgctgtgggcgtcacggcccccgaagaggagtcccctgatgctcctcttgcaaagctgcgcctagggcagatgacagtgagagacatcacctccgactccctcagcctctcctggacagtccccgagggccagtttgaccatttcttggtccagtttaagaatggggatgggcagcccaaggcggtgcgggtgccgggacacgaggatggggtcaccatctcgggcctggagccagaccacaagtacaagatgaacctgtacggcttccacggtggccagcgcgtgggccccgtgtctgctgttggtttaactgccccaggaaaggatgaagaaatggccccagcctcgacagaacctcccacccctgaaccccccatcaagcctcgcctggaggagctgaccgtgacagatgcgacccctgactccctcagcctgtcctggacggttcccgagggacagtttgaccacttcctggtccagtacaagaatggggatgggcagcccaaggcaacacgggtgccaggacatgaggacagggtcaccatctccggcctggagccagacaacaagtacaagatgaacctgtacggcttccacggtggccagcgtgtgggccccgtgtctgccatcggggtgacagctgcagaggaagagacccccagccccacagaacccagcatggaggccccggagccccctgaggagccgctcctgggggagctgacagtgacaggatcctcccctgactcgctgagcctctcctggaccgtcccccagggccgcttcgactccttcaccgtgcagtacaaggacagggacgggcggccccaggtggtgcgtgttgggggcgaggagagcgaggtcaccgtggggggcctggagcctgggcgcaaatacaagatgcacctgtacggcctccacgaggggcggcgcgtgggcccggtgtccaccgtgggcgtgactgccccacaagaggatgtggacgagacccccagccctacagaaccaggcacagaggccccagagccccccgaggagcctctcctgggggagctgacagtgacaggatcctcccctgactcgctgagcctttcctggaccgtcccccagggccgctttgactccttcaccgtgcagtacaaggacagggacgggcggccccaggcggtgcgtgttgggggccaggagagcaaggtcactgtgaggggcctggagcctgggcgcaagtacaagatgcacctgtacggcctccacgaggggcggcgcctgggcccggtgtctgccgtgggcgtcacagaggatgaagccgagaccacccaagcagtgcctaccatgacccctgagccccccatcaagcctcgcctgggggagctgaccatgacagatgccacccctgactccctcagcctgtcctggacggttcccgagggccagtttgaccacttcctggtccagtacaggaatggggatgggcagcccaaggcggtgcgggtgccggggcacgaggacggggtcaccatctcaggcctggagccagaccataaatacaagatgaacctgtacggcttccacggtggccagcgcgtgggccccatctctgtcattggggtgacggctgcagaggaagagacccccagccccacggaactcagcactgaggccccggagccccctgaggagccgctcctgggggagctgacagtgacaggatcctcccctgactcgctgagcctctcctggaccatcccccagggccacttcgactccttcaccgtgcagtacaaggacagggacgggcggccccaggtgatgcgtgtcaggggcgaggagagcgaggtcaccgtggggggcctggagcccgggcgcaaatacaagatgcacctgtacggcctccacgaggggcggcgtgtgggcccggtgtccaccgtgggtgtgacagtgcccaccacaacccctgagccccccaacaagcctcgcctcggggagctgaccgtgacagatgccacccctgactccctcagcctgtcctggatggtccccgagggccagtttgaccacttcctggtccagtacaggaatggggatgggcagcccaaggtggtgcgggtgccggggcacgaggacggggtcaccatctcaggcctggagccagaccacaagtacaagatgaacctgtacggcttccacggtggccagcgcgtgggccccatctctgtcattggggtgacagctgcagaggaagaaactcccgcccccacagaacccagcacggaggccccggagccccctgaggagccgctcctgggggagctgacagtgacaggatcctcccctgactcgctgagcctctcctggaccatcccccagggccgcttcgactccttcactgtgcagtacaaggacagggacgggcggccccaggtggtgcgtgtcaggggcgaggagagcgaggtcaccgtggggggcctggagcccgggtgcaaatacaagatgcacctgtacggcctccacgaggggcagcgcgtgggcccagtgtccgctgtgggtgtgacagtgcctaccatgacccctgagccccccatcaagcctcgcctgggggagctgaccgtgacagatgccacccccgactccctcagcctgtcctggatggttcccgagggccagtttgaccacttcctggtccagtacaggaatggggatgggcagcccaaggcggtgcgggtgccggggcacgaggacggggtcaccatctcaggcctggagccagaccataaatacaagatgaacctgtacggcttccacggtggccagcgcgtaggccctgtgtctgccattggggtgacggaggaagagacccccagccccacagaacccagcactgaggccccggaggcccctgaggagccgctcctgggggagttgacagtgacaggatcctcccctgactcgctgagcctctcctggaccgtcccccagggccgcttcgactccttcaccgtgcagtacaaggacagggacgggcagccccaggtggtgcgtgtcaggggcgaggagagcgaggtcaccgtggggggcctggagcccgggcgcaaatacaagatgcatctgtacggcctccacgaggggcagcgcgtgggcccagtgtccaccgtgggcatcacggcgcccctgcccacaccactgccggtggagccccgcctgggggagctggcggtggcggccgtgacctcggactcagtgggcctctcatggacggtggcccagggcccctttgactccttcctggtacagtacagggacgcgcaggggcagccccaggcagtgcctgtgagcggagacctccgagcggtcgccgtctcggggctggacccggcccgcaagtacaagttcctgctctttggactccagaatgggaaacgccacggcccagtccctgtggaggccaggaccgccccagacaccaaaccgtctccccgcctgggggagctgactgtgacagatgcgacccctgactccgtgggcctctcgtggacggtccctgagggcgaattcgactccttcgtggtccagtacaaggataaggatggtcggctccaggtggtgccggtggcagccaaccagcgggaggtcacagtccagggcctggagcccagtaggaaatacaggttcctgctctatggtctgtcaggcaggaaacgactgggccccatctctgctgacagcaccacagctcccctggagaaggagctacctccccacctgggggaactgaccgtggctgaggagacctccagctctctgcgcctgtcctggacggtagcccagggcccctttgactccttcgtggtccagtacagggacacggacgggcagcccagggcagtgcctgtggccgcagaccagcgcacagtcaccgtagaggacctggagcctggcaagaaatacaagtttctgctctacgggctccttgggggaaagcgcctgggcccggtctctgccctgggaatgacagccccagaagaggacacaccagccccagagttagccccagaggcccctgagcctcctgaagagccccgcctaggagtgctgaccgtgaccgacacaaccccagactccatgcgcctctcgtggagcgtggcccagggcccctttgattccttcgtggtccagtatgaggacacgaacgggcagccccaggccttgctcgtggacggcgaccagagcaagatcctcatctcaggcctggagcccagcaccccctacaggttcctcctctatggcctccatgaagggaagcgcctggggcccctctcagctgagggcaccacagggctggctcctgctggtcagacctcagaggagtcaaggccccgcctgtcccagctgtctgtgactgacgtgaccaccagttcactgaggctcaactgggaggccccaccgggggccttcgactccttcctgctccgctttggggttccatcaccaagcacactggagccgcatccgcgtccactgctgcagcgcgagctgatggtgccggggacgcggcactcggccgtgctccgggacctgcgttccgggactctgtacagcctgacactgtatgggctgcgaggaccccacaaggccgacagcatccagggaaccgcccgcaccctcagcccagttctggagagcccccgtgacctccaattcagtgaaatcagggagacctcagccaaggtcaactggatgcccccaccatcccgggcggacagcttcaaagtctcctaccagctggcggacggaggggagcctcagagtgtgcaggtggatggccaggcccggacccagaaactccaggggctgatcccaggcgctcgctatgaggtgaccgtggtctcggtccgaggctttgaggagagtgagcctctcacaggcttcctcaccacggttcctgacggtcccacacagttgcgtgcactgaacttgaccgagggattcgccgtgctgcactggaagcccccccagaatcctgtagacacctatgacatccaggtcacagcccctggggccccgcctctgcaggcggagaccccaggcagcgcggtggactaccccctgcatgaccttgtcctccacaccaactacaccgccacagtgcgtggcctgcggggccccaacctcacttccccagccagcatcaccttcaccacagggctagaggcccctcgggacttggaggccaaggaagtgaccccccgcaccgccctgctcacttggactgagcccccagtccggcccgcaggctacctgctcagcttccacacccctggtggacagacccaggagatcctgctcccaggagggatcacatctcaccagctccttggcctctttccctccacctcctacaatgcacggctccaggccatgtggggccagagcctcctgccgcccgtgtccacctctttcaccacgggtgggctgcggatccccttccccagggactgcggggaggagatgcagaacggagccggtgcctccaggaccagcaccatcttcctcaacggcaaccgcgagcggcccctgatcgtgttttgcgacatggagactgatgggggcggctggctggtgttccagcgccgcatggatggacagacagacttctggagggactgggaggactatgcccatggttttgggaacatctctggagagttctggctgggcaatgaggccctgcacagcctgacacaggcaggtgactactccatgcgcgtggacctgcgggctggggacgaggctgtgttcgcccagtacgactccttccacgtagactcggctgcggagtactaccgcctccacttggagggctaccacggcaccgcaggggactccatgagctaccacagcggcagtgtcttctctgcccgtgatcgggaccccaacagcttgctcatctcctgcgctgtctcctaccgaggggcctggtggtacaggaactgccactacgccaacctcaacgggctctacgggagcacagtggaccatcagggagtgagctggtaccactggaagggcttcgagttctcggtgcccttcacggaaatgaagctgagaccaagaaactttcgctccccagcggggggaggctgagctgctgcccacctctctcgcaccccagtatgactgccgagcactgaggggtcgccccgagagaagagccagggtccttcaccacccagccgctggaggaagccttctctgccagcgatctcgcagcactgtgtttacaggggggaggggaggggttcgtacgggagcaataaaggagaaactgaggtacccgg

SEQ ID NO: 190071 - DNA, 372 bp, Homo sapiens; identical to SEQ ID NO: 190066
  Payload ID: 17533
  Gene Symbol: TNXB
  Gene Name: tenascin XB
  ENST ID: ENST00000437547
  CDS Start-End: 350-372

SEQ ID NO: 190072 - DNA, 31 bp, Homo sapiens
  Payload ID: 17533
  Gene Symbol: TNXB
  Gene Name: tenascin XB
  ENST ID: ENST00000417283
  CDS Start-End: 9-31
cctcctgaatgatgccagcccagtatgctct

SEQ ID NO: 190073 - DNA, 6643 bp, Homo sapiens
  Payload ID: 17533
  Gene Symbol: TNXB
  Gene Name: tenascin XB
  ENST ID: ENST00000412618
  CDS Start-End: 1-6449
ctgcagaggaagagacccccagccccacagaacccagcatggaggccccggagcccgctgaggagccgctcctgggggagctaacagtgacaggatcctcccctgactcgctgagcctctcctggaccgtcccccagggccgcttcgactccttcaccgtgcagtacaaggacagggacgggcggccccaggtggtgcgtgttgggggcgaggagagtgaagtcaccgtggggggcctggagcctgggcgcaagtacaagatgcacctgtacggcctccacgaggggcggcgcgtgggcccagtgtctgctgtgggcgtcacggcccccgaagaggagtcccctgatgctcctcttgcaaagctgcgcctagggcagatgacagtgagagacatcacctccgactccctcagcctctcctggacagtccccgagggccagtttgaccatttcttggtccagtttaagaatggggatgggcagcccaaggcggtgcgggtgccgggacacgaggatggggtcaccatctcgggcctggagccagaccacaagtacaagatgaacctgtacggcttccacggtggccagcgcgtgggccccgtgtctgctgttggtttaactgccccaggaaaggatgaagaaatggccccagcctcgacagaacctcccacccctgaaccccccatcaagcctcgcctggaggagctgaccgtgacagatgcgacccctgactccctcagcctgtcctggacggttcccgagggacagtttgaccacttcctggtccagtacaagaatggggatgggcagcccaaggcaacacgggtgccaggacatgaggacagggtcaccatctccggcctggagccagacaacaagtacaagatgaacctgtacggcttccacggtggccagcgtgtgggccccgtgtctgccatcggggtgacagctgcagaggaagagacccccagccccacagaacccagcatggaggccccggagccccctgaggagccgctcctgggggagctgacagtgacaggatcctcccctgactcgctgagcctctcctggaccgtcccccagggccgcttcgactccttcaccgtgcagtacaaggacagggacgggcggccccaggtggtgcgtgttgggggcgaggagagcgaggtcaccgtggggggcctggagcctgggcgcaaatacaagatgcacctgtacggcctccacgaggggcggcgcgtgggcccggtgtccaccgtgggcgtgactgccccacaagaggatgtggacgagacccccagccctacagaaccaggcacagaggccccagagccccccgaggagcctctcctgggggagctgacagtgacaggatcctcccctgactcgctgagcctttcctggaccgtcccccagggccgctttgactccttcaccgtgcagtacaaggacagggacgggcggccccaggcggtgcgtgttgggggccaggagagcaaggtcactgtgaggggcctggagcctgggcgcaagtacaagatgcacctgtacggcctccacgaggggcggcgcctgggcccggtgtctgccgtgggcgtcacagaggatgaagccgagaccacccaagcagtgcctaccatgacccctgagccccccatcaagcctcgcctgggggagctgaccatgacagatgccacccctgactccctcagcctgtcctggacggttcccgagggccagtttgaccacttcctggtccagtacaggaatggggatgggcagcccaaggcggtgcgggtgccggggcacgaggacggggtcaccatctcaggcctggagccagaccataaatacaagatgaacctgtacggcttccacggtggccagcgcgtgggccccatctctgtcactggggtgacggctgcagaggaagagacccccagccccacggaactcagcactgaggccccggagccccctgaggagccgctcctgggggagctgacagtgacaggatcctcccctgactcgctgagcctctcctggaccatcccccagggccacttcgactccttcaccgtgcagtacaaggacagggacgggcggccccaggtgatgcgtgtcaggggcgaggagagcgaggtcaccgtggggggcctggagcccgggcgcaaatacaagatgcacctgtacggcctccacgaggggcggcgtgtgggcccggtgtccaccgtgggtgtgacagtgcccaccacaacccctgagccccccaacaagcctcgcctcggggagctgaccgtgacagatgccacccctgactccctcagcctgtcctggatggtccccgagggccagtttgaccacttcctggtccagtacaggaatggggatgggcagcccaaggtggtgcgggtgccggggcacgaggacggggtcaccatctcaggcctggagccagaccacaagtacaagatgaacctgtacggcttccacggtggccagcgcgtgggccccatctctgtcattggggtgacagctgcagaggaagaaactcccgcccccacagaacccagcacggaggccccggagccccctgaggagccgctcctgggggagctgacagtgacaggatcctcccctgactcgctgagcctctcctggaccatcccccagggccgcttcgactccttcactgtgcagtacaaggacagggacgggcggccccaggtggtgcgtgtcaggggcgaggagagcgaggtcaccgtggggggcctggagcccgggtgcaaatacaagatgcacctgtacggcctccacgaggggcagcgcgtgggcccagtgtccgctgtgggtgtgacagtgcctaccatgacccctgagccccccatcaagcctcgcctgggggagctgaccgtgacagatgccacccccgactccctcagcctgtcctggatggttcccgagggccagtttgaccacttcctggtccagtacaggaatggggatgggcagcccaaggcggtgcgggtgccggggcacgaggacggggtcaccatctcaggcctggagccagaccataaatacaagatgaacctgtacggcttccacggtggccagcgcgtaggccctgtgtctgccattggggtgacggaggaagagacccccagccccacagaacccagcactgaggccccggaggcccctgaggagccgctcctgggggagttgacagtgacaggatcctcccctgactcgctgagcctctcctggaccgtcccccagggccgcttcgactccttcaccgtgcagtacaaggacagggacgggcagccccaggtggtgcgtgtcaggggcgaggagagcgaggtcaccgtggggggcctggagcccgggcgcaaatacaagatgcatctgtacggcctccacgaggggcagcgcgtgggcccagtgtccaccgtgggcatcacggcgcccctgcccacaccactgccggtggagccccgcctgggggagctggcggtggcggccgtgacctcggactcagtgggcctctcatggacggtggcccagggcccctttgactccttcctggtacagtacagggacgcgcaggggcagccccaggcagtgcctgtgagcggagacctccgagcggtcgccgtctcggggctggacccggcccgcaagtacaagttcctgctctttggactccagaatgggaaacgccacggcccagtccctgtggaggccaggaccgccccagacaccaaaccgtctccccgcctgggggagctgactgtgacagatgcgacccctgactccgtgggcctctcgtggacggtccctgagggcgaattcgactccttcgtggtccagtacaaggataaggatggtcggctccaggtggtgccggtggcagccaaccagcgggaggtcacagtccagggcctggagcccagtaggaaatacaggttcctgctctatggtctgtcaggcaggaaacgactgggccccatctctgctgacagcaccacagctcccctggagaaggagctacctccccacctgggggaactgaccgtggctgaggagacctccagctctctgcgcctgtcctggacggtagcccagggcccctttgactccttcgtggtccagtacagggacacggacgggcagcccagggcagtgcctgtggccgcagaccagcgcacagtcaccgtagaggacctggagcctggcaagaaatacaagtttctgctctacgggctccttgggggaaagcgcctgggcccggtctctgccctgggaatgacagccccagaagaggacacaccagccccagagttagccccagaggcccctgagcctcctgaagagccccgcctaggagtgctgaccgtgaccgacacaaccccagactccatgcgcctctcgtggagcgtggcccagggcccctttgattccttcgtggtccagtatgaggacacgaacgggcagccccaggccttgctcgtggacggcgaccagagcaagatcctcatctcaggcctggagcccagcaccccctacaggttcctcctctatggcctccatgaagggaagcgcctggggcccctctcagctgagggcaccacagggctggctcctgctggtcagacctcagaggagtcaaggccccgcctgtcccagctgtctgtgactgacgtgaccaccagttcactgaggctcaactgggaggccccaccgggggccttcgactccttcctgctccgctttggggttccatcaccaagcacactggagccgcatccgcgtccactgctgcagcgcgagctgatggtgccggggacgcggcactcggccgtgctccgggacctgcgttccgggactctgtacagcctgacactgtatgggctgcgaggaccccacaaggccgacagcatccagggaaccgcccgcaccctcagcccagttctggagagcccccgtgacctccaattcagtgaaatcagggagacctcagccaaggtcaactggatgcccccaccatcccgggcggacagcttcaaagtctcctaccagctggcggacggaggggagcctcagagtgtgcaggtggatggccaggcccggacccagaaactccaggggctgatcccaggcgctcgctatgaggtgaccgtggtctcggtccgaggctttgaggagagtgagcctctcacaggcttcctcaccacggttcctgacggtcccacacagttgcgtgcactgaacttgaccgagggattcgccgtgctgcactggaagcccccccagaatcctgtagacacctatgacatccaggtcacagcccctggggccccgcctctgcaggcggagaccccaggcagcgcggtggactaccccctgcatgaccttgtcctccacaccaactacaccgccacagtgcgtggcctgcggggccccaacctcacttccccagccagcatcaccttcaccacagggctagaggcccctcgggacttggaggccaaggaagtgaccccccgcaccgccctgctcacttggactgagcccccagtccggcccgcaggctacctgctcagcttccacacccctggtggacagacccaggagatcctgctcccaggagggatcacatctcaccagctccttggcctctttccctccacctcctacaatgcacggctccaggccatgtggggccagagcctcctgccgcccgtgtccacctctttcaccacgggtgggctgcggatccccttccccagggactgcggggaggagatgcagaacggagccggtgcctccaggaccagcaccatcttcctcaacggcaaccgcgagcggcccctgatcgtgttttgcgacatggagactgatgggggcggctggctggtgttccagcgccgcatggatggacagacagacttctggagggactgggaggactatgcccatggttttgggaacatctctggagagttctggctgggcaatgaggccctgcacagcctgacacaggcaggtgactactccatgcgcgtggacctgcgggctggggacgaggctgtgttcgcccagtacgactccttccacgtagactcggctgcggagtactaccgcctccacttggagggctaccacggcaccgcaggggactccatgagctaccacagcggcagtgtcttctctgcccgtgatcgggaccccaacagcttgctcatctcctgcgctgtctcctaccgaggggcctggtggtacaggaactgccactacgccaacctcaacgggctctacgggagcacagtggaccatcagggagtgagctggtaccactggaagggcttcgagttctcggtgcccttcacggaaatgaagctgagaccaagaaactttcgctccccagcggggggaggctgagctgctgcccacctctctcgcaccccagtatgactgccgagcactgaggggtcgccccgagagaagagccagggtccttcaccacccagccgctggaggaagccttctctgccagcgatctcgcagcactgtgtttacaggggggaggggaggggttcgtacgggagcaataaaggagaaactgaggtacccgg

SEQ ID NO: 190074 - DNA, 3125 bp, Homo sapiens
  Payload ID: 17533
  Gene Symbol: TNXB
  Gene Name: tenascin XB
  Uniprot ID: P22105
  ENST ID: ENST00000451343
  CDS Start-End: 910-2931
ccttgtgcatttgggctgaagacaaagatgactgcaggagtgggcaggccggagtggggcgccctggcctgtccccaggaaggaggaggagtctgcagccctgtgggcttcaacatccatcaaggagtccagagcaggagccaggccaggcgggagggaaaggccctgggaggggctctctaatctcccagccccgactctgccccgtcactgccactgctcctcattactcgctggggctgctgtcgcctccccgaagggtggccttgtccagatagcggcaaacctccctgccgtggatgagtcaggagcattttcttaagaggaacatcactggaaaacaaaatgagcggggacacagaaaccaacagcagtggctgcatttgtggtacaggctcctcttccagagctcgctgatgcccacctcagacaggcctgaccacggcacggctggtgggatttgccagtcacctcaaccagccagttccaccctcagcttctctcagaagggagcaccacactcctcaagctcagtgaatgtatcccggcatgggtggggccagagcctgtgatatctcgaggtgggctcggcaggacaccggggtgtggaagggggaagcgagcacctgactcagacagcgcgggagctcgcaggagtcacgaggccacagcgacttcattgtctgactgggcctggacctataaacttcccacctcagccttgggccaagcctggaagataaaaatggagcaccccatggcgcccctcactcagattctcccctgggcttctcccacgcagccccagaagaggacacaccagccccagagttagccccagaggcccctgagcctcctgaagagccccgcctaggagtgctgaccgtgaccgacacaaccccagactccatgcgcctctcgtggagcgtggcccagggcccctttgattccttcgtggtccagtatgaggacacgaacgggcagccccaggccttgctcgtggacggcgaccagagcaagatcctcatctcaggcctggagcccagcaccccctacaggttcctcctctatggcctccatgaagggaagcgcctggggcccctctcagctgagggcaccacagggctggctcctgctggtcagacctcagaggagtcaaggccccgcctgtcccagctgtctgtgactgacgtgaccaccagttcactgaggctcaactgggaggccccaccgggggccttcgactccttcctgctccgctttggggttccatcaccaagcactctggagccgcatccgcgtccactgctgcagcgcgagctgatggtgccggggacgcggcactcggccgtgctccgggacctgcgttccgggactctgtacagcctgacactgtatgggctgcgaggaccccacaaggccgacagcatccagggaaccgcccgcaccctcagcccagttctggagagcccccgtgacctccaattcagtgaaatcagggagacctcagccaaggtcaactggatgcccccaccatcccgggcggacagcttcaaagtctcctaccagctggcggacggaggggagcctcagagtgtgcaggtggatggccaggcccggacccagaaactccaggggctgatcccaggcgctcgctatgaggtgaccgtggtctcggtccgaggctttgaggagagtgagcctctcacaggcttcctcaccacggttcctgacggtcccacacagttgcgtgcactgaacttgaccgagggattcgccgtgctgcactggaagcccccccagaatcctgtggacacctatgacgtccaggtcacagcccctggggccccgcctctgcaggcggagaccccaggcagcgcggtggactaccccctgcatgaccttgtcctccacaccaactacaccgccacagtgcgtggcctgcggggccccaacctcacttccccagccagcatcaccttcaccacagggctagaggcccctcgggacttggaggccaaggaagtgaccccccgcaccgccctgctcacttggactgagcccccagtccggcccgcaggctacctgctcagcttccacacccctggtggacagaaccaggagatcctgctcccaggagggatcacatctcaccagctccttggcctctttccctccacctcctacaatgcacggctccaggccatgtggggccagagcctcctgccgcccgtgtccacctctttcaccacgggtgggctgcggatccccttccccagggactgcggggaggagatgcagaacggagccggtgcctccaggaccagcaccatcttcctcaacggcaaccgcgagcggcccctgaacgtgttttgcgacatggagactgatgggggcggctggctggtgttccagcgccgcatggatggacagacagacttctggagggactgggaggactatgcccatggttttgggaacatctctggagagttctggctgggcaatgaggccctgcacagcctgacacaggcaggtgactactccatgcgcgtggacctgcgggctggggacgaggctgtgttcgcccagtacgactccttccacgtagactcggctgcggagtactaccgcctccacttggagggctaccacggcaccgcaggggactccatgagctaccacagcggcagtgtcttctctgcccgtgatcgggaccccaacagcttgctcatctcctgcgctgtctcctaccgaggggcctggtggtacaggaactgccactacgccaacctcaacgggctctacgggagcacagtggaccatcagggagtgagctggtaccactggaagggcttcgagttctcggtgcccttcacggaaatgaagctgagaccaagaaactttcgctccccagcggggggaggctgagctgctgcccacctctctcgcaccccagtatgactgccgagcactgaggggtcgccccgagagaagagccagggtccttcaccacccagccgctggaggaagccttctctgccagcgatctcgcagcactgtgtttacaggggggaggggaggggttcgtacgggagcaataaaggagaaactgaggtacccgg

SEQ ID NO: 190075 - DNA, 320 bp, Homo sapiens
  Payload ID: 17533
  Gene Symbol: TNXB
  Gene Name: tenascin XB
  ENST ID: ENST00000424226
  CDS Start-End: 298-320
cttcaaccgcactgagtccctgaggcttgctgacgagttgagtggctgggtccagcgccaccagagaggccggaggaagatccctcagagggcccaggagagacagaagtctcagccacggaagaagtcacctccagttaaggcagtccccatccaaccccctggacccccagaaagggattctgtgggccagctgcaactatatcgccacccagaccgttcgcagccagcattcttggatgcaattgaccgacgggaagacacattttatgttgtctctttccgaaggcctcctgaatgatgccagcccagtatgctct

SEQ ID NO: 190076 - DNA, 372 bp, Homo sapiens; identical to SEQ ID NO: 190066
  Payload ID: 17533
  Gene Symbol: TNXB
  Gene Name: tenascin XB
  ENST ID: ENST00000427181
  CDS Start-End: 350-372

SEQ ID NO: 190077 - DNA, 2742 bp, Homo sapiens
  Payload ID: 17533
  Gene Symbol: TNXB
  Gene Name: tenascin XB
  ENST ID: ENST00000479795
  CDS Start-End: 142-2670
acagtcggttgtggctcagcccctgttgcaggggacaagtgagggagacttccctgtcctgccctgagacgccgccctcccggggttggggacagagcaggtgcagaggcactgcagctgctcggttgcccagcctcctgaatgatgccagcccagtatgctctaacctccagcctggttctcctggtgctgctgagcacagccagagcaggccccttctcttcacggtccaatgtgacactgccagccccccggccccctccccagccagggggccacacagtgggggctggagtgggaagcccctcttctcagctttacgagcacacagtggaaggaggggagaagcaggtggtattcacccaccgcattaacctgcccccttccactggctgtggctgtcccccaggcaccgagcccccagtccttgcttcagaggtacaggccctgagggtccgtctagagatcctggaggagttggtgaaggggctcaaggaacagtgcactgggggatgttgtcctgcctctgcccaagctggcacaggtcagacagatgtgcggaccctctgcagtctccatggtgtgtttgatctgagccgctgcacctgttcctgtgagccaggctggggtgggcccacctgctcagaccccacagatgctgagatccctccctcttccccaccctcagcctcggggtcctgcccagatgactgcaatgatcagggtcgctgtgtccgtggtcgttgcgtgtgctttcccggctacactggccccagctgtggctggccatcctgtcccggggactgccaaggccgtgggcgctgcgtgcagggcgtgtgtgtgtgccgggcaggcttctcaggccccgactgcagccagcgctcctgccctcgaggttgcagccagaggggacgctgtgagggtgggcgctgcgtgtgtgacccaggctacactggtgacgactgtggcatgaggagctgccctcgcggttgcagtcagagggggcgctgtgagaatgggcgctgcgtgtgtaaccccggctacactggcgaggactgtggggtgaggagctgccctcggggctgcagccagcggggacgctgcaaggacgggcgctgcgtgtgtgaccccggctacactggcgaggactgtggtacgcggagctgcccctgggactgtggcgagggcgggcgctgcgtggacggccgctgcgtgtgctggcccgggtacacaggcgaggactgcagcacgcggacatgtccgagggactgccggggccgcgggcgctgcgaggacggcgaatgcatttgcgacacgggctacagcggggacgactgcggcgtgcgcagctgccctggcgactgcaaccaaaggggccgctgcgaggacggccgctgcgtgtgctggccggggtacactggaaccgattgcggctcgcgcgcctgcccacgcgactgtagaggtcgcgggcgctgcgagaacggcgtgtgtgtttgcaatgcgggctacagcggcgaggactgcggtgtgcgcagctgtcctggggactgtcgtggccggggccgctgtgagagtggccgctgcatgtgttggccggggtacacaggccgggactgcggcacgcgcgcctgtcctggcgactgtcgcgggcgcgggcgctgcgtggatggccgctgcgtgtgcaacccgggcttcaccggtgaggactgtgggagccgtcgctgtcccggggactgccgtgggcacggcctttgcgaggatggcgtgtgcgtgtgtgacgcaggctactcaggggaagactgcagcacgcgcagctgccccgggggctgccgaggccgcggccagtgcctagatgggcggtgtgtgtgcgaggacggctactctggcgaggattgcggtgtgaggcagtgcccgaatgactgcagccagcacggcgtgtgccaggacggtgtgtgcatctgttgggaaggctacgtgagtgaggactgcagcatccgcacctgcccctccaactgccacgggaggggccgctgtgaggaagggcgctgcctgtgcgacccaggctacaccggccctacctgtgccacccgcatgtgcccggctgactgccggggacgtgggcggtgtgtgcaaggagtgtgcctgtgccacgtgggctatggcggtgaggactgcgggcaggaagagcctccagccagcgcctgccctggaggctgcgggccccgggaactgtgccgggcaggccagtgtgtgtgtgtagagggcttccgaggccctgactgtgccatccagacatgcccaggggactgccgtggccgaggagagtgtcacgatggcagctgtgtctgcaaagatgggtatgctggcgaagactgcggagaagaggtgccaaccattgagggcatgaggatgcatctcttggaggagacaacagttcggacagagtggaccccggctcctggccccgtggatgcctatgaaattcagttcatccccacggccagccccctactatgttctgcctctcctcactctccagccaaagcagaagcagaaatctcaacttcgtggcgcaaccaagatagcttgaattttttcttctgtttaaacatctttttttgttgttgttataaaaatactttaatcacgagacaagaatttggcaactagagaaaagaaaaacaattcctggctgctcctcactaaaacaagcactgctaacattttaaagtgtttctccca

SEQ ID NO: 190078 - DNA, 2463 bp, Homo sapiens
  Payload ID: 17533
  Gene Symbol: TNXB
  Gene Name: tenascin XB
  Uniprot ID: P22105
  ENST ID: ENST00000546684
  CDS Start-End: 856-2463
ggtctgtcaggcaggaaacgactgggccccatctctgctgacagcaccacagctcccctggagaaggagctacctccccacctgggggaactgaccgtggctgaggagacctccagctctctgcgcctgtcctggacggtagcccagggcccctttgactccttcgtggtccagtacagggacacggacgggcagcccagggcagtgcctgtggccgcagaccagcgcacagtcaccgtagaggacctggagcctggcaagaaatacaagtttctgctctacgggctccttgggggaaagcgcctgggcccggtctctgccctgggaatgacagccccagaagaggacacaccagccccagagttagccccagaggcccctgagcctcctgaagagccccgcctaggagtgctgaccgtgaccgacacaaccccagactccatgcgcctctcgtggagcgtggcccagggcccctttgattccttcgtggtccagtatgaggacacgaacgggcagccccaggccttgctcgtggacggcgaccagagcaagatcctcatctcaggcctggagcccagcaccccctacaggttcctcctctatggcctccatgaagggaagcgcctggggcccctctcagctgagggcaccacagggctggctcctgctggtcagacctcagaggagtcaaggccccgcctgtcccagctgtctgtgactgacgtgaccaccagttcactgaggctcaactgggaggccccaccgggggccttcgactccttcctgctccgctttggggttccatcaccaagcacactggagccgcatccgcgtccactgctgcagcgcgagctgatggtgccggggacgcggcactcggccgtgctccgggacctgcgttccgggactctgtacagcctgacactgtatgggctgcgaggaccccacaaggccgacagcatccagggaaccgcccgcaccctcagcccagttctggagagcccccgtgacctccaattcagtgaaatcagggagacctcagccaaggtcaactggatgcccccaccatcccgggcggacagcttcaaagtctcctaccagctggcggacggaggggagcctcagagtgtgcaggtggatggccaggcccggacccagaaactccaggggctgatcccaggcgctcgctatgaggtgaccgtggtctcggtccgaggctttgaggagagtgagcctctcacaggcttcctcaccacggttcctgacggtcccacacagttgcgtgcactgaacttgaccgagggattcgccgtgctgcactggaagcccccccagaatcctgtagacacctatgacatccaggtcacagcccctggggccccgcctctgcaggcggagaccccaggcagcgcggtggactaccccctgcatgaccttgtcctccacaccaactacaccgccacagtgcgtggcctgcggggccccaacctcacttccccagccagcatcaccttcaccacagggctagaggcccctcgggacttggaggccaaggaagtgaccccccgcaccgccctgctcacttggactgagcccccagtccggcccgcaggctacctgctcagcttccacacccctggtggacagacccaggagatcctgctcccaggagggatcacatctcaccagctccttggcctctttccctccacctcctacaatgcacggctccaggccatgtggggccagagcctcctgccgcccgtgtccacctctttcaccacgggtgggctgcggatccccttccccagggactgcggggaggagatgcagaacggagccggtgcctccaggaccagcaccatcttcctcaacggcaaccgcgagcggcccctgatcgtgttttgcgacatggagactgatgggggcggctggctggtgttccagcgccgcatggatggacagacagacttctggagggactgggaggactatgcccatggttttgggaacatctctggagagttctggctgggcaatgaggccctgcacagcctgacacaggcaggtgactactccatgcgcgtggacctgcgggctggggacgaggctgtgttcgcccagtacgactccttccacgtagactcggctgcggagtactaccgcctccacttggagggctaccacggcaccgcaggggactccatgagctaccacagcggcagtgtcttctctgcccgtgatcgggaccccaacagcttgctcatctcctgcgctgtctcctaccgaggggcctggtggtacaggaactgccactacgccaacctcaacgggctctacgggagcacagtggaccatcagggagtgagctggtaccactggaagggcttcgagttctcggtgcccttcacggaaatgaagctgagaccaagaaactttcgctccccagcggggggaggctga

SEQ ID NO: 190079 - DNA, 13125 bp, Homo sapiens
  Payload ID: 17533
  Gene Symbol: TNXB
  Gene Name: tenascin XB
  ENST ID: ENST00000550212
  CDS Start-End: 203-12931
tcctccccttctcctcccctgctcgctgcagactccctcctcactgtcgctgccgagatccacagtcggttgtggctcagcccctgttgcaggggacaagtgagggagacttccctgtcctgccctgagacgccgccctcccggggttggggacagagcaggtgcagaggcactgcagctgctcggttgcccagcctcctgaatgatgccagcccagtatgctctaacctccagcctggttctcctggtgctgctgagcacagccagagcaggccccttctcttcacggtccaatgtgacactgccagccccccggccccctccccagccagggggccacacagtgggggctggagtgggaagcccctcttctcagctttacgagcacacagtggaaggaggggagaagcaggtggtattcacccaccgcattaacctgcccccttccactggctgtggctgtcccccaggcaccgagcccccagtccttgcttcagaggtacaggccctgagggtccgtctagagatcctggaggagttggtgaaggggctcaaggaacagtgcactgggggatgttgtcctgcctctgcccaagctggcacaggtcagacagatgtgcggaccctctgcagtctccatggtgtgtttgatctgagccgctgcacctgttcctgtgagccaggctggggtgggcccacctgctcagaccccacagatgctgagatccctccctcttccccaccctcagcctcggggtcctgcccagatgactgcaatgatcagggtcgctgtgtccgtggtcgttgcgtgtgctttcccggctacactggccccagctgtggctggccatcctgtcccggggactgccaaggccgtgggcgctgcgtgcagggcgtgtgtgtgtgccgggcaggcttctcaggccccgactgcagccagcgctcctgccctcgaggttgcagccagaggggacgctgtgagggtgggcgctgcgtgtgtgacccaggctacactggtgacgactgtggcatgaggagctgccctcgcggttgcagtcagagggggcgctgtgagaatgggcgctgcgtgtgtaaccccggctacactggcgaggactgtggggtgaggagctgccctcggggctgcagccagcggggacgctgcaaggacgggcgctgcgtgtgtgaccccggctacactggcgaggactgtggtacgcggagctgcccctgggactgtggcgagggcgggcgctgcgtggacggccgctgcgtgtgctggcccgggtacacaggcgaggactgcagcacgcggacatgtccgagggactgccggggccgcgggcgctgcgaggacggcgaatgcatttgcgacacgggctacagcggggacgactgcggcgtgcgcagctgccctggcgactgcaaccaaaggggccgctgcgaggacggccgctgcgtgtgctggccggggtacactggaaccgattgcggctcgcgcgcctgcccacgcgactgtagaggtcgcgggcgctgcgagaacggcgtgtgtgtttgcaatgcgggctacagcggcgaggactgcggtgtgcgcagctgtcctggggactgtcgtggccggggccgctgtgagagtggccgctgcatgtgttggccggggtacacaggccgggactgcggcacgcgcgcctgtcctggcgactgtcgcgggcgcgggcgctgcgtggatggccgctgcgtgtgcaacccgggcttcaccggtgaggactgtgggagccgtcgctgtcccggggactgccgtgggcacggcctttgcgaggatggcgtgtgcgtgtgtgacgcaggctactcaggggaagactgcagcacgcgcagctgccccgggggctgccgaggccgcggccagtgcctagatgggcggtgtgtgtgcgaggacggctactctggcgaggattgcggtgtgaggcagtgcccgaatgactgcagccagcacggcgtgtgccaggacggtgtgtgcatctgttgggaaggctacgtgagtgaggactgcagcatccgcacctgcccctccaactgccacgggaggggccgctgtgaggaagggcgctgcctgtgcgacccaggctacaccggccctacctgtgccacccgcatgtgcccggctgactgccggggacgtgggcggtgtgtgcaaggagtgtgcctgtgccacgtgggctatggcggtgaggactgcgggcaggaagagcctccagccagcgcctgccctggaggctgcgggccccgggaactgtgccgggcaggccagtgtgtgtgtgtagagggcttccgaggccctgactgtgccatccagacatgcccaggggactgccgtggccgaggagagtgtcacgatggcagctgtgtctgcaaagatgggtatgctggcgaagactgcggagaagaggtgccaaccattgagggcatgaggatgcatctcttggaggagacaacagttcggacagagtggaccccggctcctggccccgtggatgcctatgaaattcagttcatccccacgacagagggggcgagccccccattcacagcacgggttccaagctctgcctcagcctatgaccagagaggactggcccctggacaggagtaccaggtcactgtccgagcccttcgagggaccagctggggccttcctgcctccaagaccatcaccaccatgatcgatgggccccaggacctccgagtggtggctgtgacaccgacaacactggagcttggctggctgcgtccccaggctgaggtggaccgatttgtggtgtcctacgtcagtgccggcaaccagagggtgaggctggaagtgccccctgaagcagacgggacgctgctgactgacctgatgccaggcgtagaatatgtggtgactgtcacagcggagcggggccgggcagtcagctacccagcttctgtcagggccaacacagggtcctcacccttgggcctcttggggactaccgatgagcctcctccctcaggcccctcgacgacgcaaggggcccaggctcctctcctgcagcagcgcccccaggagctgggagagttgagggtgctgggcagagatgagacagggcgcctccgtgtggtctggaccgcccagcctgacacctttgcctacttccaactgcgcatgcgggtgcccgaggggccgggggcacatgaggaagtgctgccaggggacgtccgccaggctctggtgcctccaccccctcctggaaccccgtatgagctgtcacttcatggggtccctcctgggggcaagccctctgaccccatcatctaccaaggcattatggacaaggatgaggagaagcctgggaagtcctcaggcccaccacgcctgggtgagctgacggtgacagacaggacctccgactccttgctcctgcgctggacggtccccgagggcgagtttgactccttcgtgatccagtacaaagacagggacgggcagccccaggtggtgcccgtggaaggaccccagcgctcggccgtcatcacctccctggatcctggccgcaagtacaaatttgtcctgtatgggtttgttggcaagaagaggcatggtccgctggtggctgaagccaagatcttgcctcagagtgacccaagtccagggactccaccccgcctgggaaacctgtgggtgacagaccctaccccagattcactgcacctctcctggactgtccctgagggccagtttgacaccttcatggtccagtacagggacagggatggacggccccaggtggtacctgtggaagggcccgagcgttcatttgttgtctcctcactggaccctgaccacaagtacagattcactctgtttggaattgcgaacaagaagcggtatggccccctcacggccgatggcaccactgctccagagaggaaagaggagcccccccaccctgagttcctggagcagcccctcctgggggaactgacagtgaccggcgtgaccccagactccttgcgtctctcatggacagtggcccagggccccttcgactcattcatggtccagtacaaggatgcacaggggcagccccaggcagtgcctgttgcgggggatgagaatgaggttactgtccccggcctggatcccgaccggaagtataagatgaacctctacgggcttcgtggcaggcagcgtgtggggcccgagtctgtggtggccaagactgctcctcaggaggatgtggacgagacccccagccccacagaactgggcacggaggccccggagtcccccgaggagccgctcctgggggagctgacagtgacaggatcctcccctgattcgctgagcctcttctggaccgtcccccagggcagcttcgactctttcaccgtgcagtacaaggacagggatgggcggccccgggcggtgcgtgttgggggcaaggagagtgaggtcaccgtgggaggcctagagcccgggcacaagtacaagatgcacctgtacggcctccacgaggggcagcgcgtgggcccggtgtccgccgtgggcgtgacagccccacaacaagaagagacccctccagccactgagtccccgctggagccacgcctaggagagctgacagtgacagatgtgacccccaactctgtgggcctctcctggacagtccccgagggccagtttgactccttcatagtccagtacaaggacaaggacgggcagccccaggtggtgccggtggcggcagaccagcgagaggtcacagtctacaacctggagcctgagagaaaatataagatgaacatgtatggactacatgatgggcaacgcatgggccccctgtctgtggtcatcgtgacggctcccctcccaccagccccagccacagaggcctccaagcctcccctggagccacgcctaggggagctgacagtgacggatataacccctgactctgtgggcctctcatggacagtccctgagggtgaattcgactcctttgtggttcagtacaaggacagggacgggcagccccaggtggtgcccgtggctgcagatcagcgggaggtcactatccctgacctggaaccctcccgcaagtacaagttcctgctctttgggatccaggatgggaaacgacgcagcccagtctctgtggaggcaaagacggttgcccgaggtgacgccagcccaggggccccaccccgccttggggagctgtgggtgacagaccccaccccagactcactgcgcctctcctggacggttcctgagggccagttcgactcttttgtggtccagttcaaggacaaagacgggccccaggtggtgcccgtggagggccatgagcgctctgtcactgtcacccctctggatgccggccgcaagtacagattcctcctctatggcctcctgggcaagaagcgccatggccctctcactgccgacggcaccacggaagcccggagtgctatggatgatactggaacaaagcgtcccccaaaaccccgtctgggggaggagctgcaggtgaccaccgtgacccagaactccgtgggcctctcctggacagtccctgagggccagtttgactcctttgtggtccagtacaaagacagggacgggcagccccaggtggtgcccgtggagggcagcctcagggaggtcagcgtgccgggcctggaccctgcccacaggtacaagctgctgctctacgggctgcaccacggcaagcgtgtgggccccatctcggccgtcgccattactgccggcagggaagaaacggaaactgagaccacggccccgacccctccagcgcctgagccccacctcggggagttgacagtggaggaggccacgtcacacaccctgcatctctcctggatggtgactgagggagaatttgactccttcgaaatccagtacacagatagagacgggcaactccaaatggtccgcataggaggtgaccggaatgacatcaccctctctggcctggaatccgaccacagatacctggtgaccctgtatggtttcagtgatgggaagcatgtaggtcctgtccatgtcgaggccctgacagtcccggaggaggagaagccttcagaacctcccaccgcaacccccgagccccccatcaagcctcgcctgggggagctgaccgtgacagatgccacccctgactccctcagcctgtcctggacagttcccgagggacagtttgaccacttcctggtccagtacaggaatggagatgggcagcccaaggcagtgagggtgccagggcacgaggaaggggtcaccatctcgggcctggagccagaccataaatacaagatgaacctgtacggcttccacggtggccagcgcatgggccctgtgtctgtcgtcggggtgacagctgcagaggaagagacccccagccccacagaacccagcatggaggccccggagcccgctgaggagccgctcctgggggagctaacagtgacaggatcctcccctgactcgctgagcctctcctggaccgtcccccagggccgcttcgactccttcaccgtgcagtacaaggacagggacgggcggccccaggtggtgcgtgttgggggcgaggagagtgaagtcaccgtggggggcctggagcctgggcgcaagtacaagatgcacctgtacggcctccacgaggggcggcgcgtgggcccagtgtctgctgtgggcgtcacggcccccgaagaggagtcccctgatgctcctcttgcaaagctgcgcctagggcagatgacagtgagagacatcacctccgactccctcagcctctcctggacagtccccgagggccagtttgaccatttcttggtccagtttaagaatggggatgggcagcccaaggcggtgcgggtgccgggacacgaggatggggtcaccatctcgggcctggagccagaccacaagtacaagatgaacctgtacggcttccacggtggccagcgcgtgggccccgtgtctgctgttggtttaactgccccaggaaaggatgaagaaatggccccagcctcgacagaacctcccacccctgaaccccccatcaagcctcgcctggaggagctgaccgtgacagatgcgacccctgactccctcagcctgtcctggacggttcccgagggacagtttgaccacttcctggtccagtacaagaatggggatgggcagcccaaggcaacacgggtgccaggacatgaggacagggtcaccatctccggcctggagccagacaacaagtacaagatgaacctgtacggcttccacggtggccagcgtgtgggccccgtgtctgccatcggggtgacagctgcagaggaagagacccccagccccacagaacccagcatggaggccccggagccccctgaggagccgctcctgggggagctgacagtgacaggatcctcccctgactcgctgagcctctcctggaccgtcccccagggccgcttcgactccttcaccgtgcagtacaaggacagggacgggcggccccaggtggtgcgtgttgggggcgaggagagcgaggtcaccgtggggggcctggagcctgggcgcaaatacaagatgcacctgtacggcctccacgaggggcggcgcgtgggcccggtgtccaccgtgggcgtgactgccccacaagaggatgtggacgagacccccagccctacagaaccaggcacagaggccccagagccccccgaggagcctctcctgggggagctgacagtgacaggatcctcccctgactcgctgagcctttcctggaccgtcccccagggccgctttgactccttcaccgtgcagtacaaggacagggatgggcggccccaggcggtgcgtgttgggggccaggagagcaaggtcactgtgaggggcctggagcctgggcgcaagtacaagatgcacctgtacggcctccacgaggggcggcgcctgggcccggtgtctgccgtgggcgtcacagaggatgaagccgagaccacccaagcagtgcctaccatgacccctgagccccccatcaagcctcgcctgggggagctgaccatgacagatgccacccctgactccctcagcctgtcctggacggttcccgagggccagtttgaccacttcctggtccagtacaggaatggggatgggcagcccaaggcggtgcgggtgccggggcacgaggacggggtcaccatctcaggcctggagccagaccataaatacaagatgaacctgtacggcttccacggtggccagcgcgtgggccccatctctgtcattggggtgacggctgcagaggaagagacccccagccccacggaactcagcactgaggccccggagccccctgaggagccgctcctgggggagctgacagtgacaggatcctcccctgactcgctgagcctctcctggaccatcccccagggccacttcgactccttcaccgtgcagtacaaggacagggacgggcggccccaggtgatgcgtgtcaggggcgaggagagcgaggtcaccgtggggggcctggagcccgggcgcaaatacaagatgcacctgtacggcctccacgaggggcggcgtgtgggcccggtgtccaccgtgggtgtgacagaggatgaagcagagaccacccaagcagtgcccaccacaacccctgagccccccaacaagcctcgcctcggggagctgaccgtgacagatgccacccctgactccctcagcctgtcctggatggtccccgagggccagtttgaccacttcctggtccagtacaggaatggggatgggcagcccaaggtggtgcgggtgccggggcacgaggacggggtcaccatctcaggcctggagccagaccacaagtacaagatgaacctgtacggcttccacggtggccagcgcgtgggccccatctctgtcattggggtgacagctgcagaggaagaaactcccgcccccacagaacccagcacggaggccccggagccccctgaggagccgctcctgggggagctgacagtgacaggatcctcccctgactcgctgagcctctcctggaccatcccccagggccgcttcgactccttcactgtgcagtacaaggacagggacgggcggccccaggtggtgcgtgtcaggggcgaggagagcgaggtcaccgtggggggcctggagcccgggtgcaaatacaagatgcacctgtacggcctccacgaggggcagcgcgtgggcccagtgtccgctgtgggtgtgacagctccaaaggatgaagccgagaccacccaagcagtgcctaccatgacccctgagccccccatcaagcctcgcctgggggagctgaccgtgacagatgccacccccgactccctcagcctgtcctggatggttcccgagggccagtttgaccacttcctggtccagtacaggaatggggatgggcagcccaaggcggtgcgggtgccggggcacgaggacggggtcaccatctcaggcctggagccagaccataaatacaagatgaacctgtacggcttccacggtggccagcgcgtaggccctgtgtctgccattggggtgacggaggaagagacccccagccccacagaacccagcactgaggccccggaggcccctgaggagccgctcctgggggagttgacagtgacaggatcctcccctgactcgctgagcctctcctggaccatcccccagggccgcttcgactccttcaccgtgcagtacaaggacagggacgggcagccccaggtggtgcgtgtcaggggcgaggagagcgaggtcaccgtggggggcctggagcccgggcgcaaatacaagatgcatctgtacggcctccacgaggggcagcgcgtgggcccagtgtccaccgtgggcatcacggcgcccctgcccacaccactgccggtggagccccgcctgggggagctggcggtggcggccgtgacctcggactcagtgggcctctcatggacggtggcccagggcccctttgactccttcctggtacagtacagggacgcgcaggggcagccccaggcagtgcctgtgagcggagacctccgagcggtcgccgtctcggggctggacccggcccgcaagtacaagttcctgctctttggactccagaatgggaaacgccacggcccagtccctgtggaggccaggaccgccccagacaccaaaccgtctccccgcctgggggagctgactgtgacagatgcgacccctgactccgtgggcctctcgtggacggtccctgagggcgaattcgactccttcgtggtccagtacaaggataaggatggtcggctccaggtggtgccggtggcagccaaccagcgggaggtcacagtccagggcctggagcccagtaggaaatacaggttcctgctctatggtctgtcaggcaggaaacgactgggccccatctctgctgacagcaccacagctcccctggagaaggagctacctccccacctgggggaactgaccgtggctgaggagacctccagctctctgcgcctgtcctggacggtagcccagggcccctttgactccttcgtggtccagtacagggacacggacgggcagcccagggcagtgcctgtggccgcagaccagcgcacagtcaccgtagaggacctggagcctggcaagaaatacaagtttctgctctacgggctccttgggggaaagcgcctgggcccggtctctgccctgggaatgacagccccagaagaggacacaccagccccagagttagccccagaggcccctgagcctcctgaagagccccgcctaggagtgctgaccgtgaccgacacaaccccagactccatgcgcctctcgtggagcgtggcccagggcccctttgattccttcgtggtccagtatgaggacacgaacgggcagccccaggccttgctcgtggacggcgaccagagcaagatcctcatctcaggcctggagcccagcaccccctacaggttcctcctctatggcctccatgaagggaagcgcctggggcccctctcagctgagggcaccacagggctggctcctgctggtcagacctcagaggagtcaaggccccgcctgtcccagctgtctgtgactgacgtgaccaccagttcactgaggctcaactgggaggccccaccgggggccttcgactccttcctgctccgctttggggttccatcaccaagcactctggagccgcatccgcgtccactgctgcagcgcgagctgatggtgccggggacgcggcactcggccgtgctccgggacctgcgttccgggactctgtacagcctgacactgtatgggctgcgaggaccccacaaggccgacagcatccagggaaccgcccgcaccctcagcccagttctggagagcccccgtgacctccaattcagtgaaatcagggagacctcagccaaggtcaactggatgcccccaccatcccgggcggacagcttcaaagtctcctaccagctggcggacggaggggagcctcagagtgtgcaggtggatggccaggcccggacccagaaactccaggggctgatcccaggcgctcgctatgaggtgaccgtggtctcggtccgaggctttgaggagagtgagcctctcacaggcttcctcaccacggttcctgacggtcccacacagttgcgtgcactgaacttgaccgagggattcgccgtgctgcactggaagcccccccagaatcctgtagacacctatgacatccaggtcacagcccctggggccccgcctctgcaggcggagaccccaggcagcgcggtggactaccccctgcatgaccttgtcctccacaccaactacaccgccacagtgcgtggcctgcggggccccaacctcacttccccagccagcatcaccttcaccacagggctagaggcccctcgggacttggaggccaaggaagtgaccccccgcaccgccctgctcacttggactgagcccccagtccggcccgcaggctacctgctcagcttccacacccctggtggacagacccaggagatcctgctcccaggagggatcacatctcaccagctccttggcctctttccctccacctcctacaatgcacggctccaggccacgtggggccagagcctcctgccgcccgtgtccacctctttcaccacgggtgggctgcggatccccttccccagggactgcggggaggagatgcagaacggagccggtgcctccaggaccagcaccatcttcctcaacggcaaccgcgagcggcccctgaacgtgttttgcgacatggagactgatgggggcggctggctggtgttccagcgccgcatggatggacagacagacttctggagggactgggaggactatgcccatggttttgggaacatctctggagagttctggctgggcaatgaggccctgcacagcctgacacaggcaggtgactactccatgcgcgtggacctgcgggctggggacgaggctgtgttcgcccagtacgactccttccacgtagactcggctgcggagtactaccgcctccacttggagggctaccacggcaccgcaggggactccatgagctaccacagcggcagtgtcttctctgcccgtgatcgggaccccaacagcttgctcatctcctgcgctgtctcctaccgaggggcctggtggtacaggaactgccactacgccaacctcaacgggctctacgggagcacagtggaccatcagggagtgagctggtaccactggaagggcttcgagttctcggtgcccttcacggaaatgaagctgagaccaagaaactttcgctccccagcggggggaggctgagctgctgcccacctctctcgcaccccagtatgactgccgagcactgaggggtcgccccgagagaagagccagggtccttcaccacccagccgctggaggaagccttctctgccagcgatctcgcagcactgtgtttacaggggggaggggaggggttcgtacgggagcaataaaggagaaactgaggtacccgg

SEQ ID NO: 190080 - DNA, 13125 bp, Homo sapiens
  Payload ID: 17533
  Gene Symbol: TNXB
  Gene Name: tenascin XB
  ENST ID: ENST00000548649
  CDS Start-End: 203-12931
tcctccccttctcctcccctgctcgctgcagactccctcctcactgtcgctgccgagatccacagtcggttgtggctcagcccctgttgcaggggacaagtgagggagacttccctgtcctgccctgagacgccgccctcccggggttggggacagagcaggtgcagaggcactgcagctgctcggttgcccagcctcctgaatgatgccagcccagtatgctctaacctccagcctggttctcctggtgctgctgagcacagccagagcaggccccttctcttcacggtccaatgtgacactgccagccccccggccccctccccagccagggggccacacagtgggggctggagtgggaagcccctcttctcagctttacgagcacacagtggaaggaggggagaagcaggtggtattcacccaccgcattaacctgcccccttccactggctgtggctgtcccccaggcaccgagcccccagtccttgcttcagaggtacaggccctgagggtccgtctagagatcctggaggagttggtgaaggggctcaaggaacagtgcactgggggatgttgtcctgcctctgcccaagctggcacaggtcagacagatgtgcggaccctctgcagtctccatggtgtgtttgatctgagccgctgcacctgttcctgtgagccaggctggggtgggcccacctgctcagaccccacagatgctgagatccctccctcttccccaccctcagcctcggggtcctgcccagatgactgcaatgatcagggtcgctgtgtccgtggtcgttgcgtgtgctttcccggctacactggccccagctgtggctggccatcctgtcccggggactgccaaggccgtgggcgctgcgtgcagggcgtgtgtgtgtgccgggcaggcttctcaggccccgactgcagccagcgctcctgccctcgaggttgcagccagaggggacgctgtgagggtgggcgctgcgtgtgtgacccaggctacactggtgacgactgtggcatgaggagctgccctcgcggttgcagtcagagggggcgctgtgagaatgggcgctgcgtgtgtaaccccggctacactggcgaggactgtggggtgaggagctgccctcggggctgcagccagcggggacgctgcaaggacgggcgctgcgtgtgtgaccccggctacactggcgaggactgtggtacgcggagctgcccctgggactgtggcgagggcgggcgctgcgtggacggccgctgcgtgtgctggcccgggtacacaggcgaggactgcagcacgcggacatgtccgagggactgccggggccgcgggcgctgcgaggacggcgaatgcatttgcgacacgggctacagcggggacgactgcggcgtgcgcagctgccctggcgactgcaaccaaaggggccgctgcgaggacggccgctgcgtgtgctggccggggtacactggaaccgattgcggctcgcgcgcctgcccacgcgactgtagaggtcgcgggcgctgcgagaacggcgtgtgtgtttgcaatgcgggctacagcggcgaggactgcggtgtgcgcagctgtcctggggactgtcgtggccggggccgctgtgagagtggccgctgcatgtgttggccggggtacacaggccgggactgcggcacgcgcgcctgtcctggcgactgtcgcgggcgcgggcgctgcgtggatggccgctgcgtgtgcaacccgggcttcaccggtgaggactgtgggagccgtcgctgtcccggggactgccgtgggcacggcctttgcgaggatggcgtgtgcgtgtgtgacgcaggctactcaggggaagactgcagcacgcgcagctgccccgggggctgccgaggccgcggccagtgcctagatgggcggtgtgtgtgcgaggacggctactctggcgaggattgcggtgtgaggcagtgcccgaatgactgcagccagcacggcgtgtgccaggacggtgtgtgcatctgttgggaaggctacgtgagtgaggactgcagcatccgcacctgcccctccaactgccacgggaggggccgctgtgaggaagggcgctgcctgtgcgacccaggctacaccggccctacctgtgccacccgcatgtgcccggctgactgccggggacgtgggcggtgtgtgcaaggagtgtgcctgtgccacgtgggctatggcggtgaggactgcgggcaggaagagcctccagccagcgcctgccctggaggctgcgggccccgggaactgtgccgggcaggccagtgtgtgtgtgtagagggcttccgaggccctgactgtgccatccagacatgcccaggggactgccgtggccgaggagagtgtcacgatggcagctgtgtctgcaaagatgggtatgctggcgaagactgcggagaagaggtgccaaccattgagggcatgaggatgcatctcttggaggagacaacagttcggacagagtggaccccggctcctggccccgtggatgcctatgaaattcagttcatccccacgacagagggggcgagccccccattcacagcacgggttccaagctctgcctcagcctatgaccagagaggactggcccctggacaggagtaccaggtcactgtccgagcccttcgagggaccagctggggccttcctgcctccaagaccatcaccaccatgatcgatgggccccaggacctccgagtggtggctgtgacaccgacaacactggagcttggctggctgcgtccccaggctgaggtggaccgatttgtggtgtcctacgtcagtgccggcaaccagagggtgaggctggaagtgccccctgaagcagacgggacgctgctgactgacctgatgccaggcgtagaatatgtggtgactgtcacagcggagcggggccgggcagtcagctacccagcttctgtcagggccaacacagggtcctcacccttgggcctcttggggactaccgatgagcctcctccctcaggcccctcgacgacgcaaggggcccaggctcctctcctgcagcagcgcccccaggagctgggagagttgagggtgctgggcagagatgagacagggcgcctccgtgtggtctggaccgcccagcctgacacctttgcctacttccaactgcgcatgcgggtgcccgaggggccgggggcacatgaggaagtgctgccaggggacgtccgccaggctctggtgcctccaccccctcctggaaccccgtatgagctgtcacttcatggggtccctcctgggggcaagccctctgaccccatcatctaccaaggcattatggacaaggatgaggagaagcctgggaagtcctcaggcccaccacgcctgggtgagctgacggtgacagacaggacctccgactccttgctcctgcgctggacggtccccgagggcgagtttgactccttcgtgatccagtacaaagacagggacgggcagccccaggtggtgcccgtggaaggaccccagcgctcggccgtcatcacctccctggatcctggccgcaagtacaaatttgtcctgtatgggtttgttggcaagaagaggcatggtccgctggtggctgaagccaagatcttgcctcagagtgacccaagtccagggactccaccccgcctgggaaacctgtgggtgacagaccctaccccagattcactgcacctctcctggactgtccctgagggccagtttgacaccttcatggtccagtacagggacagggatggacggccccaggtggtacctgtggaagggcccgagcgttcatttgttgtctcctcactggaccctgaccacaagtacagattcactctgtttggaattgcgaacaagaagcggtatggccccctcacggccgatggcaccactgctccagagaggaaagaggagcccccccgccctgagttcctggagcagcccctcctgggggaactgacagtgaccggcgtgaccccagactccttgcgtctctcatggacagtggcccagggccccttcgactcattcatggtccagtacaaggatgcacaggggcagccccaggcagtgcctgttgcgggggatgagaatgaggttactgtccccggcctggatcccgaccggaagtataagatgaacctctacgggcttcgtggcaggcagcgtgtggggcccgagtctgtggtggccaagactgctcctcaggaggatgtggacgagacccccagccccacagaactgggcacggaggccccggagtcccccgaggagccgctcctgggggagctgacagtgacaggatcctcccctgattcgctgagcctcttctggaccgtcccccagggcagcttcgactctttcaccgtgcagtacaaggacagggatgggcggccccgggcggtgcgtgttgggggcaaggagagtgaggtcaccgtgggaggcctagagcccgggcacaagtacaagatgcacctgtacggcctccacgaggggcagcgcgtgggcccggtgtccgccgtgggcgtgacagccccacaacaagaagagacccctccagccactgagtccccgctggagccacgcctaggagagctgacagtgacagatgtgacccccaactctgtgggcctctcctggacagtccccgagggccagtttgactccttcatagtccagtacaaggacaaggacgggcagccccaggtggtgccggtggcggcagaccagcgagaggtcacagtctacaacctggagcctgagagaaaatataagatgaacatgtatggactacatgatgggcaacgcatgggccccctgtctgtggtcatcgtgacggctcccctcccaccagccccagccacagaggcctccaagcctcccctggagccacgcctaggggagctgacagtgacggatataacccctgactctgtgggcctctcatggacagtccctgagggtgaattcgactcctttgtggttcagtacaaggacagggacgggcagccccaggtggtgcccgtggctgcagatcagcgggaggtcactatccctgacctggaaccctcccgcaagtacaagttcctgctctttgggatccaggatgggaaacgacgcagcccagtctctgtggaggcaaagacggttgcccgaggtgacgccagcccaggggccccaccccgccttggggagctgtgggtgacagaccccaccccagactcactgcgcctctcctggacggttcctgagggccagttcgactcttttgtggtccagttcaaggacaaagacgggccccaggtggtgcccgtggagggccatgagcgctctgtcactgtcacccctctggatgccggccgcaagtacagattcctcctctatggcctcctgggcaagaagcgccatggccctctcactgccgacggcaccacggaagcccggagtgctatggatgatactggaacaaagcgtcccccaaaaccccgtctgggggaggagctgcaggtgaccaccgtgacccagaactccgtgggcctctcctggacagtccctgagggccagtttgactcctttgtggtccagtacaaagacagggacgggcagccccaggtggtgcccgtggagggcagcctcagggaggtcagcgtgccgggcctggaccctgcccacaggtacaagctgctgctctacgggctgcaccacggcaagcgtgtgggccccatctcggccgtcgccattactgccggcagggaagaaacggaaactgagaccacggccccgacccctccagcgcctgagccccacctcggggagttgacagtggaggaggccacgtcacacaccctgcatctctcctggatggtgactgagggagaatttgactccttcgaaatccagtacacagatagagacgggcaactccaaatggtccgcataggaggtgaccggaatgacatcaccctctctggcctggaatccgaccacagatacctggtgaccctgtatggtttcagtgatgggaagcatgtaggtcctgtccatgtcgaggccctgacagtcccggaggaggagaagccttcagaacctcccaccgcaacccccgagccccccatcaagcctcgcctgggggagctgaccgtgacagatgccacccctgactccctcagcctgtcctggacagttcccgagggacagtttgaccacttcctggtccagtacaggaatggagatgggcagcccaaggcagtgagggtgccagggcacgaggaaggggtcaccatctcgggcctggagccagaccataaatacaagatgaacctgtacggcttccacggtggccagcgcatgggccctgtgtctgtcgtcggggtgacagctgcagaggaagagacccccagccccacagaacccagcatggaggccccggagcccgctgaggagccgctcctgggggagctaacagtgacaggatcctcccctgactcgctgagcctctcctggaccgtcccccagggccgcttcgactccttcaccgtgcagtacaaggacagggacgggcggccccaggtggtgcgtgttgggggcgaggagagtgaagtcaccgtggggggcctggagcctgggcgcaagtacaagatgcacctgtacggcctccacgaggggcggcgcgtgggcccagtgtctgctgtgggcgtcacggcccccgaagaggagtcccctgatgctcctcttgcaaagctgcgcctagggcagatgacagtgagagacatcacctccgactccctcagcctctcctggacagtccccgagggccagtttgaccatttcttggtccagtttaagaatggggatgggcagcccaaggcggtgcgggtgccgggacacgaggatggggtcaccatctcgggcctggagccagaccacaagtacaagatgaacctgtacggcttccacggtggccagcgcgtgggccccgtgtctgctgttggtttaactgccccaggaaaggatgaagaaatggccccagcctcgacagaacctcccacccctgaaccccccatcaagcctcgcctggaggagctgaccgtgacagatgcgacccctgactccctcagcctgtcctggacggttcccgagggacagtttgaccacttcctggtccagtacaagaatggggatgggcagcccaaggcaacacgggtgccaggacatgaggacagggtcaccatctccggcctggagccagacaacaagtacaagatgaacctgtacggcttccacggtggccagcgtgtgggccccgtgtctgccatcggggtgacagctgcagaggaagagacccccagccccacagaacccagcatggaggccccggagccccctgaggagccgctcctgggggagctgacagtgacaggatcctcccctgactcgctgagcctctcctggaccgtcccccagggccgcttcgactccttcaccgtgcagtacaaggacagggacgggcggccccaggtggtgcgtgttgggggcgaggagagcgaggtcaccgtggggggcctggagcctgggcgcaaatacaagatgcacctgtacggcctccacgaggggcggcgcgtgggcccggtgtccaccgtgggcgtgactgccccacaagaggatgtggacgagacccccagccctacagaaccaggcacagaggccccagagccccccgaggagcctctcctgggggagctgacagtgacaggatcctcccctgactcgctgagcctttcctggaccgtcccccagggccgctttgactccttcaccgtgcagtacaaggacagggacgggcggccccaggcggtgcgtgttgggggccaggagagcaaggtcactgtgaggggcctggagcctgggcgcaagtacaagatgcacctgtacggcctccacgaggggcggcgcctgggcccggtgtctgccgtgggcgtcacagaggatgaagccgagaccacccaagcagtgcctaccatgacccctgagccccccatcaagcctcgcctgggggagctgaccatgacagatgccacccctgactccctcagcctgtcctggacggttcccgagggccagtttgaccacttcctggtccagtacaggaatggggatgggcagcccaaggcggtgcgggtgccggggcacgaggacggggtcaccatctcaggcctggagccagaccataaatacaagatgaacctgtacggcttccacggtggccagcgcgtgggccccatctctgtcattggggtgacggctgcagaggaagagacccccagccccacggaactcagcactgaggccccggagccccctgaggagccgctcctgggggagctgacagtgacaggatcctcccctgactcgctgagcctctcctggaccatcccccagggccacttcgactccttcaccgtgcagtacaaggacagggacgggcggccccaggtgatgcgtgtcaggggcgaggagagcgaggtcaccgtggggggcctggagcccgggcgcaaatacaagatgcacctgtacggcctccacgaggggcggcgtgtgggcccggtgtccaccgtgggtgtgacagaggatgaagcagagaccacccaagcagtgcccaccacaacccctgagccccccaacaagcctcgcctcggggagctgaccgtgacagatgccacccctgactccctcagcctgtcctggatggtccccgagggccagtttgaccacttcctggtccagtacaggaatggggatgggcagcccaaggtggtgcgggtgccggggcacgaggacggggtcaccatctcaggcctggagccagaccacaagtacaagatgaacctgtacggcttccacggtggccagcgcgtgggccccatctctgtcattggggtgacagctgcagaggaagaaactcccgcccccacagaacccagcacggaggccccggagccccctgaggagccgctcctgggggagctgacagtgacaggatcctcccctgactcgctgagcctctcctggaccatcccccagggccgcttcgactccttcactgtgcagtacaaggacagggacgggcggccccaggtggtgcgtgtcaggggcgaggagagcgaggtcaccgtggggggcctggagcccgggtgcaaatacaagatgcacctgtacggcctccacgaggggcagcgcgtgggcccagtgtccgctgtgggtgtgacagctccaaaggatgaagccgagaccacccaagcagtgcctaccatgacccctgagccccccatcaagcctcgcctgggggagctgaccgtgacagatgccacccccgactccctcagcctgtcctggatggttcccgagggccagtttgaccacttcctggtccagtacaggaatggggatgggcagcccaaggcggtgcgggtgccggggcacgaggacggggtcaccatctcaggcctggagccagaccataaatacaagatgaacctgtacggcttccacggtggccagcgcgtaggccctgtgtctgccattggggtgacggaggaagagacccccagccccacagaacccagcactgaggccccggaggcccctgaggagccgctcctgggggagttgacagtgacaggatcctcccctgactcgctgagcctctcctggaccgtcccccagggccgcttcgactccttcaccgtgcagtacaaggacagggacgggcagccccaggtggtgcgtgtcaggggcgaggagagcgaggtcaccgtggggggcctggagcccgggcgcaaatacaagatgcatctgtacggcctccacgaggggcagcgcgtgggcccagtgtccaccgtgggcatcacggcgcccctgcccacaccactgccggtggagccccgcctgggggagctggcggtggcggccgtgacctcggactcagtgggcctctcatggacggtggcccagggcccctttgactccttcctggtacagtacagggacgcgcaggggcagccccaggcagtgcctgtgagcggagacctccgagcggtcgccgtctcggggctggacccggcccgcaagtacaagttcctgctctttggactccagaatgggaaacgccacggcccagtccctgtggaggccaggaccgccccagacaccaaaccgtctccccgcctgggggagctgactgtgacagatgcgacccctgactccgtgggcctctcgtggacggtccctgagggcgaattcgactccttcgtggtccagtacaaggataaggatggtcggctccaggtggtgccggtggcagccaaccagcgggaggtcacagtccagggcctggagcccagtaggaaatacaggttcctgctctatggtctgtcaggcaggaaacgactgggccccatctctgctgacagcaccacagctcccctggagaaggagctacctccccacctgggggaactgaccgtggctgaggagacctccagctctctgcgcctgtcctggacggtagcccagggcccctttgactccttcgtggtccagtacagggacacggacgggcagcccagggcagtgcctgtggccgcagaccagcgcacagtcaccgtagaggacctggagcctggcaagaaatacaagtttctgctctacgggctccttgggggaaagcgcctgggcccggtctctgccctgggaatgacagccccagaagaggacacaccagccccagagttagccccagaggcccctgagcctcctgaagagccccgcctaggagtgctgaccgtgaccgacacaaccccagactccatgcgcctctcgtggagcgtggcccagggcccctttgattccttcgtggtccagtatgaggacacgaacgggcagccccaggccttgctcgtggacggcgaccagagcaagatcctcatctcaggcctggagcccagcaccccctacaggttcctcctctatggcctccatgaagggaagcgcctggggcccctctcagctgagggcaccacagggctggctcctgctggtcagacctcagaggagtcaaggccccgcctgtcccagctgtctgtgactgacgtgaccaccagttcactgaggctcaactgggaggccccaccgggggccttcgactccttcctgctccgctttggggttccatcaccaagcacactggagccgcatccgcgtccactgctgcagcgcgagctgatggtgccggggacgcggcactcggccgtgctccgggacctgcgttccgggactctgtacagcctgacactgtatgggctgcgaggaccccacaaggccgacagcatccagggaaccgcccgcaccctcagcccagttctggagagcccccgtgacctccaattcagtgaaatcagggagacctcagccaaggtcaactggatgcccccaccatcccgggcggacagcttcaaagtctcctaccagctggcggacggaggggagcctcagagtgtgcaggtggatggccaggcccggacccagaaactccaggggctgatcccaggcgctcgctatgaggtgaccgtggtctcggtccgaggctttgaggagagtgagcctctcacaggcttcctcaccacggttcctgacggtcccacacagttgcgtgcactgaacttgaccgagggattcgccgtgctgcactggaagcccccccagaatcctgtagacacctatgacatccaggtcacagcccctggggccccgcctctgcaggcggagaccccaggcagcgcggtggactaccccctgcatgaccttgtcctccacaccaactacaccgccacagtgcgtggcctgcggggccccaacctcacttccccagccagcatcaccttcaccacagggctagaggcccctcgggacttggaggccaaggaagtgaccccccgcaccgccctgctcacttggactgagcccccagtccggcccgcaggctacctgctcagcttccacacccctggtggacagacccaggagatcctgctcccaggagggatcacatctcaccagctccttggcctctttccctccacctcctacaatgcacggctccaggccatgtggggccagagcctcctgccgcccgtgtccacctctttcaccacgggtgggctgcggatccccttccccagggactgcggggaggagatgcagaacggagccggtgcctccaggaccagcaccatcttcctcaacggcaaccgcgagcggcccctgatcgtgttttgcgacatggagactgatgggggcggctggctggtgttccagcgccgcatggatggacagacagacttctggagggactgggaggactatgcccatggttttgggaacatctctggagagttctggctgggcaatgaggccctgcacagcctgacacaggcaggtgactactccatgcgcgtggacctgcgggctggggacgaggctgtgttcgcccagtacgactccttccacgtagactcggctgcggagtactaccgcctccacttggagggctaccacggcaccgcaggggactccatgagctaccacagcggcagtgtcttctctgcccgtgatcgggaccccaacagcttgctcatctcctgcgctgtctcctaccgaggggcctggtggtacaggaactgccactacgccaacctcaacgggctctacgggagcacagtggaccatcagggagtgagctggtaccactggaagggcttcgagttctcggtgcccttcacggaaatgaagctgagaccaagaaactttcgctccccagcggggggaggctgagctgctgcccacctctctcgcaccccagtatgactgccgagcactgaggggtcgccccgagagaagagccagggtccttcaccacccagccgctggaggaagccttctctgccagcgatctcgcagcactgtgtttacaggggggaggggaggggttcgtacgggagcaataaaggagaaactgaggtacccgg

SEQ ID NO: 190081 - DNA, 2852 bp, Homo sapiens
  Payload ID: 17533
  Gene Symbol: TNXB
  Gene Name: tenascin XB
  Uniprot ID: P22105
  ENST ID: ENST00000550539
  CDS Start-End: 1050-2657
agctgactgtgacagatgcgacccctgactccgtgggcctctcgtggacggtccctgagggcgaattcgactccttcgtggtccagtacaaggataaggatggtcggctccaggtggtgccggtggcagccaaccagcgggaggtcacagtccagggcctggagcccagtaggaaatacaggttcctgctctatggtctgtcaggcaggaaacgactgggccccatctctgctgacagcaccacagctcccctggagaaggagctacctccccacctgggggaactgaccgtggctgaggagacctccagctctctgcgcctgtcctggacggtagcccagggcccctttgactccttcgtggtccagtacagggacacggacgggcagcccagggcagtgcctgtggccgcagaccagcgcacagtcaccgtagaggacctggagcctggcaagaaatacaagtttctgctctacgggctccttgggggaaagcgcctgggcccggtctctgccctgggaatgacagccccagaagaggacacaccagccccagagttagccccagaggcccctgagcctcctgaagagccccgcctaggagtgctgaccgtgaccgacacaaccccagactccatgcgcctctcgtggagcgtggcccagggcccctttgattccttcgtggtccagtatgaggacacgaacgggcagccccaggccttgctcgtggacggcgaccagagcaagatcctcatctcaggcctggagcccagcaccccctacaggttcctcctctatggcctccatgaagggaagcgcctggggcccctctcagctgagggcaccacagggctggctcctgctggtcagacctcagaggagtcaaggccccgcctgtcccagctgtctgtgactgacgtgaccaccagttcactgaggctcaactgggaggccccaccgggggccttcgactccttcctgctccgctttggggttccatcaccaagcactctggagccgcatccgcgtccactgctgcagcgcgagctgatggtgccggggacgcggcactcggccgtgctccgggacctgcgttccgggactctgtacagcctgacactgtatgggctgcgaggaccccacaaggccgacagcatccagggaaccgcccgcaccctcagcccagttctggagagcccccgtgacctccaattcagtgaaatcagggagacctcagccaaggtcaactggatgcccccaccatcccgggcggacagcttcaaagtctcctaccagctggcggacggaggggagcctcagagtgtgcaggtggatggccaggcccggacccagaaactccaggggctgatcccaggcgctcgctatgaggtgaccgtggtctcggtccgaggctttgaggagagtgagcctctcacaggcttcctcaccacggttcctgacggtcccacacagttgcgtgcactgaacttgaccgagggattcgccgtgctgcactggaagcccccccagaatcctgtggacacctatgacgtccaggtcacagcccctggggccccgcctctgcaggcggagaccccaggcagcgcggtggactaccccctgcatgaccttgtcctccacaccaactacaccgccacagtgcgtggcctgcggggccccaacctcacttccccagccagcatcaccttcaccacagggctagaggcccctcgggacttggaggccaaggaagtgaccccccgcaccgccctgctcacttggactgagcccccagtccggcccgcaggctacctgctcagcttccacacccctggtggacagaaccaggagatcctgctcccaggagggatcacatctcaccagctccttggcctctttccctccacctcctacaatgcacggctccaggccatgtggggccagagcctcctgccgcccgtgtccacctctttcaccacgggtgggctgcggatccccttccccagggactgcggggaggagatgcagaacggagccggtgcctccaggaccagcaccatcttcctcaacggcaaccgcgagcggcccctgaacgtgttttgcgacatggagactgatgggggcggctggctggtgttccagcgccgcatggatggacagacagacttctggagggactgggaggactatgcccatggttttgggaacatctctggagagttctggctgggcaatgaggccctgcacagcctgacacaggcaggtgactactccatgcgcgtggacctgcgggctggggacgaggctgtgttcgcccagtacgactccttccacgtagactcggctgcggagtactaccgcctccacttggagggctaccacggcaccgcaggggactccatgagctaccacagcggcagtgtcttctctgcccgtgatcgggaccccaacagcttgctcatctcctgcgctgtctcctaccgaggggcctggtggtacaggaactgccactacgccaacctcaacgggctctacgggagcacagtggaccatcagggagtgagctggtaccactggaagggcttcgagttctcggtgcccttcacggaaatgaagctgagaccaagaaactttcgctccccagcggggggaggctgagctgctgcccacctctctcgcaccccagtatgactgccgagcactgaggggtcgccccgagagaagagccagggtccttcaccacccagccgctggaggaagccttctctgccagcgatctcgcagcactgtgtttacaggggggaggggaggggttcgtacaggagcaataaaggagaaactgaggtacccggc

SEQ ID NO: 190082 - DNA, 13125 bp, Homo sapiens
  Payload ID: 17533
  Gene Symbol: TNXB
  Gene Name: tenascin XB
  ENST ID: ENST00000549232
  CDS Start-End: 203-12931
tcctccccttctcctcccctgctcgctgcagactccctcctcactgtcgctgccgagatccacagtcggttgtggctcagcccctgttgcaggggacaagtgagggagacttccctgtcctgccctgagacgccgccctcccggggttggggacagagcaggtgcagaggcactgcagctgctcggttgcccagcctcctgaatgatgccagcccagtatgctctaacctccagcctggttctcctggtgctgctgagcacagccagagcaggccccttctcttcacggtccaatgtgacactgccagccccccggccccctccccagccagggggccacacagtgggggctggagtgggaagcccctcttctcagctttacgagcacacagtggaaggaggggagaagcaggtggtattcacccaccgcattaacctgcccccttccactggctgtggctgtcccccaggcaccgagcccccagtccttgcttcagaggtacaggccctgagggtccgtctagagatcctggaggagttggtgaaggggctcaaggaacagtgcactgggggatgttgtcctgcctctgcccaagctggcacaggtcagacagatgtgcggaccctctgcagtctccatggtgtgtttgatctgagccgctgcacctgttcctgtgagccaggctggggtgggcccacctgctcagaccccacagatgctgagatccctccctcttccccaccctcagcctcggggtcctgcccagatgactgcaatgatcagggtcgctgtgtccgtggtcgttgcgtgtgctttcccggctacactggccccagctgtggctggccatcctgtcccggggactgccaaggccgtgggcgctgcgtgcagggcgtgtgtgtgtgccgggcaggcttctcaggccccgactgcagccagcgctcctgccctcgaggttgcagccagaggggacgctgtgagggtgggcgctgcgtgtgtgacccaggctacactggtgacgactgtggcatgaggagctgccctcgcggttgcagtcagagggggcgctgtgagaatgggcgctgcgtgtgtaaccccggctacgctggcgaggactgtggggtgaggagctgccctcggggctgcagccagcggggacgctgcaaggacgggcgctgcgtgtgtgaccccggctacactggcgaggactgtggtacgcggagctgcccctgggactgtggcgagggcgggcgctgcgtggacggccgctgcgtgtgctggcccgggtacacaggcgaggactgcagcacgcggacatgtccgagggactgccggggccgcgggcgctgcgaggacggcgaatgcatttgcgacacgggctacagcggggacgactgcggcgtgcgcagctgccctggcgactgcaaccaaaggggccgctgcgaggacggccgctgcgtgtgctggccggggtacactggaaccgattgcggctcgcgcgcctgcccacgcgactgtagaggtcgcgggcgctgcgagaacggcgtgtgtgtttgcaatgcgggctacagcggcgaggactgcggtgtgcgcagctgtcctggggactgtcgtggccggggccgctgtgagagtggccgctgcatgtgttggccggggtacacaggccgggactgcggcacgcgcgcctgtcctggcgactgtcgcgggcgcgggcgctgcgtggatggccgctgcgtgtgcaacccgggcttcaccggtgaggactgtgggagccgtcgctgtcccggggactgccgtgggcacggcctttgcgaggatggcgtgtgcgtgtgtgacgcaggctactcaggggaagactgcagcacgcgcagctgccccgggggctgccgaggccgcggccagtgcctagatgggcggtgtgtgtgcgaggacggctactctggcgaggattgcggtgtgaggcagtgcccgaatgactgcagccagcacggcgtgtgccaggacggtgtgtgcatctgttgggaaggctacgtgagtgaggactgcagcatccgcacctgcccctccaactgccacgggaggggccgctgtgaggaagggcgctgcctgtgcgacccaggctacaccggccctacctgtgccacccgcatgtgcccggctgactgccggggacgtgggcggtgtgtgcaaggagtgtgcctgtgccacgtgggctatggcggtgaggactgcgggcaggaagagcctccagccagcgcctgccctggaggctgcgggccccgggaactgtgccgggcaggccagtgtgtgtgtgtagagggcttccgaggccctgactgtgccatccagacatgcccaggggactgccgtggccgaggagagtgtcacgatggcagctgtgtctgcaaagatgggtatgctggcgaagactgcggagaagaggtgccaaccattgagggcatgaggatgcatctcttggaggagacaacagttcggacagagtggaccccggctcctggccccgtggatgcctatgaaattcagttcatccccacgacagagggggcgagccccccattcacagcacgggttccaagctctgcctcagcctatgaccagagaggactggcccctggacaggagtaccaggtcactgtccgagcccttcgagggaccagctggggccttcctgcctccaagaccatcaccaccatgatcgatgggccccaggacctccgagtggtggctgtgacaccgacaacactggagcttggctggctgcgtccccaggctgaggtggaccgatttgtggtgtcctacgtcagtgccggcaaccagagggtgaggctggaagtgccccctgaagcagacgggacgctgctgactgacctgatgccaggcgtagaatatgtggtgactgtcacagcggagcggggccgggcagtcagctacccagcttctgtcagggccaacacagggtcctcacccttgggcctcttggggactaccgatgagcctcctccctcaggcccctcgacgacgcaaggggcccaggctcctctcctgcagcagcgcccccaggagctgggagagttgagggtgctgggcagagatgagacagggcgcctccgtgtggtctggaccgcccagcctgacacctttgcctacttccaactgcgcatgcgggtgcccgaggggccgggggcacatgaggaagtgctgccaggggacgtccgccaggctctggtgcctccaccccctcctggaaccccgtatgagctgtcacttcatggggtccctcctgggggcaagccctctgaccccatcatctaccaaggcattatggacaaggatgaggagaagcctgggaagtcctcaggcccaccacgcctgggtgagctgacggtgacagacaggacctccgactccttgctcctgcgctggacggtccccgagggcgagtttgactccttcgtgatccagtacaaagacagggacgggcagccccaggtggtgcccgtggaaggaccccagcgctcggccgtcatcacctccctggatcctggccgcaagtacaaatttgtcctgtatgggtttgttggcaagaagaggcatggtccgctggtggctgaagccaagatcttgcctcagagtgacccaagtccagggactccaccccacctgggaaacctgtgggtgacagaccctaccccagattcactgcacctctcctggactgtccctgagggccagtttgacaccttcatggtccagtacagggacagggatggacggccccaggtggtacctgtggaagggcccgagcgttcatttgttgtctcctcactggaccctgaccacaagtacagattcactctgtttggaattgcgaacaagaagcggtatggccccctcacggccgatggcaccactgctccagagaggaaagaggagcccccccgccctgagttcctggagcagcccctcctgggggaactgacagtgaccggcgtgaccccagactccttgcgtctctcatggacagtggcccagggccccttcgactcattcatggtccagtacaaggatgcacaggggcagccccaggcagtgcctgttgcgggggatgagaatgaggttactgtccccggcctggatcccgaccggaagtataagatgaacctctacgggcttcgtggcaggcagcgtgtggggcccgagtctgtggtggccaagactgctcctcaggaggatgtggacgagacccccagccccacagaactgggcacggaggccccggagtcccccgaggagccgctcctgggggagctgacagtgacaggatcctcccctgattcgctgagcctcttctggaccgtcccccagggcagcttcgactctttcaccgtgcagtacaaggacagggatgggcggccccgggcggtgcgtgttgggggcaaggagagtgaggtcaccgtgggaggcctagagcccgggcacaagtacaagatgcacctgtacggcctccacgaggggcagcgcgtgggcccggtgtccgccgtgggcgtgacagccccacaacaagaagagacccctccagccactgagtccccgctggagccacgcctaggagagctgacagtgacagatgtgacccccaactctgtgggcctctcctggacagtccccgagggccagtttgactccttcatagtccagtacaaggacaaggacgggcagccccaggtggtgccggtggcggcagaccagcgagaggtcacagtctacaacctggagcctgagagaaaatataagatgaacatgtatggactacatgatgggcaacgcatgggccccctgtctgtggtcatcgtgacggctcccctcccaccagccccagccacagaggcctccaagcctcccctggagccacgcctaggggagctgacagtgacggatataacccctgactctgtgggcctctcatggacagtccctgagggtgaattcgactcctttgtggttcagtacaaggacagggacgggcagccccaggtggtgcccgtggctgcagatcagcgggaggtcactatccctgacctggaaccctcccgcaagtacaagttcctgctctttgggatccaggatgggaaacgacgcagcccagtctctgtggaggcaaagacggttgcccgaggtgacgccagcccaggggccccaccccgccttggggagctgtgggtgacagaccccaccccagactcactgcgcctctcctggacggttcctgagggccagttcgactcttttgtggtccagttcaaggacaaagacgggccccaggtggtgcccgtggagggccatgagcgctctgtcactgtcacccctctggatgccggccgcaagtacagattcctcctctatggcctcctgggcaagaagcgccatggccctctcactgccgacggcaccacggaagcccggagtgctatggatgatactggaacaaagcgtcccccaaaaccccgtctgggggaggagctgcaggtgaccaccgtgacccagaactccgtgggcctctcctggacagtccctgagggccagtttgactcctttgtggtccagtacaaagacagggacgggcagccccaggtggtgcccgtggagggcagcctcagggaggtcagcgtgccgggcctggaccctgcccacaggtacaagctgctgctctacgggctgcaccacggcaagcgtgtgggccccatctcggccgtcgccattactgccggcagggaagaaacggaaactgagaccacggccccgacccctccagcgcctgagccccacctcggggagttgacagtggaggaggccacgtcacacaccctgcatctctcctggatggtgactgagggagaatttgactccttcgaaatccagtacacagatagagacgggcaactccaaatggtccgcataggaggtgaccggaatgacatcaccctctctggcctggaatccgaccacagatacctggtgaccctgtatggtttcagtgatgggaagcatgtaggtcctgtccatgtcgaggccctgacagtcccggaggaggagaagccttcagaacctcccaccgcaacccccgagccccccatcaagcctcgcctgggggagctgaccgtgacagatgccacccctgactccctcagcctgtcctggacagttcccgagggacagtttgaccacttcctggtccagtacaggaatggagatgggcagcccaaggcagtgagggtgccagggcacgaggaaggggtcaccatctcgggcctggagccagaccataaatacaagatgaacctgtacggcttccacggtggccagcgcatgggccctgtgtctgtcgtcggggtgacagctgcagaggaagagacccccagccccacagaacccagcatggaggccccggagcccgctgaggagccactcctgggggagctaacagtgacaggatcctcccctgactcgctgagcctctcctggaccgtcccccagggccgcttcgactccttcaccgtgcagtacaaggacagggacgggcggccccaggtggtgcgtgttgggggcgaggagagtgaagtcaccgtggggggcctggagcctgggcgcaagtacaagatgcacctgtacggcctccacgaggggcggcgcgtgggcccagtgtctgctgtgggcgtcacggcccccgaagaggagtcccctgatgctcctcttgcaaagctgcgcctagggcagatgacagtgagagacatcacctccgactccctcagcctctcctggacagtccccgagggccagtttgaccatttcttggtccagtttaagaatggggacgggcagcccaaggcggtgcgggtgccgggacacgaggatggggtcaccatctcgggcctggagccagaccacaagtacaagatgaacctgtacggcttccacggtggccagcgcgtgggccccgtgtctgctgttggtttaactgccccaggaaaggatgaagaaatggccccagcctcgacagaacctcccacccctgaaccccccatcaagcctcgcctggaggagctgaccgtgacagatgcgacccctgactccctcagcctgtcctggacggttcccgagggacagtttgaccacttcctggtccagtacaagaatggggatgggcagcccaaggcaacacgggtgccaggacatgaggacagggtcaccatctccggcctggagccagacaacaagtacaagatgaacctgtacggcttccacggtggccagcgtgtgggccccgtgtctgccatcggggtgacagctgcagaggaagagacccccagccccacagaacccagcatggaggccccggagccccctgaggagccgctcctgggggagctaacagtgacaggatcctcccctgactcgctgagcctctcctggaccgtcccccagggccgcttcgactccttcaccgtgcagtacaaggacagggacgggcggccccaggtggtgcgtgttgggggcgaggagagcgaggtcaccgtggggggcctggagcctgggcgcaaatacaagatgcacctgtacggcctccacgaggggcggcgtgtgggcccggtgtccaccgtgggcgtgactgccccacaagaggatgtggacgagacccccagccctacagaaccaggcacagaggccccagagccccccgaggagcctctcctgggggagctgacagtgacaggatcctcccctgactcgctgagcctttcctggaccgtcccccagggccgctttgactccttcaccgtgcagtacaaggacagggacgggcggccccaggcggtgcgtgttgggggccaggagagcaaggtcactgtgaggggcctggagcctgggcgcaagtacaagatgcacctgtacggcctccacgaggggcggcgcctaggcccggtgtctgccgtgggcgtcacagaggatgaagccgagaccacccaagcagtgcctaccatgacccctgagccccccatcaagcctcgcctgggggagctgaccatgacagatgccacccctgactccctcagcctgtcctggacggttcccgagggccagtttgaccacttcctggtccagtacaggaatggggatgggcagcccaaggcggtgcgggtgccggggcacgaggacggggtcaccatctcaggcctggagccagaccataaatacaagatgaacctgtacggcttccacggtggccagcgcgtgggccccatctctgtcattggggtgacggctgcagaggaagagacccccagccccacggaactcagcactgaggccccggagccccctgaggagccgctcctgggggagctgacagtgacaggatcctcccctgactcgctgagcctctcctggaccatcccccagggccacttcgactccttcaccgtgcagtacaaggacagggacgggcggccccaggtgatgcgtgtcaggggcgaggagagcgaggtcaccgtggggggcctggagcccgggcgcaaatacaagatgcacctgtacggcctccacgaggggcggcgtgtgggcccggtgtccaccgtgggtgtgacagaggatgaagcagagaccacccaagcagtgcccaccacaacccctgagccccccaacaagcctcgcctcggggagctgaccgtgacagatgccacccctgactccctcagcctgtcctggatggtccccgagggccagtttgaccacttcctggtccagtacaggaatggggatgggcagcccaaggtggtgcgggtgccggggcacgaggacggggtcaccatctcaggcctggagccagaccacaagtacaagatgaacctgtacggcttccacggtggccagcgcgtgggccccatctctgtcattggggtgacagctgcagaggaagaaactcccgcccccacagaacccagcacggaggccccggagccccctgaggagccgctcctgggggagctgacagtgacaggatcctcccctgactcgctgagcctctcctggaccatcccccagggccgcttcgactccttcactgtgcagtacaaggacagggacgggcggccccaggtggtgcgtgtcaggggcgaggagagcgaggtcaccgtggggggcctggagcccgggtgcaaatacaagatgcacctgtacggcctccacgaggggcagcgcgtgggcccagtgtccgctgtgggtgtgacagctccaaaggatgaagccgagaccacccaagcagtgcctaccatgacccctgagccccccatcaagcctcgcctgggggagctgaccgtgacagatgccacccccgactccctcagcctgtcctggatggttcccgagggccagtttgaccacttcctggtccagtacaggaatggggatgggcagcccaaggcggtgcgggtgccggggcacgaggacggggtcaccatctcaggcctggagccagaccataaatacaagatgaacctgtacggcttccacggtggccagcgcgtaggccctgtgtctgccattggggtgacggaggaagagacccccagccccacagaacccagcactgaggccccggaggcccctgaggagccgctcctgggggagttgacagtgacaggatcctcccctgactcgctgagcctctcctggaccgtcccccagggccgcttcgactccttcaccgtgcagtacaaggacagggacgggcagccccaggtggtgcgtgtcaggggcgaggagagcgaggtcaccgtggggggcctggagcccgggcgcaaatacaagatgcatctgtacggcctccacgaggggcagcgcgtgggcccagtgtccaccgtgggcatcacggcgcccctgcccacaccactgccggtggagccccgcctgggggagctggcggtggcggccgtgacctcggactcagtgggcctctcatggacggtggcccagggcccctttgactccttcctggtacagtacagggacgcgcaggggcagccccaggcagtgcctgtgagcggagacctccgagcggtcgccgtctcggggctggacccggcccgcaagtacaagttcctgctctttggactccagaatgggaaacgccacggcccagtccctgtggaggccaggaccgccccagacaccaaaccgtctccccgcctgggggagctgactgtgacagatgcgacccctgactccgtgggcctctcgtggacggtccctgagggcgaattcgactccttcgtggtccagtacaaggataaggatggtcggctccaggtggtgccggtggcagccaaccagcgggaggtcacagtccagggcctggagcccagtaggaaatacaggttcctgctctatggtctgtcaggcaggaaacgactgggccccatctctgctgacagcaccacagctcccctggagaaggagctacctccccacctgggggaactgaccgtggctgaggagacctccagctctctgcgcctgtcctggacggtagcccagggcccctttgactccttcgtggtccagtacagggacacggacgggcagcccagggcagtgcctgtggccgcagaccagcgcacagtcaccgtagaggacctggagcctggcaagaaatacaagtttctgctctacgggctccttgggggaaagcgcctgggcccggtctctgccctgggaatgacagccccagaagaggacacaccagccccagagttagccccagaggcccctgagcctcctgaagagccccgcctaggagtgctgaccgtgaccgacacaaccccagactccatgcgcctctcgtggagcgtggcccagggcccctttgattccttcgtggtccagtatgaggacacgaacgggcagccccaggccttgctcgtggacggcgaccagagcaagatcctcatctcaggcctggagcccagcaccccctacaggttcctcctctatggcctccatgaagggaagcgcctggggcccctctcagctgagggcaccacagggctggctcctgctggtcagacctcagaggagtcaaggccccgcctgtcccagctgtctgtgactgacgtgaccaccagttcactgaggctcaactgggaggccccaccgggggccttcgactccttcctgctccgctttggggttccatcaccaagcactctggagccgcatccgcgtccactgctgcagcgcgagctgatggtgccggggacgcggcactcggccgtgctccgggacctgcgttccgggactctgtacagcctgacactgtatgggctgcgaggaccccacaaggccgacagcatccagggaaccgcccgcaccctcagcccagttctggagagcccccgtgacctccaattcagtgaaatcagggagacctcagccaaggtcaactggatgcccccaccatcccgggcggacagcttcaaagtctcctaccagctggcggacggaggggagcctcagagtgtgcaggtggatggccaggcccggacccagaaactccaggggctgatcccaggcgctcgctatgaggtgaccgtggtctcggtccgaggctttgaggagagtgagcctctcacaggcttcctcaccacggttcctgacggtcccacacagttgcgtgcactgaacttgaccgagggattcgccgtgctgcactggaagcccccccagaatcctgtggacacctatgacgtccaggtcacagcccctggggccccgcctctgcaggcggagaccccaggcagcgcggtggactaccccctgcatgaccttgtcctccacaccaactacaccgccacagtgcgtggcctgcggggccccaacctcacttccccagccagcatcaccttcaccacagggctagaggcccctcgggacttggaggccaaggaagtgaccccccgcaccgccctgctcacttggactgagcccccagtccggcccgcaggctacctgctcagcttccacacccctggtggacagaaccaggagatcctgctcccaggagggatcacatctcaccagctccttggcctctttccctccacctcctacaatgcacggctccaggccatgtggggccagagcctcctgccgcccgtgtccacctctttcaccacgggtgggctgcggatccccttccccagggactgcggggaggagatgcagaacggagccggtgcctccaggaccagcaccatcttcctcaacggcaaccgcgagcggcccctgaacgtgttttgcgacatggagactgatgggggcggctggctggtgttccagcgccgcatggatggacagacagacttctggagggactgggaggactatgcccatggttttgggaacatctctggagagttctggctgggcaatgaggccctgcacagcctgacacaggcaggtgactactccatgcgcgtggacctgcgggctggggacgaggctgtgttcgcccagtacgactccttccacgtagactcggctgcggagtactaccgcctccacttggagggctaccacggcaccgcaggggactccatgagctaccacagcggcagtgtcttctctgcccgtgatcgggaccccaacagcttgctcatctcctgcgctgtctcctaccgaggggcctggtggtacaggaactgccactacgccaacctcaacgggctctacgggagcacagtggaccatcagggagtgagctggtaccactggaagggcttcgagttctcggtgcccttcacggaaatgaagctgagaccaagaaactttcgctccccagcggggggaggctgagctgctgcccacctctctcgcaccccagtatgactgccgagcactgaggggtcgccccgagagaagagccagggtccttcaccacccagccgctggaggaagccttctctgccagcgatctcgcagcactgtgtttacaggggggaggggaggggttcgtacaggagcaataaaggagaaactgaggtacccgg

SEQ ID NO: 190083 - DNA, 6842 bp, Homo sapiens
  Payload ID: 17533
  Gene Symbol: TNXB
  Gene Name: tenascin XB
  ENST ID: ENST00000613214
  CDS Start-End: 1-4635
atgatgccagcccagtatgctctaacctccagcctggttctcctggtgctgctgagcacagccagagcaggccccttctcttcacggtccaatgtgacactgccagccccccggccccctccccagccagggggccacacagtgggggctggagtgggaagcccctcttctcagctttacgagcacacagtggaaggaggggagaagcaggtggtattcacccaccgcattaacctgcccccttccactggctgtggctgtcccccaggcaccgagcccccagtccttgcttcagaggtacaggccctgagggtccgtctagagatcctggaggagttggtgaaggggctcaaggaacagtgcactgggggatgttgtcctgcctctgcccaagctggcacaggtcagacagatgtgcggaccctctgcagtctccatggtgtgtttgatctgagccgctgcacctgttcctgtgagccaggctggggtgggcccacctgctcagaccccacagatgctgagatccctccctcttccccaccctcagcctcggggtcctgcccagatgactgcaatgatcagggtcgctgtgtccgtggtcgttgcgtgtgctttcccggctacactggccccagctgtggctggccatcctgtcccggggactgccaaggccgtgggcgctgcgtgcagggcgtgtgtgtgtgccgggcaggcttctcaggccccgactgcagccagcgctcctgccctcgaggttgcagccagaggggacgctgtgagggtgggcgctgcgtgtgtgacccaggctacactggtgacgactgtggcatgaggagctgccctcgcggttgcagtcagagggggcgctgtgagaatgggcgctgcgtgtgtaaccccggctacactggcgaggactgtggggtgaggagctgccctcggggctgcagccagcggggacgctgcaaggacgggcgctgcgtgtgtgaccccggctacactggcgaggactgtggtacgcggagctgcccctgggactgtggcgagggcgggcgctgcgtggacggccgctgcgtgtgctggcccgggtacacaggcgaggactgcagcacgcggacatgtccgagggactgccggggccgcgggcgctgcgaggacggcgaatgcatttgcgacacgggctacagcggggacgactgcggcgtgcgcagctgccctggcgactgcaaccaaaggggccgctgcgaggacggccgctgcgtgtgctggccggggtacactggaaccgattgcggctcgcgcgcctgcccacgcgactgtagaggtcgcgggcgctgcgagaacggcgtgtgtgtttgcaatgcgggctacagcggcgaggactgcggtgtgcgcagctgtcctggggactgtcgtggccggggccgctgtgagagtggccgctgcatgtgttggccggggtacacaggccgggactgcggcacgcgcgcctgtcctggcgactgtcgcgggcgcgggcgctgcgtggatggccgctgcgtgtgcaacccgggcttcaccggtgaggactgtgggagccgtcgctgtcccggggactgccgtgggcacggcctttgcgaggatggcgtgtgcgtgtgtgacgcaggctactcaggggaagactgcagcacgcgcagctgccccgggggctgccgaggccgcggccagtgcctagatgggcggtgtgtgtgcgaggacggctactctggcgaggattgcggtgtgaggcagtgcccgaatgactgcagccagcacggcgtgtgccaggacggtgtgtgcatctgttgggaaggctacgtgagtgaggactgcagcatccgcacctgcccctccaactgccacgggaggggccgctgtgaggaagggcgctgcctgtgcgacccaggctacaccggccctacctgtgccacccgcatgtgcccggctgactgccggggacgtgggcggtgtgtgcaaggagtgtgcctgtgccacgtgggctatggcggtgaggactgcgggcaggaagagcctccagccagcgcctgccctggaggctgcgggccccgggaactgtgccgggcaggccagtgtgtgtgtgtagagggcttccgaggccctgactgtgccatccagacatgcccaggggactgccgtggccgaggagagtgtcacgatggcagctgtgtctgcaaagatgggtatgctggcgaagactgcggagaagcacgggttccaagctctgcctcagcctatgaccagagaggactggcccctggacaggagtaccaggtcactgtccgagcccttcgagggaccagctggggccttcctgcctccaagaccatcaccaccatgatcgatgggccccaggacctccgagtggtggctgtgacaccgacaacactggagcttggctggctgcgtccccaggctgaggtggaccgatttgtggtgtcctacgtcagtgccggcaaccagagggtgaggctggaagtgccccctgaagcagacgggacgctgctgactgacctgatgccaggcgtagaatatgtggtgactgtcacagcggagcggggccgggcagtcagctacccagcttctgtcagggccaacacagaggaaagggaggaggagtccccgcccaggccaagcctgtcccagcccccacggcggccttggggcaacctgacggccgagctgagccgtttccgcggcacggtgcaggacctggagcgccacctgcgggctcacggctacccactgcgggccaaccagacttacacgtcggtggcgcgccacatccatgaatacttgcagcggcaggtgctgggcagttccgccgatggcgcgcttctcgtgtctctcgacgggctccgcggccagttcgagcgcgtggtgctgcgctggcggcctcagccgcctgcagagggccccggcggtgagctgactgtgccgggcaccacgcgcaccgtcagcctgcccgacctcaggcccggcaccacctaccacgtggaggtccacggggtgcgggcggggcagacctccaagtcctacgccttcatcaccaccacaggcccctcgacgacgcaaggggcccaggctcctctcctgcagcagcgcccccaggagctgggagagttgagggtgctgggcagagatgagacagggcgcctccgtgtggtctggaccgcccagcctgacacctttgcctacttccaactgcgcatgcgggtgcccgaggggccgggggcacatgaggaagtgctgccaggggacgtccgccaggctctggtgcctccaccccctcctggaaccccgtatgagctgtcacttcatggggtccctcctgggggcaagccctctgaccccatcatctaccaaggcattatggacaaggatgaggagaagcctgggaagtcctcaggcccaccacgcctgggtgagctgacggtgacagacaggacctccgactccttgctcctgcgctggacggtccccgagggcgagtttgactccttcgtgatccagtacaaagacagggacgggcagccccaggtggtgcccgtggaaggaccccagcgctcggccgtcatcacctccctggatcctggccgcaagtacaaatttgtcctgtatgggtttgttggcaagaagaggcatggtccgctggtggctgaagccaagatcttgcctcagagtgacccaagtccagggactccaccccacctgggaaacctgtgggtgacagaccctaccccagattcactgcacctctcctggactgtccctgagggccagtttgacaccttcatggtccagtacagggacagggatggacggccccaggtggtacctgtggaagggcccgagcgttcatttgttgtctcctcactggaccctgaccacaagtacagattcactctgtttggaattgcgaacaagaagcggtatggccccctcacggccgatggcaccactgctccagagaggaaagaggagcccccccgccctgagttcctggagcagcccctcctgggggaactgacagtgaccggcgtgaccccagactccttgcgtctctcatggacagtggcccagggccccttcgactcattcatggtccagtacaaggatgcacaggggcagccccaggcagtgcctgttgcgggggatgagaatgaggttactgtccccggcctggatcccgaccggaagtataagatgaacctctacgggcttcgtggcaggcagcgtgtggggcccgagtctgtggtggccaagactgctcctcaggaggatgtggacgagacccccagccccacagaactgggcacggaggccccggagtcccccgaggagccgctcctgggggagctgacagtgacaggatcctcccctgattcgctgagcctcttctggaccgtcccccagggcagcttcgactctttcaccgtgcagtacaaggacagggatgggcggccccgggcggtgcgtgttgggggcaaggagagtgaggtcaccgtgggaggcctagagcccgggcacaagtacaagatgcacctgtacggcctccacgaggggcagcgcgtgggcccggtgtccgccgtgggcgtgacagccccacaacaagaagagacccctccagccactgagtccccgctggagccacgcctaggagagctgacagtgacagatgtgacccccaactctgtgggcctctcctggacagtccccgagggccagtttgactccttcatagtccagtacaaggacaaggacgggcagccccaggtggtgccggtggcggcagaccagcgagaggtcacagtctacaacctggagcctgagagaaaatataagatgaacatgtatggactacatgatgggcaacgcatgggccccctgtctgtggtcatcgtgacggctcccctcccaccagccccagccacagaggcctccaagcctcccctggagccacgcctaggggagctgacagtgacggatataacccctgactctgtgggcctctcatggacagtccctgagggtgaattcgactcctttgtggttcagtacaaggacagggacgggcagccccaggtggtgcccgtggctgcagatcagcgggaggtcactatccctgacctggaaccctcccgcaagtacaagttcctgctctttgggatccaggatgggaaacgacgcagcccagtctctgtggaggcaaagacggttgcccgaggtgacgccagcccaggggccccaccccgccttggggagctgtgggtgacagaccccaccccagactcactgcgcctctcctggacggttcctgagggccagttcgactcttttgtggtccagttcaaggacaaagacgggccccaggtggtgcccgtggagggccatgagcgctctgtcactgtcacccctctggatgccggccgcaagtacagattcctcctctatggcctcctgggcaagaagcgccatggccctctcactgccgacggcaccacggaagcccggagtgctatggatgatactggaacaaagcgtcccccaaaaccccgtctgggggaggagctgcaggtgaccaccgtgacccagaactccgtgggcctctcctggacagtccctgagggccagtttgactcctttgtggtccagtacaaagacagggacgggcagccccaggtggtgcccgtggagggcagcctcagggaggtcagcgtgccgggcctggaccctgcccacaggtacaagctgctgctctacgggctgcaccacggcaagcgtgtgggccccatctcggccgtcgccattactgccggcagggaagaaacggaaactgagaccacggccccgacccctccagcgcctgagccccacctcggggagttgacagtggaggaggccacgtcacacaccctgcatctctcctggatggtgactgagggagaatttgactccttcgaaatccagtacacagatagagacgggcaactccaaatggtccgcataggaggtgaccggaatgacatcaccctctctggcctggaatccgaccacagatacctggtgaccctgtatggtttcagtgatgggaagcatgtaggtcctgtccatgtcgaggccctgacagtcccggaggaggagaagccttcagaacctcccaccgcaacccccgagccccccatcaagcctcgcctgggggagctgaccgtgacagatgccacccctgactccctcagcctgtcctggacagttcccgagggacagtttgaccacttcctggtccagtacaggaatggagatgggcagcccaaggcagtgagggtgccagggcacgaggaaggggtcaccatctcgggcctggagccagaccataaatacaagatgaacctgtacggcttccacggtggccagcgcatgggccctgtgtctgtcgtcggggtgacagctgcagaggaagagacccccagccccacagaacccagcatggaggccccggagcccgctgaggagccgctcctgggggagctaacagtgacaggatcctcccctgactcgctgagcctctcctggaccgtcccccagggccgcttcgactccttcaccgtgcagtacaaggacagggacgggcggccccaggtggtgcgtgttgggggcgaggagagtgaagtcaccgtggggggcctggagcctgggcgcaagtacaagatgcacctgtacggcctccacgaggggcggcgcgtgggcccagtgtctgctgtgggcgtcacggcccccgaagaggagtcccctgatgctcctcttgcaaa

SEQ ID NO: 190084 - DNA, 6083 bp, Homo sapiens
  Payload ID: 17533
  Gene Symbol: TNXB
  Gene Name: tenascin XB
  ENST ID: ENST00000611016
  CDS Start-End: 1-5889
gccccaggaaaggatgaagaaatggccccagcctcgacagaacctcccacccctgaaccccccatcaagcctcgcctggaggagctgaccgtgacagatgcgacccctgactccctcagcctgtcctggacggttcccgagggacagtttgaccacttcctggtccagtacaagaatggggatgggcagcccaaggcaacacgggtgccaggacatgaggacagggtcaccatctccggcctggagccagacaacaagtacaagatgaacctgtacggcttccacggtggccagcgtgtgggccccgtgtctgccatcggggtgacagctgcagaggaagagacccccagccccacagaacccagcatggaggccccggagccccctgaggagccgctcctgggggagctaacagtgacaggatcctcccctgactcgctgagcctctcctggaccgtcccccagggccgcttcgactccttcaccgtgcagtacaaggacagggacgggcggccccaggtggtgcgtgttgggggcgaggagagcgaggtcaccgtggggggcctggagcctgggcgcaaatacaagatgcacctgtatggcctccacgaggggcggcgcgtgggcccggtgtccaccgtgggcgtgactgccccacaagaggatgtggacgagacccccagccctacagaaccaggcacagaggccccagggccccccgaggagcctctcctgggggagctgacagtgacaggatcctcccctgactcgctgagcctttcctggaccgtcccccagggccgctttgactccttcaccgtgcagtacaaggacagggacgggcggccccaggcggtgcgtgttgggggccaggagagcaaggtcactgtgaggggcctggagcctgggcgcaagtacaagatgcacctgtacggcctccacgaggggcggcgcctgggcccggtgtctgccgtgggcgtcacagaggatgaagccgagaccacccaagcagtgcctaccatgacccctgagccccccatcaagcctcgcctgggggagctgaccatgacagatgccacccctgactccctcagcctgtcctggacggttcccgagggccagtttgaccacttcctggtccagtacaggaatggggatgggcagcccaaggcggtgcgggtgccggggcacgaggacggggtcaccatctcaggcctggagccagaccataaatacaagatgaacctgtacggcttccacggtggccagcgcgtgggccccatctctgtcattggggtgacggctgcagaggaagagacccccagccccacggaactcagcactgaggccccggagccccctgaggagccgctcctgggggagctgacagtgacaggatcctcccctgactcgctgagcctctcctggaccatcccccagggccacttcgactccttcaccgtgcagtacaaggacagggacgggcggccccaggtgatgcgtgtcaggggcgaggagagcgaggtcaccgtggggggcctggagcccgggcgcaaatacaagatgcacctgtacggcctccacgaggggcggcgtgtgggcccggtgtccaccgtgggtgtgacagaggatgaagcagagaccacccaagcagtgcccaccacaacccctgagccccccaacaagcctcgcctcggggagctgaccgtgacagatgccacccctgactccctcagcctgtcctggatggtccccgagggccagtttgaccacttcctggtccagtacaggaatggggatgggcagcccaaggtggtgcgggtgccggggcacgaggacggggtcaccatctcaggcctggagccagaccacaagtacaagatgaacctgtacggcttccacggtggccagcgcgtgggccccatctctgtcattggggtgacagctgcagaggaagaaactcccgcccccacagaacccagcacggaggccccggagccccctgaggagccgctcctgggggagctgacagtgacaggatcctcccctgactcgctgagcctctcctggaccatcccccagggccgcttcgactccttcactgtgcagtacaaggacagggacgggcggccccaggtggtgcgtgtcaggggcgaggagagcgaggtcaccgtggggggcctggagcccgggtgcaaatacaagatgcacctgtacggcctccacgaggggcagcgcgtgggcccagtgtccgctgtgggtgtgacagctccaaaggatgaagccgagaccacccaagcagtgcctaccatgacccctgagccccccatcaagcctcgcctgggggagctgaccgtgacagatgccacccccgactccctcagcctgtcctggatggttcccgagggccagtttgaccacttcctggtccagtacaggaatggggatgggcagcccaaggcggtgcgggtgccggggcacgaggacggggtcaccatctcaggcctggagccagaccataaatacaagatgaacctgtacggcttccacggtggccagcgcgtaggccctgtgtctgccattggggtgacggaggaagagacccccagccccacagaacccagcactgaggccccggaggcccctgaggagccgctcctgggggagttgacagtgacaggatcctcccctgactcgctgagcctctcctggaccgtcccccagggccgcttcgactccttcaccgtgcagtacaaggacagggacgggcagccccaggtggtgcgtgtcaggggcgaggagagcgaggtcaccgtggggggcctggagcccgggcgcaaatacaagatgcatctgtacggcctccacgaggggcagcgcgtgggcccagtgtccaccgtgggcatcacggcgcccctgcccacaccactgccggtggagccccgcctgggggagctggcggtggcggccgtgacctcggactcagtgggcctctcatggacggtggcccagggcccctttgactccttcctggtacagtacagggacgcgcaggggcagccccaggcagtgcctgtgagcggagacctccgagcggtcgccgtctcggggctggacccggcccgcaagtacaagttcctgctctttggactccagaatgggaaacgccacggcccagtccctgtggaggccaggaccgccccagacaccaaaccgtctccccgcctgggggagctgactgtgacagatgcgacccctgactccgtgggcctctcgtggacggtccctgagggcgaattcgactccttcgtggtccagtacaaggataaggatggtcggctccaggtggtgccggtggcagccaaccagcgggaggtcacagtccagggcctggagcccagtaggaaatacaggttcctgctctatggtctgtcaggcaggaaacgactgggccccatctctgctgacagcaccacagctcccctggagaaggagctacctccccacctgggggaactgaccgtggctgaggagacctccagctctctgcgcctgtcctggacggtagcccagggcccctttgactccttcgtggtccagtacagggacacggacgggcagcccagggcagtgcctgtggccgcagaccagcgcacagtcaccgtagaggacctggagcctggcaagaaatacaagtttctgctctacgggctccttgggggaaagcgcctgggcccggtctctgccctgggaatgacagccccagaagaggacacaccagccccagagttagccccagaggcccctgagcctcctgaagagccccgcctaggagtgctgaccgtgaccgacacaaccccagactccatgcgcctctcgtggagcgtggcccagggcccctttgattccttcgtggtccagtatgaggacacgaacgggcagccccaggccttgctcgtggacggcgaccagagcaagatcctcatctcaggcctggagcccagcaccccctacaggttcctcctctatggcctccatgaagggaagcgcctggggcccctctcagctgagggcaccacagggctggctcctgctggtcagacctcagaggagtcaaggccccgcctgtcccagctgtctgtgactgacgtgaccaccagttcactgaggctcaactgggaggccccaccgggggccttcgactccttcctgctccgctttggggttccatcaccaagcactctggagccgcatccgcgtccactgctgcagcgcgagctgatggtgccggggacgcggcactcggccgtgctccgggacctgcgttccgggactctgtacagcctgacactgtatgggctgcgaggaccccacaaggccgacagcatccagggaaccgcccgcaccctcagcccagttctggagagcccccgtgacctccaattcagtgaaatcagggagacctcagccaaggtcaactggatgcccccaccatcccgggcggacagcttcaaagtctcctaccagctggcggacggaggggagcctcagagtgtgcaggtggatggccaggcccggacccagaaactccaggggctgatcccaggcgctcgctatgaggtgaccgtggtctcggtccgaggctttgaggagagtgagcctctcacaggcttcctcaccacggttcctgacggtcccacacagttgcgtgcactgaacttgaccgagggattcgccgtgctgcactggaagcccccccagaatcctgtggacacctatgacgtccaggtcacagcccctggggccccgcctctgcaggcggagaccccaggcagcgcggtggactaccccctgcatgaccttgtcctccacaccaactacaccgccacagtgcgtggcctgcggggccccaacctcacttccccagccagcatcaccttcaccacagggctagaggcccctcgggacttggaggccaaggaagtgaccccccgcaccgccctgctcacttggactgagcccccagtccggcccgcaggctacctgctcagcttccacacccctggtggacagaaccaggagatcctgctcccaggagggatcacatctcaccagctccttggcctctttccctccacctcctacaatgcacggctccaggccatgtggggccagagcctcctgccgcccgtgtccacctctttcaccacgggtgggctgcggatccccttccccagggactgcggggaggagatgcagaacggagccggtgcctccaggaccagcaccatcttcctcaacggcaaccgcgagcggcccctgaacgtgttttgcgacatggagactgatgggggcggctggctggtgttccagcgccgcatggatggacagacagacttctggagggactgggaggactatgcccatggttttgggaacatctctggagagttctggctgggcaatgaggccctgcacagcctgacacaggcaggtgactactccatgcgcgtggacctgcgggctggggacgaggctgtgttcgcccagtacgactccttccacgtagactcggctgcggagtactaccgcctccacttggagggctaccacggcaccgcaggggactccatgagctaccacagcggcagtgtcttctctgcccgtgatcgggaccccaacagcttgctcatctcctgcgctgtctcctaccgaggggcctggtggtacaggaactgccactacgccaacctcaacgggctctacgggagcacagtggaccatcagggagtgagctggtaccactggaagggcttcgagttctcggtgcccttcacggaaatgaagctgagaccaagaaactttcgctccccagcggggggaggctgagctgctgcccacctctctcgcaccccagtatgactgccgagcactgaggggtcgccccgagagaagagccagggtccttcaccacccagccgctggaggaagccttctctgccagcgatctcgcagcactgtgtttacaggggggaggggaggggttcgtacgggagcaataaaggagaaactgaggtacccgg

SEQ ID NO: 190085 - DNA, 12875 bp, Homo sapiens
  Payload ID: 17534
  Gene Symbol: TENM1
  Gene Name: teneurin transmembrane protein 1
  Uniprot ID: Q9UKZ4
  ENST ID: ENST00000371130
  CDS Start-End: 65-8242
gactgcttgcattaaaggacttcctcatcctttttttcatgaaactgagcttgcttaatcagagatggagcaaactgactgcaaaccctaccagcctctaccaaaagtcaagcatgaaatggatctagcttacaccagttcttctgatgagagtgaagatggaagaaaaccaagacagtcatacaactccagggagaccctgcacgagtataaccaggagctgaggatgaattacaatagccagagtagaaagaggaaagaagtagaaaaatctactcaagagatggaattctgtgaaacctctcacactctgtgctctggctaccaaacagacatgcacagcgtttctcggcatggctaccagctagagatgggatctgatgtggacacagagacagaaggtgctgcctcacctgaccatgcactaagaatgtggataaggggaatgaaatcagagcatagttcctgtttgtccagccgggccaactctgcattatccttgactgacactgaccatgaaaggaagtctgatggggaaaatggtttcaaattctctcctgtttgttgtgacatggaggctcaagctgggtctactcaagatgtgcagagcagcccacacaaccagttcaccttcagacccctcccaccgccacctccgcctcctcatgcctgcacctgtgccaggaagccaccccctgcagcggactctcttcagaggagatcaatgactacccgcagccagcccagcccagctgctccagctcccccaaccagcacgcaggattcagtccatctgcataacagctgggtcctgaacagcaacataccattggagaccaggcatttcctgttcaaacatggatctggttcctctgcgatcttcagtgcagccagtcagaactaccctctgacatccaataccgtgtactcgccccctcccaggcctcttcctcgaagcaccttttcccgacctgcctttacctttaacaaaccttacaggtgctgcaactggaagtgcacagcattgagcgccactgcaatcacagtgactttggccttgttactagcctatgtgattgcagtgcatttgttcggcctgacttggcagttgcaaccagttgaaggagagctgtatgcaaatggagttagcaaagggaacagggggaccgagtccatggacactacttactctccaattggaggaaaagtttctgataaatcagagaaaaaagtgtttcagaagggacgggcgatagacactggagaagttgacattggtgcacaggtcatgcagaccattccacctggtttattctggcgtttccagattactatccaccatccaatatatctgaagttcaatatttctttagccaaggactctctgctgggaatttatggcagaagaaacattccacctacacatactcagtttgattttgtaaaactaatggatggcaaacagctggtcaagcaggactccaagggctctgatgatacacagcactcccctcggaacctgatcttaacttcgcttcaggagacaggtttcatagagtatatggatcaaggaccttggtatctggcgttttacaatgatggaaaaaagatggagcaagtattcgtgttaactacagcaattgaaataatggatgactgttcaaccaattgcaatggaaatggagagtgtatctctggccattgtcattgtttcccaggattccttggacctgactgtgctagagattcctgccctgtgctgtgtggtgggaatggagaatacgagaaaggacactgtgtctgccggcatggctggaaggggccagagtgtgacgttccggaagaacaatgcattgatccaacatgctttggccacggcacctgcatcatgggagtctgcatctgtgtgccaggatacaaaggagaaatatgcgaggaagaggactgcctagacccaatgtgttccaaccatggcatctgtgtaaaaggagaatgtcactgttctactggctggggaggagttaactgtgaaacaccacttcctgtatgtcaagagcagtgctcaggacacggaacttttcttctggacgctggagtatgcagctgtgatcccaagtggacaggatctgactgctcaacagagctgtgtaccatggagtgtggtagccatggagtctgctcaagaggaatttgccagtgtgaagaaggctgggtaggaccaacatgtgaggaacgctcctgtcattctcattgtactgagcatggccaatgcaaagatggaaaatgtgagtgtagccctggatgggagggcgaccactgcacaattgctcactacttagatgctgtccgagatggctgcccagggctctgctttggaaatggacgatgtaccctggatcaaaatggttggcactgtgtgtgtcaggtgggttggagtgggacaggctgcaatgttgtcatggaaatgctttgtggagataacttggacaatgatggagatggtttaaccgactgtgtggatcctgactgttgtcaacaaagcaactgttatataagtcctctctgccagggctcaccagatcctcttgacctcattcagcaaagccaaactctcttctctcagcacacttcaagacttttttatgatcgaatcaaattcctcattggcaaggacagtactcatgtcattcctcctgaggtgtcatttgacagcaggcgtgcctgtgtgattcgaggccaagtggtggccatagatggaactcctctagtgggagtgaatgtcagtttcttgcaccacagtgattatgggtttaccatcagccggcaagatggaagctttgacctcgtggccatcggtggcatctctgtcatcttaatcttcgaccgatcccctttcctgcctgagaagagaacactctggttgccttggaatcagtttattgtggtagagaaagtcaccatgcagagagttgtatcagacccgccatcctgcgatatctccaactttatcagcccaaaccctattgtgcttccttcaccgctcacatcatttggagggtcctgtccagagaggggaactattgttcctgagctgcaggttgtacaggaggaaattcccattccctccagctttgtgaggctgagttacctgagcagccgcacccctgggtataaaaccctgctacggatccttctgacacattcaacgattcctgtaggcatgataaaagtacacctcacagtagctgtggaagggcgactcacacagaagtggtttcccgccgcaattaatcttgtctacacatttgcttggaacaagaccgacatctatggacagaaggtttggggcctggcagaggctttggtatctgtgggatatgaatatgaaacgtgccctgactttattctctgggagcaaaggacagtcgttttacaaggttttgagatggatgcttctaacctaggaggctggtctttgaataagcatcacattttgaatcctcaaagtggaatcatacataaagggaatggagaaaatatgttcatttcccagcagcccccagtcatatcaaccataatgggtaatggacaccaaaggagtgtagcctgcaccaactgcaatggcccagcccacaacaacaaactctttgctcctgtcgccttagcttctggccctgatggcagtgtgtatgttggcgacttcaattttgtaaggagaatatttccctcgggaaactccgttagtattttggaattaagcacaagtcctgctcacaaatactatctggctatggaccctgtgtctgaatcactctatctatcagacaccaatactcgcaaagtctacaagttgaaatctcttgtggagacgaaagatctgtccaagaattttgaagtggtggcaggaactggtgatcagtgccttccctttgaccagagtcattgtggagatggtgggagagcatcggaagcttcactgaatagccctcgaggcatcacagttgataggcatggatttatttactttgtggatgggactatgattcgcaaaattgatgagaatgctgtgatcacaactgtaatcggctcaaatggtctgacttccacacaaccactgagctgtgactcaggaatggacatcactcaggtgcgattagagtggccaacagaccttgcagtaaatcctatggacaattcattgtatgtcttggataacaacattgtgctgcaaatttctgagaacaggcgtgttcggatcatcgcaggacgccccattcactgccaggtgccaggcatcgatcatttcctggtcagcaaggtagcaattcactccactctagagtcagcgagggccatcagtgtctcccacagcgggctgctcttcatagctgaaacagacgagaggaaagtaaaccgcattcagcaagtaaccaccaatggggagatctacatcatcgctggtgcccccactgactgtgactgcaaaattgatccaaactgtgactgtttttcaggtgatggtggctatgccaaagatgcaaagatgaaagccccttcctccttagcagtgtcgcctgatggaaccctctatgtggcagacctcggaaatgttcgaattcgtaccatcagcaggaaccaagcccacctgaatgacatgaacatttatgagattgcttcacccgctgatcaggaactgtaccagttcactgtaaatggaacccacctacacaccctgaacttgataacaagggactatgtttataacttcacctacaattctgaaggtgacttgggcgcgattaccagcagcaatggcaattcagtgcacattcgccgtgatgcaggcggaatgccgctatggcttgtggtgcctggcggacaagtatactggctgactataagcagcaatggagtcctgaaaagagtgtcagcccaaggctataatctggccttaatgacctatccaggaaacacagggcttctggctaccaaaagtaacgaaaatggatggacaaccgtttatgagtatgaccccgagggacacctgaccaatgcaacgtttcccactggagaggtcagcagcttccacagtgacctggagaagctgacaaaagtggagctagatacttccaaccgtgaaaatgtcctcatgtcaaccaacttgacggcaactagtaccatatatattttaaaacaagaaaatactcaaagtacctatcgggtgaatccagatggttccctgcgtgtcacttttgccagcgggatggagatcggcctcagctcagagccccacatcctggcaggggcagtcaaccctaccctgggcaaatgcaacatctcattgcccggagagcacaatgcaaacctcatcgagtggcggcagaggaaggagcaaaacaaaggcaatgtttcggcttttgaaaggaggctgagggcccacaacagaaacctactctccatagattttgatcatataacccgcacaggaaagatctatgatgaccatcgaaaattcacccttcgaattctttatgaccagactgggcgacccattctgtggtctcctgtaagcagatataatgaagtgaacatcacatattcaccttcgggattggtgacgtttattcaaagaggaacgtggaatgaaaaaatggaatatgaccagagtgggaaaattatttcaagaacttgggctgatgggaaaatttggagctatacctacttagaaaaatctgtgatgcttctcctacacagccagcggcgttacatctttgagtatgaccaaccagattgtctgctctcagtcaccatgcctagcatggtgcgtcacagcttacaaaccatgctttcagtgggctactaccggaacatctacaccccaccggacagtagcacttcttttatccaagactatagtcgagatggccgattgctacagaccctgcatctggggacagggcgcagagtcttatacaagtacaccaagcaagcaaggctttctgaggttctctatgataccactcaggtcacattaacatatgaagagtcttctggagtgattaagacaatacacctgatgcatgacggattcatctgcacaatcagatacaggcaaacaggacctcttattggacgccagattttcagattcagtgaagaaggccttgtgaatgcacggttcgactacagctacaacaatttccgagtcacaagcatgcaagctgtaatcaatgaaacccctttgcctatagatctttaccgatatgttgatgtctctggcagaacagagcagtttggaaaattcagtgtaattaattacgatttaaatcaggtcataactactacagtgatgaaacacaccaaaatcttcagtgccaatggacaagtcattgaagtccaatatgaaatcctaaaggcaattgcctactggatgaccattcaatatgataatgtgggccgcatggtaatatgtgacataagggtaggagtagatgccaatataacaaggtacttctatgaatacgatgctgatgggcaacttcagactgtttctgtaaatgacaaaacccagtggcgttatagttacgatctgaatggaaacatcaacctcttaagccatgggaagagtgctcgtcttactcctctccgatatgacctccgagaccgcatcaccagattaggagaaattcagtataaaatggatgaagatggctttctgaggcagaggggaaatgatatttttgaatataattctaatggcctgctgcagaaagcctacaataaggcttctggctggactgtgcagtattactatgatgggcttgggcgacgtgtcgcgagtaagtccagcctagggcagcaccttcagttcttttatgcagaccttaccaaccccataagagttactcatttgtacaaccacacaagctcggagattacatctctgtattatgatctccaaggtcaccttattgccatggagttaagcagtggtgaagaatattatgtagcctgtgataatacaggtaccccactagctgtgttcagcagccgaggtcaggtcataaaggagatactatacacaccttatggcgatatctatcatgacacttaccctgactttcaggtcattattggttttcatggaggactctatgatttccttactaaattagtgcacctggggcaaagggattatgatgttgttgctggcagatggacaacgcctaatcatcacatatggaaacagttgaacctccttcctaaaccattcaacctctactcctttgaaaataactacccagttggcaaaattcaagatgttgcaaagtataccacagacatcagaagttggttggagctatttggtttccaattacacaatgtactacctggatttcccaaacctgaattagaaaatttagaattaacttacgagcttctacggcttcagacaaaaactcaagagtgggatcctggaaagactatcctgggcattcagtgtgaactccagaaacagctcaggaatttcatttccttggaccaactacctatgactccccgatacaatgatggacggtgccttgaaggagggaagcaaccaaggtttgctgctgtcccttctgtttttgggaaaggtataaaatttgccatcaaggatggcatagtaacagctgatattataggagtagccaatgaagatagcaggcggcttgctgccattctcaataatgcccattacctggaaaacctacattttaccatagaggggagggacactcactacttcattaagcttgggtctctggaggaagacctggtgctcatcggtaacactggggggaggcggattctggagaatggtgtcaatgtcactgtgtcccagatgacttctgtgttgaatgggaggactagacggtttgcagatattcagctccagcatggagccctgtgcttcaacatccggtatgggacaactgtcgaagaggaaaagaatcacgtgttggagattgccagacagcgcgcagtggcccaggcctggactaaggaacaaagaaggctgcaagagggggaagaggggattagggcatggacagaaggggaaaagcagcagcttttgagcactgggcgggtacaaggttacgatgggtattttgttttgtctgttgagcagtatttagaactttctgacagtgccaataatattcactttatgagacagagcgaaataggcaggaggtaacaaaaatatctctgcctttgcgtcaccaaagactgcctgtttttaaaacataaaatggtttattgtattggttttctagatcagaactctgtatatgtaaatatggaggaaaaacatatccaactgcctttcaatgtgacggaagatggtattttaatattgtttgtttaaactctttaagaaatgacagagatttttagttcttgtgtggcagtattcaaaataacacaagtagaactcaaacagctaaaaacagttttcagaaagcaccactttcaatttgccgagccatgcatatgttccaatatccagaaagaacccaaggttctctatctctattgtgagaagcagtttcatccttaactgttggcagaacttacgggctatttgaataggtggtgcaatagtatctgaaacttgcctttcgaaagactgccagccctttgacgttttccagatctgttataggaaacttaaaaacaggtgtaaaatgtcttcagccaccatctcctagagtgaggacccaattgcccttccttcttgattattcctccttgcttgttaaagtaaatgccatattgttgtgctgtgttttggcgtgtggtggctgggttctgtctaccatgcttccctgtgggtgtggtaaccagactgtatagccgctatttgctcgtgtgtacatgataccaaagcagctggccagcgtgacctctctcacacgacctgttttgactcaattttttactaaaagttgttcagctgtattggtatcatgtaaacatagcttttattaacctgggtaggaatttctcatttatatataggatgtgttttggtcatagtttcacattagtgattcagtatctatacactgacccaatggttttgtgcacatgaacggtaatttacttaaaagtatgattctggtacaaaaacaaacaaaggctttagcaggcatacgtgtctgggatgccgatacatacattaactactactgcagaaattcataagagccaaaaccttaaaaaaatagacctggtacttaagtgaaagtactaaagggaagaccagaccaaacatcacagcagttgctgccacattgtttcagcccacttagatttatctttcaaatgtacaattctgtattgaacatctcccagccatcttcaggaaatcgaatcaagtaaatcctttccaaccgaaaacatttcaactaactatagagaggcagactcatttttactaaaataatttatacagttagttattttcgttctccgtacttacccatttatctttatttaatcgtctctactgcctaggaaaataactattttccaggacgggttatttgttctgcgatcatttaaaatttggagaaaggtcaggattagtgttaatatcagctgcagtttctcaatctctaggaatcctgcagtaaaacaagccccttggtgagctggaagatttgtgcccagtgacaaagagatagtttgtaaaatgctgtgtaattgtaagttaccacaaatgaaaatacatgacagcacaatgtggcccgtagaaaattcccctgagccagcttctgcactttcatcaccgaatctgaacatttgctatgtctgaaggcaaatttatgatggaatgttagtttggattctttccagatgctacctaaatgcagtgtggggtcattgccttgctttgcgatgacagtttctttgaaaatatgcaaagtcataagctcatgttaaggtttttcaagagtctgcctcctactacacaaaggaaagcaagggaaaggaaatgaccctggcaaacagtagggaagggtgtattcaaacatttcattttcaaaaccttcgggttagaataccacttacacatgtattctgagagacagaattcatgaggaactcatctctctttataactggaaacacaccagcttgatatattgctaatccatactaaaatcatattattgggttttttctgaatcaggcctgtattaatggtacagtatttattcagaatggaattctaaaattactaacaaacttgttgaaaatttgaatacctccacaccaacctaaaaatggaccttaagttcctagaacctctgatgttcttttaaattaatggaaaaataatttgtgaactgtatatagagagtgcattcataaatgtgattatgtattttatcacaaatccaaaatgtcaatattagagtctattttgcttatattttaagcaattatacgtttttgcaattcattgatgatgtatcattttcaaactgctttaaatatccattagaaacaaatatttgaagcttttacttaatagtgattaccttgaactgtgcatttctagtttgtaatacgtatttggttggttcgtgcctttagtttgttaaagttacatttgtattatattcaggaaatgcactttttattacttacagctgtggttttaatactgccttgaactattattattctttttacaactcctaaagcttgagggaggaaagaaaaaaaaaacaaaactactaatcagtagtaaatcgaagagaaacattttggcatttcttaagaagaagatggagatattgagtatatcacttcctattcagctgaatagaaagaatgccttcattgacttgcagttctgcagtttaaattattgaaagaacaattcgtttgcatttcctgatgaaagtaaaagcatttttcagagaaacatatgaatttctcatacccagcagacagatggctgacactgcacagccacacaccattcgagtaagttaaagtgagagcatagtagttggactctcctatgaagaacattctgggctggaggcagggaatactccatggttgtttctttttcctacttaagcccattttgtttgtgcttttctgttttgttttgttttcactcttgcactacagtctagagatccaaatgaactgaaaagttcaaagtttaacacatttaaatatgtttacttttagttgtcattctaatcgttattgattagaagcatgactcctgaaggaaagggaaataaatctcaattcatactaacttgcaacaaaacacttttaccatataaataagtatatgatttatttttaacccaaaaaatgtataaaataagtgtgtcctttactgtcaatttatctagaagatctataatatatagactacatatatataatatatacaacatagccaaatgtatgaaaacttgacaatgtataatttggaattcacatgctacctatgtagacaggtatgaaattaagttataattttcatgagacattttcatcactgttgacacagtttcaagcattccatcatgttattttgactctttttcttttttttttctttaaaaatatatttttaactagaccaggccccactataatatcacttaagagagtcagggcaaagtttttgcatttatgaagatgtgttcatgtaagggtgattgtaatggagttcattggtaatagaagcaaaagtacagtaacgaagtattgaaaagaaaattttggagacattggagcatattatatatagcttgtggaaagacataaggctacagatggaatggaacattcctgttttcttgaagaaattcacatacacatagctgacctgactagtacttcagctcttccacagccttctataaaggttctttcttctgcaaagaaaacaaaacaaaacaaaacaaaacaaaaaaaacaaaaaaagcgcaaaaaacaaaaaaacaaaaaaaagcaaagtaaaatttaaaaatacagaaaacaaacaacaaaaaagaattcaaccataaatagtgactattattttcagtgtgtccttcatgtgaaagctattaaggaccaaatatactactgttcataagaagaaattactttctaaacagtaactgaaaatacttagagttaaacttgctgtggattttgtcttggcagttgtcatcttacattatttgtcaaaggaaatgtgtttggcagttaaaaatctttccttagatttagtggtggactttaacctcttaaataaatgttagtatatcagattgtgtccttgaaaaatattttacttgtatgaatcatgacaacgtctaaatctttactattcttctggcaaaagcatcagtaagaaagaaggcgaaaaagagaagtatagcctttatgtcagaaaaacattctttttagctgcttactttctcatgaaaagtaaagatgtttacagtgtatgccaagttttcagtttctgtataacaacaggtagaggttctaatcatattgaaaattgtgttataatggtctgagccatgttgctaggaaacaataggttccaattttgtattcctgctctcctgtgctgaaaagtgactggatactgtacaggttcatgttctctggctgcagttaaatggtcttttgcattttgctctggctttcaggccagaagcatgcatttttctacaagagcatcacaacaacatgctgtaaatatttaaagttaaacattatgtgttgatatttgaaagaaaagtactttgaatatttcatttttaaaaaataaaattgccaatgaaaaa

SEQ ID NO: 190086 - DNA, 12891 bp, Homo sapiens
  Payload ID: 17534
  Gene Symbol: TENM1
  Gene Name: teneurin transmembrane protein 1
  Uniprot ID: Q9UKZ4
  ENST ID: ENST00000422452
  CDS Start-End: 65-8263
gactgcttgcattaaaggacttcctcatcctttttttcatgaaactgagcttgcttaatcagagatggagcaaactgactgcaaaccctaccagcctctaccaaaagtcaagcatgaaatggatctagcttacaccagttcttctgatgagagtgaagatggaagaaaaccaagacagtcatacaactccagggagaccctgcacgagtataaccaggagctgaggatgaattacaatagccagagtagaaagaggaaagaagtagaaaaatctactcaagagatggaattctgtgaaacctctcacactctgtgctctggctaccaaacagacatgcacagcgtttctcggcatggctaccagctagagatgggatctgatgtggacacagagacagaaggtgctgcctcacctgaccatgcactaagaatgtggataaggggaatgaaatcagagcatagttcctgtttgtccagccgggccaactctgcattatccttgactgacactgaccatgaaaggaagtctgatggggaaaatggtttcaaattctctcctgtttgttgtgacatggaggctcaagctgggtctactcaagatgtgcagagcagcccacacaaccagttcaccttcagacccctcccaccgccacctccgcctcctcatgcctgcacctgtgccaggaagccaccccctgcagcggactctcttcagaggagatcaatgactacccgcagccagcccagcccagctgctccagctcccccaaccagcacgcaggattcagtccatctgcataacagctgggtcctgaacagcaacataccattggagaccaggcatttcctgttcaaacatggatctggttcctctgcgatcttcagtgcagccagtcagaactaccctctgacatccaataccgtgtactcgccccctcccaggcctcttcctcgaagcaccttttcccgacctgcctttacctttaacaaaccttacaggtgctgcaactggaagtgcacagcattgagcgccactgcaatcacagtgactttggccttgttactagcctatgtgattgcagtgcatttgttcggcctgacttggcagttgcaaccagttgaaggagagctgtatgcaaatggagttagcaaagggaacagggggaccgagtccatggacactacttactctccaattggaggaaaagtttctgataaatcagagaaaaaagtgtttcagaagggacgggcgatagacactggagaagttgacattggtgcacaggtcatgcagaccattccacctggtttattctggcgtttccagattactatccaccatccaatatatctgaagttcaatatttctttagccaaggactctctgctgggaatttatggcagaagaaacattccacctacacatactcagtttgattttgtaaaactaatggatggcaaacagctggtcaagcaggactccaagggctctgatgatacacagcactcccctcggaacctgatcttaacttcgcttcaggagacaggtttcatagagtatatggatcaaggaccttggtatctggcgttttacaatgatggaaaaaagatggagcaagtattcgtgttaactacagcaattgaaataatggatgactgttcaaccaattgcaatggaaatggagagtgtatctctggccattgtcattgtttcccaggattccttggacctgactgtgctagagattcctgccctgtgctgtgtggtgggaatggagaatacgagaaaggacactgtgtctgccggcatggctggaaggggccagagtgtgacgttccggaagaacaatgcattgatccaacatgctttggccacggcacctgcatcatgggagtctgcatctgtgtgccaggatacaaaggagaaatatgcgaggaagaggactgcctagacccaatgtgttccaaccatggcatctgtgtaaaaggagaatgtcactgttctactggctggggaggagttaactgtgaaacaccacttcctgtatgtcaagagcagtgctcaggacacggaacttttcttctggacgctggagtatgcagctgtgatcccaagtggacaggatctgactgctcaacagagctgtgtaccatggagtgtggtagccatggagtctgctcaagaggaatttgccagtgtgaagaaggctgggtaggaccaacatgtgaggaacgctcctgtcattctcattgtactgagcatggccaatgcaaagatggaaaatgtgagtgtagccctggatgggagggcgaccactgcacaattgctcactacttagatgctgtccgagatggctgcccagggctctgctttggaaatggacgatgtaccctggatcaaaatggttggcactgtgtgtgtcaggtgggttggagtgggacaggctgcaatgttgtcatggaaatgctttgtggagataacttggacaatgatggagatggtttaaccgactgtgtggatcctgactgttgtcaacaaagcaactgttatataagtcctctctgccagggctcaccagatcctcttgacctcattcagcaaagccaaactctcttctctcagcacacttcaagacttttttatgatcgaatcaaattcctcattggcaaggacagtactcatgtcattcctcctgaggtgtcatttgacagcaggcgtgcctgtgtgattcgaggccaagtggtggccatagatggaactcctctagtgggagtgaatgtcagtttcttgcaccacagtgattatgggtttaccatcagccggcaagatggaagctttgacctcgtggccatcggtggcatctctgtcatcttaatcttcgaccgatcccctttcctgcctgagaagagaacactctggttgccttggaatcagtttattgtggtagagaaagtcaccatgcagagagttgtatcagacccgccatcctgcgatatctccaactttatcagcccaaaccctattgtgcttccttcaccgctcacatcatttggagggtcctgtccagagaggggaactattgttcctgagctgcaggttgtacaggaggaaattcccattccctccagctttgtgaggctgagttacctgagcagccgcacccctgggtataaaaccctgctacggatccttctgacacattcaacgattcctgtaggcatgataaaagtacacctcacagtagctgtggaagggcgactcacacagaagtggtttcccgccgcaattaatcttgtctacacatttgcttggaacaagaccgacatctatggacagaaggtttggggcctggcagaggctttggtatctgtgggatatgaatatgaaacgtgccctgactttattctctgggagcaaaggacagtcgttttacaaggttttgagatggatgcttctaacctaggaggctggtctttgaataagcatcacattttgaatcctcaaagtggaatcatacataaagggaatggagaaaatatgttcatttcccagcagcccccagtcatatcaaccataatgggtaatggacaccaaaggagtgtagcctgcaccaactgcaatggcccagcccacaacaacaaactctttgctcctgtcgccttagcttctggccctgatggcagtgtgtatgttggcgacttcaattttgtaaggagaatatttccctcgggaaactccgttagtattttggaattaagaaacagagataccagacatagcacaagtcctgctcacaaatactatctggctatggaccctgtgtctgaatcactctatctatcagacaccaatactcgcaaagtctacaagttgaaatctcttgtggagacgaaagatctgtccaagaattttgaagtggtggcaggaactggtgatcagtgccttccctttgaccagagtcattgtggagatggtgggagagcatcggaagcttcactgaatagccctcgaggcatcacagttgataggcatggatttatttactttgtggatgggactatgattcgcaaaattgatgagaatgctgtgatcacaactgtaatcggctcaaatggtctgacttccacacaaccactgagctgtgactcaggaatggacatcactcaggtgcgattagagtggccaacagaccttgcagtaaatcctatggacaattcattgtatgtcttggataacaacattgtgctgcaaatttctgagaacaggcgtgttcggatcatcgcaggacgccccattcactgccaggtgccaggcatcgatcatttcctggtcagcaaggtagcaattcactccactctagagtcagcgagggccatcagtgtctcccacagcgggctgctcttcatagctgaaacagacgagaggaaagtaaaccgcattcagcaagtaaccaccaatggggagatctacatcatcgctggtgcccccactgactgtgactgcaaaattgatccaaactgtgactgtttttcaggtgatggtggctatgccaaagatgcaaagatgaaagccccttcctccttagcagtgtcgcctgatggaaccctctatgtggcagacctcggaaatgttcgaattcgtaccatcagcaggaaccaagcccacctgaatgacatgaacatttatgagattgcttcacccgctgatcaggaactgtaccagttcactgtaaatggaacccacctacacaccctgaacttgataacaagggactatgtttataacttcacctacaattctgaaggtgacttgggcgcgattaccagcagcaatggcaattcagtgcacattcgccgtgatgcaggcggaatgccgctatggcttgtggtgcctggcggacaagtatactggctgactataagcagcaatggagtcctgaaaagagtgtcagcccaaggctataatctggccttaatgacctatccaggaaacacagggcttctggctaccaaaagtaacgaaaatggatggacaaccgtttatgagtatgaccccgagggacacctgaccaatgcaacgtttcccactggagaggtcagcagcttccacagtgacctggagaagctgacaaaagtggagctagatacttccaaccgtgaaaatgtcctcatgtcaaccaacttgacggcaactagtaccatatatattttaaaacaagaaaatactcaaagtacctatcgggtgaatccagatggttccctgcgtgtcacttttgccagcgggatggagatcggcctcagctcagagccccacatcctggcaggggcagtcaaccctaccctgggcaaatgcaacatctcattgcccggagagcacaatgcaaacctcatcgagtggcggcagaggaaggagcaaaacaaaggcaatgtttcggcttttgaaaggaggctgagggcccacaacagaaacctactctccatagattttgatcatataacccgcacaggaaagatctatgatgaccatcgaaaattcacccttcgaattctttatgaccagactgggcgacccattctgtggtctcctgtaagcagatataatgaagtgaacatcacatattcaccttcgggattggtgacgtttattcaaagaggaacgtggaatgaaaaaatggaatatgaccagagtgggaaaattatttcaagaacttgggctgatgggaaaatttggagctatacctacttagaaaaatctgtgatgcttctcctacacagccagcggcgttacatctttgagtatgaccaaccagattgtctgctctcagtcaccatgcctagcatggtgcgtcacagcttacaaaccatgctttcagtgggctactaccggaacatctacaccccaccggacagtagcacttcttttatccaagactatagtcgagatggccgattgctacagaccctgcatctggggacagggcgcagagtcttatacaagtacaccaagcaagcaaggctttctgaggttctctatgataccactcaggtcacattaacatatgaagagtcttctggagtgattaagacaatacacctgatgcatgacggattcatctgcacaatcagatacaggcaaacaggacctcttattggacgccagattttcagattcagtgaagaaggccttgtgaatgcacggttcgactacagctacaacaatttccgagtcacaagcatgcaagctgtaatcaatgaaacccctttgcctatagatctttaccgatatgttgatgtctctggcagaacagagcagtttggaaaattcagtgtaattaattacgatttaaatcaggtcataactactacagtgatgaaacacaccaaaatcttcagtgccaatggacaagtcattgaagtccaatatgaaatcctaaaggcaattgcctactggatgaccattcaatatgataatgtgggccgcatggtaatatgtgacataagggtaggagtagatgccaatataacaaggtacttctatgaatacgatgctgatgggcaacttcagactgtttctgtaaatgacaaaacccagtggcgttatagttacgatctgaatggaaacatcaacctcttaagccatgggaagagtgctcgtcttactcctctccgatatgacctccgagaccgcatcaccagattaggagaaattcagtataaaatggatgaagatggctttctgaggcagaggggaaatgatatttttgaatataattctaatggcctgctgcagaaagcctacaataaggcttctggctggactgtgcagtattactatgatgggcttgggcgacgtgtcgcgagtaagtccagcctagggcagcaccttcagttcttttatgcagaccttaccaaccccataagagttactcatttgtacaaccacacaagctcggagattacatctctgtattatgatctccaaggtcaccttattgccatggagttaagcagtggtgaagaatattatgtagcctgtgataatacaggtaccccactagctgtgttcagcagccgaggtcaggtcataaaggagatactatacacaccttatggcgatatctatcatgacacttaccctgactttcaggtcattattggttttcatggaggactctatgatttccttactaaattagtgcacctggggcaaagggattatgatgttgttgctggcagatggacaacgcctaatcatcacatatggaaacagttgaacctccttcctaaaccattcaacctctactcctttgaaaataactacccagttggcaaaattcaagatgttgcaaagtataccacagacatcagaagttggttggagctatttggtttccaattacacaatgtactacctggatttcccaaacctgaattagaaaatttagaattaacttacgagcttctacggcttcagacaaaaactcaagagtgggatcctggaaagactatcctgggcattcagtgtgaactccagaaacagctcaggaatttcatttccttggaccaactacctatgactccccgatacaatgatggacggtgccttgaaggagggaagcaaccaaggtttgctgctgtcccttctgtttttgggaaaggtataaaatttgccatcaaggatggcatagtaacagctgatattataggagtagccaatgaagatagcaggcggcttgctgccattctcaataatgcccattacctggaaaacctacattttaccatagaggggagggacactcactacttcattaagcttgggtctctggaggaagacctggtgctcatcggtaacactggggggaggcggattctggagaatggtgtcaatgtcactgtgtcccagatgacttctgtgttgaatgggaggactagacggtttgcagatattcagctccagcatggagccctgtgcttcaacatccggtatgggacaactgtcgaagaggaaaagaatcacgtgttggagattgccagacagcgcgcagtggcccaggcctggactaaggaacaaagaaggctgcaagagggggaagaggggattagggcatggacagaaggggaaaagcagcagcttttgagcactgggcgggtacaaggttacgatgggtattttgttttgtctgttgagcagtatttagaactttctgacagtgccaataatattcactttatgagacagagcgaaataggcaggaggtaacaaaaatatctctgcctttgcgtcaccaaagactgcctgtttttaaaacataaaatggtttattgtattggttttctagatcagaactctgtatatgtaaatatggaggaaaaacatatccaactgcctttcaatgtgacggaagatggtattttaatattgtttgtttaaactctttaagaaatgacagagatttttagttcttgtgtggcagtattcaaaataacacaagtagaactcaaacagctaaaaacagttttcagaaagcaccactttcaatttgccgagccatgcatatgttccaatatccagaaagaacccaaggttctctatctctattgtgagaagcagtttcatccttaactgttggcagaacttacgggctatttgaataggtggtgcaatagtatctgaaacttgcctttcgaaagactgccagccctttgacgttttccagatctgttataggaaacttaaaaacaggtgtaaaatgtcttcagccaccatctcctagagtgaggacccaattgcccttccttcttgattattcctccttgcttgttaaagtaaatgccatattgttgtgctgtgttttggcgtgtggtggctgggttctgtctaccatgcttccctgtgggtgtggtaaccagactgtatagccgctatttgctcgtgtgtacatgataccaaagcagctggccagcgtgacctctctcacacgacctgttttgactcaattttttactaaaagttgttcagctgtattggtatcatgtaaacatagcttttattaacctgggtaggaatttctcatttatatataggatgtgttttggtcatagtttcacattagtgattcagtatctatacactgacccaatggttttgtgcacatgaacggtaatttacttaaaagtatgattctggtacaaaaacaaacaaaggctttagcaggcatacgtgtctgggatgccgatacatacattaactactactgcagaaattcataagagccaaaaccttaaaaaaatagacctggtacttaagtgaaagtactaaagggaagaccagaccaaacatcacagcagttgctgccacattgtttcagcccacttagatttatctttcaaatgtacaattctgtattgaacatctcccagccatcttcaggaaatcgaatcaagtaaatcctttccaaccgaaaacatttcaactaactatagagaggcagactcatttttactaaaataatttatacagttagttattttcgttctccgtacttacccatttatctttatttaatcgtctctactgcctaggaaaataactattttccaggacgggttatttgttctgcgatcatttaaaatttggagaaaggtcaggattagtgttaatatcagctgcagtttctcaatctctaggaatcctgcagtaaaacaagccccttggtgagctggaagatttgtgcccagtgacaaagagatagtttgtaaaatgctgtgtaattgtaagttaccacaaatgaaaatacatgacagcacaatgtggcccgtagaaaattcccctgagccagcttctgcactttcatcaccgaatctgaacatttgctatgtctgaaggcaaatttatgatggaatgttagtttggattctttccagatgctacctaaatgcagtgtggggtcattgccttgctttgcgatgacagtttctttgaaaatatgcaaagtcataagctcatgttaaggtttttcaagagtctgcctcctactacacaaaggaaagcaagggaaaggaaatgaccctggcaaacagtagggaagggtgtattcaaacatttcattttcaaaaccttcgggttagaataccacttacacatgtattctgagagacagaattcatgaggaactcatctctctttataactggaaacacaccagcttgatatattgctaatccatactaaaatcatattattgggttttttctgaatcaggcctgtattaatggtacagtatttattcagaatggaattctaaaattactaacaaacttgttgaaaatttgaatacctccacaccaacctaaaaatggaccttaagttcctagaacctctgatgttcttttaaattaatggaaaaataatttgtgaactgtatatagagagtgcattcataaatgtgattatgtattttatcacaaatccaaaatgtcaatattagagtctattttgcttatattttaagcaattatacgtttttgcaattcattgatgatgtatcattttcaaactgctttaaatatccattagaaacaaatatttgaagcttttacttaatagtgattaccttgaactgtgcatttctagtttgtaatacgtatttggttggttcgtgcctttagtttgttaaagttacatttgtattatattcaggaaatgcactttttattacttacagctgtggttttaatactgccttgaactattattattctttttacaactcctaaagcttgagggaggaaagaaaaaaaaaacaaaactactaatcagtagtaaatcgaagagaaacattttggcatttcttaagaagaagatggagatattgagtatatcacttcctattcagctgaatagaaagaatgccttcattgacttgcagttctgcagtttaaattattgaaagaacaattcgtttgcatttcctgatgaaagtaaaagcatttttcagagaaacatatgaatttctcatacccagcagacagatggctgacactgcacagccacacaccattcgagtaagttaaagtgagagcatagtagttggactctcctatgaagaacattctgggctggaggcagggaatactccatggttgtttctttttcctacttaagcccattttgtttgtgcttttctgttttgttttgttttcactcttgcactacagtctagagatccaaatgaactgaaaagttcaaagtttaacacatttaaatatgtttacttttagttgtcattctaatcgttattgattagaagcatgactcctgaaggaaagggaaataaatctcaattcatactaacttgcaacaaaacacttttaccatataaataagtatatgatttatttttaacccaaaaaatgtataaaataagtgtgtcctttactgtcaatttatctagaagatctataatatatagactacatatatataatatatacaacatagccaaatgtatgaaaacttgacaatgtataatttggaattcacatgctacctatgtagacaggtatgaaattaagttataattttcatgagacattttcatcactgttgacacagtttcaagcattccatcatgttattttgactctttttcttttttttttctttaaaaatatatttttaactagaccaggccccactataatatcacttaagagagtcagggcaaagtttttgcatttatgaagatgtgttcatgtaagggtgattgtaatggagttcattggtaatagaagcaaaagtacagtaacgaagtattgaaaagaaaattttggagacattggagcatattatatatagcttgtggaaagacataaggctacagatggaatggaacattcctgttttcttgaagaaattcacatacacatagctgacctgactagtacttcagctcttccacagccttctataaaggttctttcttctgcaaagaaaacaaaacaaaacaaaacaaaacaaaaaaaacaaaaaaagcgcaaaaaacaaaaaaacaaaaaaaagcaaagtaaaatttaaaaatacagaaaacaaacaacaaaaaagaattcaaccataaatagtgactattattttcagtgtgtccttcatgtgaaagctattaaggaccaaatatactactgttcataagaagaaattactttctaaacagtaactgaaaatacttagagttaaacttgctgtggattttgtcttggcagttgtcatcttacattatttgtcaaaggaaatgtgtttggcagttaaaaatctttccttagatttagtggtggactttaacctcttaaataaatgttagtatatcagattgtgtccttgaaaaatattttacttgtatgaatcatgacaacgtctaaatctttactattcttctggcaaaagcatcagtaagaaagaaggcgaaaaagagaagtatagcctttatgtcagaaaaacattctttttagctgcttactttctcatgaaaagtaaagatgtttacagtgtatgccaagttttcagtttctgtataacaacaggtagaggttctaatcatattgaaaattgtgttataatggtctgagccatgttgctaggaaacaataggttccaattttgtattcctgctctcctgtgctgaaaagtgactggatactgtacaggttcatgttctctggctgcagttaaatggtcttttgcattttgctctggctttcaggccagaagcatgcatttttctacaagagcatcacaacaacatgctgtaaatatttaaagttaaacattatgtgttgatatttgaaagaaaagtactttgaatatttcatttttaaaaaataaaattgccaatg

SEQ ID NO: 190087 - DNA, 9144 bp, Homo sapiens
  Payload ID: 17535
  Gene Symbol: TENM2
  Gene Name: teneurin transmembrane protein 2
  ENST ID: ENST00000403607
  CDS Start-End: 1-7797
ggtcgtcccattccacctacatcctcgcctagtctcctcccatctgctcagctgcctagctcccataatcctccaccagttagctgccagatgccattgctagacagcaacacctcccatcaaatcatggacaccaaccctgatgaggaattctcccccaattcatacctgctcagagcatgctcagggccccagcaagcctccagcagtggccctccgaaccaccacagccagtcgactctgaggccccctctcccaccccctcacaaccacacgctgtcccatcaccactcgtccgccaactccctcaacaggaactcactgaccaatcggcggagtcagatccacgccccggccccagcgcccaatgacctggccaccacaccagagtccgttcagcttcaggacagctgggtgctaaacagcaacgtgccactggagacccggcacttcctcttcaagacctcctcggggagcacacccttgttcagcagctcttccccgggataccctttgacctcaggaacggtttacacgcccccgccccgcctgctgcccaggaatactttctccaggaaggctttcaagctgaagaagccctccaaatactgcagctggaaatgtgctgccctctccgccattgccgcggccctcctcttggctattttgctggcgtatttcatagcaatgcatctgctcggactcaattggcaactccagcctgcagatgggcacacctttaacaatgggataaggaccggcttaccaggaaacgatgatgtggcaacaatgccatctggaggcaaagtgccctggtcgttgaaaaacagcagcatagacagtggtgaagcagaagttggtcggcgggtaacacaagaagtcccaccaggggtgttttggaggtcacaaattcacatcagtcagccccagttcttaaagttcaacatctccctcgggaaggacgctctctttggtgtttacataagaagaggacttccaccatctcatgcccagtatgacttcatggaacgtctggacgggaaggagaagtggagtgtggttgagtctcccagggaacgccggagcatacagaccttggttcagaatgaagccgtgtttgtgcagtacctggatgtgggcctgtggcatctggccttctacaatgatggaaaagacaaagagatggtttccttcaatactgttgtcctagattcagtgcaggactgtccacgtaactgccatgggaatggtgaatgtgtgtccggggtgtgtcactgtttcccaggatttctaggagcagactgtgctaaagctgcctgccctgtcctgtgcagtgggaatggacaatattctaaagggacgtgccagtgctacagcggctggaaaggtgcagagtgcgacgtgcccatgaatcagtgcatcgatccttcctgcgggggccacggctcctgcattgatgggaactgtgtctgctctgctggctacaaaggcgagcactgtgaggaagttgattgcttggatcccacctgctccagccacggagtctgtgtgaatggagaatgcctgtgcagccctggctggggtggtctgaactgtgagctggcgagggtccagtgcccagaccagtgcagtgggcatggcacgtacctgcctgacacgggcctctgcagctgcgatcccaactggatgggtcccgactgctctgttgaagtgtgctcagtagactgtggcactcacggcgtctgcatcgggggagcctgccgctgtgaagagggctggacaggcgcagcgtgtgaccagcgcgtgtgccacccccgctgcattgagcacgggacctgtaaagatggcaaatgtgaatgccgagagggctggaatggtgaacactgcaccattgatggctgccctgacttgtgcaacggtaacgggagatgcacactgggtcagaacagctggcagtgtgtctgccagaccggctggagagggcccggatgcaacgttgccatggaaacttcctgtgctgataacaaggataatgagggagatggcctggtggattgtttggaccctgactgctgcctgcagtcagcctgtcagaacagcctgctctgccgggggtcccgggacccactggacatcattcagcagggccagacggattggcccgcagtgaagtccttctatgaccgtatcaagctcttggcaggcaaggatagcacccacatcattcctggagagaaccctttcaacagcagcttggtttctctcatccgaggccaagtagtaactacagatggaactcccctggtcggtgtgaacgtgtcttttgtcaagtacccaaaatacggctacaccatcacccgccaggatggcacgttcgacctgatcgcaaatggaggtgcttccttgactctacactttgagcgagccccgttcatgagccaggagcgcactgtgtggctgccgtggaacagcttttacgccatggacaccctggtgatgaagaccgaggagaactccatccccagctgtgacctcagtggctttgtccggcctgatccaatcatcatctcctccccactgtccaccttctttagtgctgcccctgggcagaatcccatcgtgcctgagacccaggttcttcatgaagaaatcgagctccctggttccaatgtgaaacttcgctatctgagctctagaactgcagggtacaagtcactgctgaagatcaccatgacccagtccacagtgcccctgaacctcattagggttcacctgatggtggctgtcgaggggcatctcttccagaagtcattccaggcttctcccaacctggcctacaccttcatctgggacaagacagatgcgtatggccaaagggtgtatggactctcagatgctgttgtgtctgtcgggtttgaatatgagacctgtcccagtctaattctctgggagaaaaggacagccctccttcagggattcgagctggacccctccaacctcggtggctggtccctagacaaacaccacatcctcaatgttaaaagtggaatcctacacaaaggcactggggaaaaccagttcctgacccagcagcctgccatcatcaccagcatcatgggcaatggtcgccgccggagcatttcctgtcccagctgcaacggccttgctgaaggcaacaagctgctggccccagtggctctggctgttggaatcgatgggagcctctatgtgggtgacttcaattacatccgacgcatctttccctctcgaaatgtgaccagcatcttggagttacgaaataaagagtttaaacatagcaacaacccagcacacaagtactacttggcagtggaccccgtgtccggctcgctctacgtgtccgacaccaacagcaggagaatctaccgcgtcaagtctctgagtggaaccaaagacctggctgggaattcggaagttgtggcagggacgggagagcagtgtctaccctttgatgaagcccgctgcggggatggagggaaggccatagatgcaaccctgatgagcccgagaggtattgcagtagacaagaatgggctcatgtactttgtcgatgccaccatgatccggaaggttgaccagaatggaatcatctccaccctgctgggctccaatgacctcactgccgtccggccgctgagctgtgattccagcatggatgtagcccaggttcgtctggagtggccaacagaccttgctgtcaatcccatggataactccttgtatgttctagagaacaatgtcatccttcgaatcaccgagaaccaccaagtcagcatcattgcgggacgccccatgcactgccaagttcctggcattgactactcactcagcaaactagccattcactctgccctggagtcagccagtgccattgccatttctcacactggggtcctctacatcactgagacagatgagaagaagattaaccgtctacgccaggtaacaaccaacggggagatctgccttttagctggggcagcctcggactgcgactgcaaaaacgatgtcaattgcaactgctattcaggagatgatgcctacgcgactgatgccatcttgaattccccatcatccttagctgtagctccagatggtaccatttacattgcagaccttggaaatattcggatcagggcggtcagcaagaacaagcctgttcttaatgccttcaaccagtatgaggctgcatcccccggagagcaggagttatatgttttcaacgctgatggcatccaccaatacactgtgagcctggtgacaggggagtacttgtacaatttcacatatagtactgacaatgatgtcactgaattgattgacaataatgggaattccctgaagatccgtcgggacagcagtggcatgccccgtcacctgctcatgcctgacaaccagatcatcaccctcaccgtgggcaccaatggaggcctcaaagtcgtgtccacacagaacctggagcttggtctcatgacctatgatggcaacactgggctcctggccaccaagagcgatgaaacaggatggacgactttctatgactatgaccacgaaggccgcctgaccaacgtgacgcgccccacgggggtggtaaccagtctgcaccgggaaatggagaaatctattaccattgacattgagaactccaaccgtgatgatgacgtcactgtcatcaccaacctctcttcagtagaggcctcctacacagtggtacaagatcaagttcggaacagctaccagctctgtaataatggtaccctgagggtgatgtatgctaatgggatgggtatcagcttccacagcgagccccatgtcctagcgggcaccatcacccccaccattggacgctgcaacatctccctgcctatggagaatggcttaaactccattgagtggcgcctaagaaaggaacagattaaaggcaaagtcaccatctttggcaggaagctccgggtccatggaagaaatctcttgtccattgactatgatcgaaatattcggactgaaaagatctatgatgaccaccggaagttcaccctgaggatcatttatgaccaggtgggccgccccttcctctggctgcccagcagcgggctggcagctgtcaacgtgtcatacttcttcaatgggcgcctggctgggcttcagcgtggggccatgagcgagaggacagacatcgacaagcaaggccgcatcgtgtcccgcatgttcgctgacgggaaagtgtggagctactcctaccttgacaagtccatggtcctcctgcttcagagccaacgtcagtatatatttgagtatgactcctctgaccgcctccttgccgtcaccatgcccagcgtggcccggcacagcatgtccacacacacctccatcggctacatccgtaatatttacaacccgcctgaaagcaatgcttcggtcatctttgactacagtgatgacggccgcatcctgaagacctcctttttgggcaccggacgccaggtgttctacaagtatgggaaactctccaagttatcagagattgtctacgacagtaccgccgtcaccttcgggtatgacgagaccactggtgtcttgaagatggtcaacctccaaagtgggggcttctcctgcaccatcaggtaccggaagattggccccctggtggacaagcagatctacaggttctccgaggaaggcatggtcaatgccaggtttgactacacctatcatgacaacagcttccgcatcgcaagcatcaagcccgtcataagtgagactcccctccccgttgacctctaccgctatgatgagatttctggcaaggtggaacactttggtaagtttggagtcatctattatgacatcaaccagatcatcaccactgccgtgatgaccctcagcaaacacttcgacacccatgggcggatcaaggaggtccagtatgagatgttccggtccctcatgtactggatgacggtgcaatatgacagcatgggcagggtgatcaagagggagctaaaactggggccctatgccaataccacgaagtacacctatgactacgatggggacgggcagctccagagcgtggccgtcaatgaccgcccgacctggcgctacagctatgaccttaatgggaatctccacttactgaacccaggcaacagtgtgcgcctcatgcccttgcgctatgacctccgggatcggataaccagactcggggatgtgcagtacaaaattgacgacgatggctatctgtgccagagagggtctgacatcttcgaatacaattccaagggcctcctaacaagagcctacaacaaggccagcgggtggagtgtccagtaccgctatgatggcgtaggacggcgggcttcctacaagaccaacctgggccaccacctgcagtacttctactctgacctccacaacccgacgcgcatcacccatgtctacaatcactccaactcggagattacctcactgtactacgacctccagggccacctctttgccatggagagcagcagtggggaggagtactatgttgcctctgataacacagggactcctctggctgtgttcagcatcaacggcctcatgatcaaacagctgcagtacacggcctatggggagatttattatgactccaaccccgacttccagatggtcattggcttccatgggggactctatgaccccctgaccaagctggtccacttcactcagcgtgattatgatgtgctggcaggacgatggacctccccagactataccatgtggaaaaacgtgggcaaggagccggccccctttaacctgtatatgttcaagagcaacaatcctctcagcagtgagctagatttgaagaactacgtgacagatgtgaaaagctggcttgtgatgtttggatttcagcttagcaacatcattcctggcttcccgagagccaaaatgtatttcgtgcctcctccctatgaattgtcagagagtcaagcaagtgagaatggacagctcattacaggtgtccaacagacaacagagagacataaccaggccttcatggctctggaaggacaggtcattactaaaaagctccacgccagcatccgagagaaagcaggtcactggtttgccaccaccacgcccatcattggcaaaggcatcatgtttgccatcaaagaagggcgggtgaccacgggcgtgtccagcatcgccagcgaagatagccgcaaggtggcatctgtgctgaacaacgcctactacctggacaagatgcactacagcatcgagggcaaggacacccactactttgtgaagattggctcagccgatggcgacctggtcacactaggcaccaccatcggccgcaaggtgctagagagcggggtgaacgtgaccgtgtcccagcccacgctgctggtcaacggcaggactcgaaggttcacgaacattgagttccagtactccacgctgctgctcagcatccgctatggcctcacccccgacaccctggacgaagagaaggcccgcgtcctggaccaggcgagacagagggccctgggcacggcctgggccaaggagcagcagaaagccagggacgggagagaggggagccgcctgtggactgagggcgagaagcagcagcttctgagcaccgggcgcgtgcaagggtacgagggatattacgtgcttcccgtggagcaatacccagagcttgcagacagtagcagcaacatccagtttttaagacagaatgagatgggaaagaggtaacaaaataatctgctgccattccttgtctgaatggctcagcaggagtaactgttatctcctctcctaaggagatgaagacctaacaggggcactgcggctgggctgctttaggagaccaagtggcaagaaagctcacattttttgagttcaaatgctactgtccaagcgagaagtccctcatcctgaagtagactaaagcccggctgaaaattccgaggaaaacaaaacaaacgaatgaatgaacagacacacacaatgttccaagttcccctaaaatatgacccacttgttctgggtctacgcagaaaagagacgcaaagtgtccaaaaggaacaaaagaacaaaaacgaataagcaaagaagaaaacaaacaaaaacaaaacaaaacaaacacacggaccaataaacaaagaagcgaagataagaaagaaggcctcatatccaattacctcactcattcacatgtgagcgacacgcagacatccgcgagggccagcgtcaccagaccagctgcgggacaaaccactcagactgcttgtaggacaaatacttctgacattttcgtttaagcaaatacaggtgcatttaaaacacgactttgggggtgatttgtgtgtagcgcctggggaggggggataaaagaggaggagtgagcactggaaatactttttaaagaaaaaaaaacatgagggaataaaagaaattcctatcaaaaatcaaagtgaaataataccatccagcacttaactctcaggtcccaactaagtctggcctgagctaatttatttgagcgcagagtgtaaaatttaattcaaaatggtggctataatcactacagataaatttcatactcttttgtctttggagattccattgtggacagtaatacgcagttacagggtgtagtctgtttagattccgtagttcgtgggtatcagtttcggtagaggtgcagcatcgtgacacttttgctaacaggtaccacttctgatcaccctgtacatacatgagccgaaaggcacaatcactgtttcagatttaaaattattagtgtgtttgtttggtccagaaactgagacaatcacatgacagtcaccacgaggagagaaaatttaaaaaataaaaataaaaacaaaaaaaattttaaaaattaaaaaaacaaaaataaagtctaataagaactttggtacaggaacttttttgtaatatacatgtatgaattgttcatcgagtttttatattaattttaatttgctgctaagcaaagactagggacaggcaaagataatttatggcaaagtgtttaaattgtttatacataaataaagtctctaaaactcctgtgga

SEQ ID NO: 190088 - DNA, 8034 bp, Homo sapiens
  Payload ID: 17535
  Gene Symbol: TENM2
  Gene Name: teneurin transmembrane protein 2
  ENST ID: ENST00000520394
  CDS Start-End: 52-7659
tagttagagggaaacacaaaacgaagagcggcccactcccagcttacgccgatggtgagcccacctctcctgatcattagcgttgctggcacaattgaatgcaagccagatcatctcttatggagacccggcagtacctcacctcagtctgtgagttttctccatgggaaggttgtgatggagtctctgggccctccgaaccaccacagccagtcgactctgaggccccctctcccaccccctcacaaccacacgctgtcccatcaccactcgtccgccaactccctcaacaggaactcactgaccaatcggcggagtcagatccacgccccggccccagcgcccaatgacctggccaccacaccagagtccgttcagcttcaggacagctgggtgctaaacagcaacgtgccactggagacccggcacttcctcttcaagacctcctcggggagcacacccttgttcagcagctcttccccgggataccctttgacctcaggaacggtttacacgcccccgccccgcctgctgcccaggaatactttctccaggaaggctttcaagctgaagaagccctccaaatactgcagctggaaatgtgctgccctctccgccattgccgcggccctcctcttggctattttgctggcgtatttcatagtgccctggtcgttgaaaaacagcagcatagacagtggtgaagcagaagttggtcggcgggtaacacaagaagtcccaccaggggtgttttggaggtcacaaattcacatcagtcagccccagttcttaaagttcaacatctccctcgggaaggacgctctctttggtgtttacataagaagaggacttccaccatctcatgcccagtatgacttcatggaacgtctggacgggaaggagaagtggagtgtggttgagtctcccagggaacgccggagcatacagaccttggttcagaatgaagccgtgtttgtgcagtacctggatgtgggcctgtggcatctggccttctacaatgatggaaaagacaaagagatggtttccttcaatactgttgtcctagattcagtgcaggactgtccacgtaactgccatgggaatggtgaatgtgtgtccggggtgtgtcactgtttcccaggatttctaggagcagactgtgctaaagctgcctgccctgtcctgtgcagtgggaatggacaatattctaaagggacgtgccagtgctacagcggctggaaaggtgcagagtgcgacgtgcccatgaatcagtgcatcgatccttcctgcgggggccacggctcctgcattgatgggaactgtgtctgctctgctggctacaaaggcgagcactgtgaggaagttgattgcttggatcccacctgctccagccacggagtctgtgtgaatggagaatgcctgtgcagccctggctggggtggtctgaactgtgagctggcgagggtccagtgcccagaccagtgcagtgggcatggcacgtacctgcctgacacgggcctctgcagctgcgatcccaactggatgggtcccgactgctctgttgaagtgtgctcagtagactgtggcactcacggcgtctgcatcgggggagcctgccgctgtgaagagggctggacaggcgcagcgtgtgaccagcgcgtgtgccacccccgctgcattgagcacgggacctgtaaagatggcaaatgtgaatgccgagagggctggaatggtgaacactgcaccattggtaggcaaacggcaggcaccgaaacagatggctgccctgacttgtgcaacggtaacgggagatgcacactgggtcagaacagctggcagtgtgtctgccagaccggctggagagggcccggatgcaacgttgccatggaaacttcctgtgctgataacaaggataatgagggagatggcctggtggattgtttggaccctgactgctgcctgcagtcagcctgtcagaacagcctgctctgccgggggtcccgggacccactggacatcattcagcagggccagacggattggcccgcagtgaagtccttctatgaccgtatcaagctcttggcaggcaaggatagcacccacatcattcctggagagaaccctttcaacagcagcttggtttctctcatccgaggccaagtagtaactacagatggaactcccctggtcggtgtgaacgtgtcttttgtcaagtacccaaaatacggctacaccatcacccgccaggatggcacgttcgacctgatcgcaaatggaggtgcttccttgactctacactttgagcgagccccgttcatgagccaggagcgcactgtgtggctgccgtggaacagcttttacgccatggacaccctggtgatgaagaccgaggagaactccatccccagctgtgacctcagtggctttgtccggcctgatccaatcatcatctcctccccactgtccaccttctttagtgctgcccctgggcagaatcccatcgtgcctgagacccaggttcttcatgaagaaatcgagctccctggttccaatgtgaaacttcgctatctgagctctagaactgcagggtacaagtcactgctgaagatcaccatgacccagtccacagtgcccctgaacctcattagggttcacctgatggtggctgtcgaggggcatctcttccagaagtcattccaggcttctcccaacctggcctacaccttcatctgggacaagacagatgcgtatggccaaagggtgtatggactctcagatgctgttgtgtctgtcgggtttgaatatgagacctgtcccagtctaattctctgggagaaaaggacagccctccttcagggattcgagctggacccctccaacctcggtggctggtccctagacaaacaccacatcctcaatgttaaaagtggaatcctacacaaaggcactggggaaaaccagttcctgacccagcagcctgccatcatcaccagcatcatgggcaatggtcgccgccggagcatttcctgtcccagctgcaacggccttgctgaaggcaacaagctgctggccccagtggctctggctgttggaatcgatgggagcctctatgtgggtgacttcaattacatccgacgcatctttccctctcgaaatgtgaccagcatcttggagttacgcaacaacccagcacacaagtactacttggcagtggaccccgtgtccggctcgctctacgtgtccgacaccaacagcaggagaatctaccgcgtcaagtctctgagtggaaccaaagacctggctgggaattcggaagttgtggcagggacgggagagcagtgtctaccctttgatgaagcccgctgcggggatggagggaaggccatagatgcaaccctgatgagcccgagaggtattgcagtagacaagaatgggctcatgtactttgtcgatgccaccatgatccggaaggttgaccagaatggaatcatctccaccctgctgggctccaatgacctcactgccgtccggccgctgagctgtgattccagcatggatgtagcccaggttcgtctggagtggccaacagaccttgctgtcaatcccatggataactccttgtatgttctagagaacaatgtcatccttcgaatcaccgagaaccaccaagtcagcatcattgcgggacgccccatgcactgccaagttcctggcattgactactcactcagcaaactagccattcactctgccctggagtcagccagtgccattgccatttctcacactggggtcctctacatcactgagacagatgagaagaagattaaccgtctacgccaggtaacaaccaacggggagatctgccttttagctggggcagcctcggactgcgactgcaaaaacgatgtcaattgcaactgctattcaggagatgatgcctacgcgactgatgccatcttgaattccccatcatccttagctgtagctccagatggtaccatttacattgcagaccttggaaatattcggatcagggcggtcagcaagaacaagcctgttcttaatgccttcaaccagtatgaggctgcatcccccggagagcaggagttatatgttttcaacgctgatggcatccaccaatacactgtgagcctggtgacaggggagtacttgtacaatttcacatatagtactgacaatgatgtcactgaattgattgacaataatgggaattccctgaagatccgtcgggacagcagtggcatgccccgtcacctgctcatgcctgacaaccagatcatcaccctcaccgtgggcaccaatggaggcctcaaagtcgtgtccacacagaacctggagcttggtctcatgacctatgatggcaacactgggctcctggccaccaagagcgatgaaacaggatggacgactttctatgactatgaccacgaaggccgcctgaccaacgtgacgcgccccacgggggtggtaaccagtctgcaccgggaaatggagaaatctattaccattgacattgagaactccaaccgtgatgatgacgtcactgtcatcaccaacctctcttcagtagaggcctcctacacagtggtacaagatcaagttcggaacagctaccagctctgtaataatggtaccctgagggtgatgtatgctaatgggatgggtatcagcttccacagcgagccccatgtcctagcgggcaccatcacccccaccattggacgctgcaacatctccctgcctatggagaatggcttaaactccattgagtggcgcctaagaaaggaacagattaaaggcaaagtcaccatctttggcaggaagctccgggtccatggaagaaatctcttgtccattgactatgatcgaaatattcggactgaaaagatctatgatgaccaccggaagttcaccctgaggatcatttatgaccaggtgggccgccccttcctctggctgcccagcagcgggctggcagctgtcaacgtgtcatacttcttcaatgggcgcctggctgggcttcagcgtggggccatgagcgagaggacagacatcgacaagcaaggccgcatcgtgtcccgcatgttcgctgacgggaaagtgtggagctactcctaccttgacaagtccatggtcctcctgcttcagagccaacgtcagtatatatttgagtatgactcctctgaccgcctccttgccgtcaccatgcccagcgtggcccggcacagcatgtccacacacacctccatcggctacatccgtaatatttacaacccgcctgaaagcaatgcttcggtcatctttgactacagtgatgacggccgcatcctgaagacctcctttttgggcaccggacgccaggtgttctacaagtatgggaaactctccaagttatcagagattgtctacgacagtaccgccgtcaccttcgggtatgacgagaccactggtgtcttgaagatggtcaacctccaaagtgggggcttctcctgcaccatcaggtaccggaagattggccccctggtggacaagcagatctacaggttctccgaggaaggcatggtcaatgccaggtttgactacacctatcatgacaacagcttccgcatcgcaagcatcaagcccgtcataagtgagactcccctccccgttgacctctaccgctatgatgagatttctggcaaggtggaacactttggtaagtttggagtcatctattatgacatcaaccagatcatcaccactgccgtgatgaccctcagcaaacacttcgacacccatgggcggatcaaggaggtccagtatgagatgttccggtccctcatgtactggatgacggtgcaatatgacagcatgggcagggtgatcaagagggagctaaaactggggccctatgccaataccacgaagtacacctatgactacgatggggacgggcagctccagagcgtggccgtcaatgaccgcccgacctggcgctacagctatgaccttaatgggaatctccacttactgaacccaggcaacagtgtgcgcctcatgcccttgcgctatgacctccgggatcggataaccagactcggggatgtgcagtacaaaattgacgacgatggctatctgtgccagagagggtctgacatcttcgaatacaattccaagggcctcctaacaagagcctacaacaaggccagcgggtggagtgtccagtaccgctatgatggcgtaggacggcgggcttcctacaagaccaacctgggccaccacctgcagtacttctactctgacctccacaacccgacgcgcatcacccatgtctacaatcactccaactcggagattacctcactgtactacgacctccagggccacctctttgccatggagagcagcagtggggaggagtactatgttgcctctgataacacagggactcctctggctgtgttcagcatcaacggcctcatgatcaaacagctgcagtacacggcctatggggagatttattatgactccaaccccgacttccagatggtcattggcttccatgggggactctatgaccccctgaccaagctggtccacttcactcagcgtgattatgatgtgctggcaggacgatggacctccccagactataccatgtggaaaaacgtgggcaaggagccggccccctttaacctgtatatgttcaagagcaacaatcctctcagcagtgagctagatttgaagaactacgtgacagatgtgaaaagctggcttgtgatgtttggatttcagcttagcaacatcattcctggcttcccgagagccaaaatgtatttcgtgcctcctccctatgaattgtcagagagtcaagcaagtgagaatggacagctcattacaggtgtccaacagacaacagagagacataaccaggccttcatggctctggaaggacaggtcattactaaaaagctccacgccagcatccgagagaaagcaggtcactggtttgccaccaccacgcccatcattggcaaaggcatcatgtttgccatcaaagaagggcgggtgaccacgggcgtgtccagcatcgccagcgaagatagccgcaaggtggcatctgtgctgaacaacgcctactacctggacaagatgcactacagcatcgagggcaaggacacccactactttgtgaagattggctcagccgatggcgacctggtcacactaggcaccaccatcggccgcaaggtgctagagagcggggtgaacgtgaccgtgtcccagcccacgctgctggtcaacggcaggactcgaaggttcacgaacattgagttccagtactccacgctgctgctcagcatccgctatggcctcacccccgacaccctggacgaagagaaggcccgcgtcctggaccaggcgagacagagggccctgggcacggcctgggccaaggagcagcagaaagccagggacgggagagaggggagccgcctgtggactgagggcgagaagcagcagcttctgagcaccgggcgcgtgcaagggtacgagggatattacgtgcttcccgtggagcaatacccagagcttgcagacagtagcagcaacatccagtttttaagacagaatgagatgggaaagaggtaacaaaataatctgctgccattccttgtctgaatggctcagcaggagtaactgttatctcctctcctaaggagatgaagacctaacaggggcactgcggctgggctgctttaggagaccaagtggcaagaaagctcacattttttgagttcaaatgctactgtccaagcgagaagtccctcatcctgaagtagactaaagcccggctgaaaattccgaggaaaacaaaacaaacgaatgaatgaacagacacacacaatgttccaagttcccctaaaatatgacccacttgttctgggtctacgcagaaaagagacgcaaagtgtccaaaaggaacaaaagaacaaaaacgaataagcaaagaagaaaacaaacaaa

SEQ ID NO: 190089 - DNA, 9427 bp, Homo sapiens
  Payload ID: 17535
  Gene Symbol: TENM2
  Gene Name: teneurin transmembrane protein 2
  ENST ID: ENST00000519204
  CDS Start-End: 119-8080
atgcttttccttcccagctggagaaggcctcagctgtgtcagactgggactgctggtgatttttctgtagttagagggaaacacaaaacgaagagcggcccactcccagcttacgccgatggtgagcccacctctcctgatcattagcgttgctggcacaattgaatgcaagccagatcatctcttatggagacccggcagtacctcacctcagtctgtgagttttctccatgggaaggttgtgatggagtctctgggtcgtcccattccacctacatcctcgcctagtctcctcccatctgctcagctgcctagctcccataatcctccaccagttagctgccagatgccattgctagacagcaacacctcccatcaaatcatggacaccaaccctgatgaggaattctcccccaattcatacctgctcagagcatgctcagggccccagcaagcctccagcagtggccctccgaaccaccacagccagtcgactctgaggccccctctcccaccccctcacaaccacacgctgtcccatcaccactcgtccgccaactccctcaacaggaactcactgaccaatcggcggagtcagatccacgccccggccccagcgcccaatgacctggccaccacaccagagtccgttcagcttcaggacagctgggtgctaaacagcaacgtgccactggagacccggcacttcctcttcaagacctcctcggggagcacacccttgttcagcagctcttccccgggataccctttgacctcaggaacggtttacacgcccccgccccgcctgctgcccaggaatactttctccaggaaggctttcaagctgaagaagccctccaaatactgcagctggaaatgtgctgccctctccgccattgccgcggccctcctcttggctattttgctggcgtatttcatagcaatgcatctgctcggactcaattggcaactccagcctgcagatgggcacacctttaacaatgggataaggaccggcttaccaggaaacgatgatgtggcaacaatgccatctggaggcaaagtgccctggtcgttgaaaaacagcagcatagacagtggtgaagcagaagttggtcggcgggtaacacaagaagtcccaccaggggtgttttggaggtcacaaattcacatcagtcagccccagttcttaaagttcaacatctccctcgggaaggacgctctctttggtgtttacataagaagaggacttccaccatctcatgcccagtatgacttcatggaacgtctggacgggaaggagaagtggagtgtggttgagtctcccagggaacgccggagcatacagaccttggttcagaatgaagccgtgtttgtgcagtacctggatgtgggcctgtggcatctggccttctacaatgatggaaaagacaaagagatggtttccttcaatactgttgtcctagattcagtgcaggactgtccacgtaactgccatgggaatggtgaatgtgtgtccggggtgtgtcactgtttcccaggatttctaggagcagactgtgctaaagctgcctgccctgtcctgtgcagtgggaatggacaatattctaaagggacgtgccagtgctacagcggctggaaaggtgcagagtgcgacgtgcccatgaatcagtgcatcgatccttcctgcgggggccacggctcctgcattgatgggaactgtgtctgctctgctggctacaaaggcgagcactgtgaggaagttgattgcttggatcccacctgctccagccacggagtctgtgtgaatggagaatgcctgtgcagccctggctggggtggtctgaactgtgagctggcgagggtccagtgcccagaccagtgcagtgggcatggcacgtacctgcctgacacgggcctctgcagctgcgatcccaactggatgggtcccgactgctctgttgaagtgtgctcagtagactgtggcactcacggcgtctgcatcgggggagcctgccgctgtgaagagggctggacaggcgcagcgtgtgaccagcgcgtgtgccacccccgctgcattgagcacgggacctgtaaagatggcaaatgtgaatgccgagagggctggaatggtgaacactgcaccattggtaggcaaacggcaggcaccgaaacagatggctgccctgacttgtgcaacggtaacgggagatgcacactgggtcagaacagctggcagtgtgtctgccagaccggctggagagggcccggatgcaacgttgccatggaaacttcctgtgctgataacaaggataatgagggagatggcctggtggattgtttggaccctgactgctgcctgcagtcagcctgtcagaacagcctgctctgccgggggtcccgggacccactggacatcattcagcagggccagacggattggcccgcagtgaagtccttctatgaccgtatcaagctcttggcaggcaaggatagcacccacatcattcctggagagaaccctttcaacagcagcttggtttctctcatccgaggccaagtagtaactacagatggaactcccctggtcggtgtgaacgtgtcttttgtcaagtacccaaaatacggctacaccatcacccgccaggatggcacgttcgacctgatcgcaaatggaggtgcttccttgactctacactttgagcgagccccgttcatgagccaggagcgcactgtgtggctgccgtggaacagcttttacgccatggacaccctggtgatgaagaccgaggagaactccatccccagctgtgacctcagtggctttgtccggcctgatccaatcatcatctcctccccactgtccaccttctttagtgctgcccctgggcagaatcccatcgtgcctgagacccaggttcttcatgaagaaatcgagctccctggttccaatgtgaaacttcgctatctgagctctagaactgcagggtacaagtcactgctgaagatcaccatgacccagtccacagtgcccctgaacctcattagggttcacctgatggtggctgtcgaggggcatctcttccagaagtcattccaggcttctcccaacctggcctacaccttcatctgggacaagacagatgcgtatggccaaagggtgtatggactctcagatgctgttgtgtctgtcgggtttgaatatgagacctgtcccagtctaattctctgggagaaaaggacagccctccttcagggattcgagctggacccctccaacctcggtggctggtccctagacaaacaccacatcctcaatgttaaaagtggaatcctacacaaaggcactggggaaaaccagttcctgacccagcagcctgccatcatcaccagcatcatgggcaatggtcgccgccggagcatttcctgtcccagctgcaacggccttgctgaaggcaacaagctgctggccccagtggctctggctgttggaatcgatgggagcctctatgtgggtgacttcaattacatccgacgcatctttccctctcgaaatgtgaccagcatcttggagttacgaaataaagagtttaaacatagcaacaacccagcacacaagtactacttggcagtggaccccgtgtccggctcgctctacgtgtccgacaccaacagcaggagaatctaccgcgtcaagtctctgagtggaaccaaagacctggctgggaattcggaagttgtggcagggacgggagagcagtgtctaccctttgatgaagcccgctgcggggatggagggaaggccatagatgcaaccctgatgagcccgagaggtattgcagtagacaagaatgggctcatgtactttgtcgatgccaccatgatccggaaggttgaccagaatggaatcatctccaccctgctgggctccaatgacctcactgccgtccggccgctgagctgtgattccagcatggatgtagcccaggttcgtctggagtggccaacagaccttgctgtcaatcccatggataactccttgtatgttctagagaacaatgtcatccttcgaatcaccgagaaccaccaagtcagcatcattgcgggacgccccatgcactgccaagttcctggcattgactactcactcagcaaactagccattcactctgccctggagtcagccagtgccattgccatttctcacactggggtcctctacatcactgagacagatgagaagaagattaaccgtctacgccaggtaacaaccaacggggagatctgccttttagctggggcagcctcggactgcgactgcaaaaacgatgtcaattgcaactgctattcaggagatgatgcctacgcgactgatgccatcttgaattccccatcatccttagctgtagctccagatggtaccatttacattgcagaccttggaaatattcggatcagggcggtcagcaagaacaagcctgttcttaatgccttcaaccagtatgaggctgcatcccccggagagcaggagttatatgttttcaacgctgatggcatccaccaatacactgtgagcctggtgacaggggagtacttgtacaatttcacatatagtactgacaatgatgtcactgaattgattgacaataatgggaattccctgaagatccgtcgggacagcagtggcatgccccgtcacctgctcatgcctgacaaccagatcatcaccctcaccgtgggcaccaatggaggcctcaaagtcgtgtccacacagaacctggagcttggtctcatgacctatgatggcaacactgggctcctggccaccaagagcgatgaaacaggatggacgactttctatgactatgaccacgaaggccgcctgaccaacgtgacgcgccccacgggggtggtaaccagtctgcaccgggaaatggagaaatctattaccattgacattgagaactccaaccgtgatgatgacgtcactgtcatcaccaacctctcttcagtagaggcctcctacacagtggtacaagatcaagttcggaacagctaccagctctgtaataatggtaccctgagggtgatgtatgctaatgggatgggtatcagcttccacagcgagccccatgtcctagcgggcaccatcacccccaccattggacgctgcaacatctccctgcctatggagaatggcttaaactccattgagtggcgcctaagaaaggaacagattaaaggcaaagtcaccatctttggcaggaagctccgggtccatggaagaaatctcttgtccattgactatgatcgaaatattcggactgaaaagatctatgatgaccaccggaagttcaccctgaggatcatttatgaccaggtgggccgccccttcctctggctgcccagcagcgggctggcagctgtcaacgtgtcatacttcttcaatgggcgcctggctgggcttcagcgtggggccatgagcgagaggacagacatcgacaagcaaggccgcatcgtgtcccgcatgttcgctgacgggaaagtgtggagctactcctaccttgacaagtccatggtcctcctgcttcagagccaacgtcagtatatatttgagtatgactcctctgaccgcctccttgccgtcaccatgcccagcgtggcccggcacagcatgtccacacacacctccatcggctacatccgtaatatttacaacccgcctgaaagcaatgcttcggtcatctttgactacagtgatgacggccgcatcctgaagacctcctttttgggcaccggacgccaggtgttctacaagtatgggaaactctccaagttatcagagattgtctacgacagtaccgccgtcaccttcgggtatgacgagaccactggtgtcttgaagatggtcaacctccaaagtgggggcttctcctgcaccatcaggtaccggaagattggccccctggtggacaagcagatctacaggttctccgaggaaggcatggtcaatgccaggtttgactacacctatcatgacaacagcttccgcatcgcaagcatcaagcccgtcataagtgagactcccctccccgttgacctctaccgctatgatgagatttctggcaaggtggaacactttggtaagtttggagtcatctattatgacatcaaccagatcatcaccactgccgtgatgaccctcagcaaacacttcgacacccatgggcggatcaaggaggtccagtatgagatgttccggtccctcatgtactggatgacggtgcaatatgacagcatgggcagggtgatcaagagggagctaaaactggggccctatgccaataccacgaagtacacctatgactacgatggggacgggcagctccagagcgtggccgtcaatgaccgcccgacctggcgctacagctatgaccttaatgggaatctccacttactgaacccaggcaacagtgtgcgcctcatgcccttgcgctatgacctccgggatcggataaccagactcggggatgtgcagtacaaaattgacgacgatggctatctgtgccagagagggtctgacatcttcgaatacaattccaagggcctcctaacaagagcctacaacaaggccagcgggtggagtgtccagtaccgctatgatggcgtaggacggcgggcttcctacaagaccaacctgggccaccacctgcagtacttctactctgacctccacaacccgacgcgcatcacccatgtctacaatcactccaactcggagattacctcactgtactacgacctccagggccacctctttgccatggagagcagcagtggggaggagtactatgttgcctctgataacacagggactcctctggctgtgttcagcatcaacggcctcatgatcaaacagctgcagtacacggcctatggggagatttattatgactccaaccccgacttccagatggtcattggcttccatgggggactctatgaccccctgaccaagctggtccacttcactcagcgtgattatgatgtgctggcaggacgatggacctccccagactataccatgtggaaaaacgtgggcaaggagccggccccctttaacctgtatatgttcaagagcaacaatcctctcagcagtgagctagatttgaagaactacgtgacagatgtgaaaagctggcttgtgatgtttggatttcagcttagcaacatcattcctggcttcccgagagccaaaatgtatttcgtgcctcctccctatgaattgtcagagagtcaagcaagtgagaatggacagctcattacaggtgtccaacagacaacagagagacataaccaggccttcatggctctggaaggacaggtcattactaaaaagctccacgccagcatccgagagaaagcaggtcactggtttgccaccaccacgcccatcattggcaaaggcatcatgtttgccatcaaagaagggcgggtgaccacgggcgtgtccagcatcgccagcgaagatagccgcaaggtggcatctgtgctgaacaacgcctactacctggacaagatgcactacagcatcgagggcaaggacacccactactttgtgaagattggctcagccgatggcgacctggtcacactaggcaccaccatcggccgcaaggtgctagagagcggggtgaacgtgaccgtgtcccagcccacgctgctggtcaacggcaggactcgaaggttcacgaacattgagttccagtactccacgctgctgctcagcatccgctatggcctcacccccgacaccctggacgaagagaaggcccgcgtcctggaccaggcgagacagagggccctgggcacggcctgggccaaggagcagcagaaagccagggacgggagagaggggagccgcctgtggactgagggcgagaagcagcagcttctgagcaccgggcgcgtgcaagggtacgagggatattacgtgcttcccgtggagcaatacccagagcttgcagacagtagcagcaacatccagtttttaagacagaatgagatgggaaagaggtaacaaaataatctgctgccattccttgtctgaatggctcagcaggagtaactgttatctcctctcctaaggagatgaagacctaacaggggcactgcggctgggctgctttaggagaccaagtggcaagaaagctcacattttttgagttcaaatgctactgtccaagcgagaagtccctcatcctgaagtagactaaagcccggctgaaaattccgaggaaaacaaaacaaacgaatgaatgaacagacacacacaatgttccaagttcccctaaaatatgacccacttgttctgggtctacgcagaaaagagacgcaaagtgtccaaaaggaacaaaagaacaaaaacgaataagcaaagaagaaaacaaacaaaaacaaaacaaaacaaacacacggaccaataaacaaagaagcgaagataagaaagaaggcctcatatccaattacctcactcattcacatgtgagcgacacgcagacatccgcgagggccagcgtcaccagaccagctgcgggacaaaccactcagactgcttgtaggacaaatacttctgacattttcgtttaagcaaatacaggtgcatttaaaacacgactttgggggtgatttgtgtgtagcgcctggggaggggggataaaagaggaggagtgagcactggaaatactttttaaagaaaaaaaaacatgagggaataaaagaaattcctatcaaaaatcaaagtgaaataataccatccagcacttaactctcaggtcccaactaagtctggcctgagctaatttatttgagcgcagagtgtaaaatttaattcaaaatggtggctataatcactacagataaatttcatactcttttgtctttggagattccattgtggacagtaatacgcagttacagggtgtagtctgtttagattccgtagttcgtgggtatcagtttcggtagaggtgcagcatcgtgacacttttgctaacaggtaccacttctgatcaccctgtacatacatgagccgaaaggcacaatcactgtttcagatttaaaattattagtgtgtttgtttggtccagaaactgagacaatcacatgacagtcaccacgaggagagaaaatttaaaaaataaaaataaaaacaaaaaaaattttaaaaattaaaaaaacaaaaataaagtctaataagaactttggtacaggaacttttttgtaatatacatgtatgaattgttcatcgagtttttatattaattttaatttgctgctaagcaaagactagggacaggcaaagataatttatggcaaagtgtttaaattgtttatacataaataaagtctctaaaactcctgtgga

SEQ ID NO: 190090 - DNA, 8550 bp, Homo sapiens
  Payload ID: 17535
  Gene Symbol: TENM2
  Gene Name: teneurin transmembrane protein 2
  Uniprot ID: Q9NT68
  ENST ID: ENST00000518659
  CDS Start-End: 40-8364
cttttctgaaaacatcagcattctgccatatctggaataatggatgtaaaggaccggcgacaccgctctttgaccagaggacgctgtggcaaagagtgtcgctacacaagctcctctctggacagtgaggactgccgcgtgcccacacagaaatcctacagctccagtgagactctgaaggcctatgaccatgacagcaggatgcactatggaaaccgagtcacagacctcatccaccgggagtcagatgagtttcctagacaaggaaccaacttcacccttgccgaactgggcatctgtgagccctccccacaccgaagcggctactgctccgacatggggatccttcaccagggctactcccttagcacagggtctgacgccgactccgacaccgagggagggatgtctccagaacacgccatcagactgtggggcagagggataaaatccaggcgcagttccggcctgtccagtcgtgaaaactcggcccttaccctgactgactctgacaacgaaaacaaatcagatgatgagaacggtcgtcccattccacctacatcctcgcctagtctcctcccatctgctcagctgcctagctcccataatcctccaccagttagctgccagatgccattgctagacagcaacacctcccatcaaatcatggacaccaaccctgatgaggaattctcccccaattcatacctgctcagagcatgctcagggccccagcaagcctccagcagtggccctccgaaccaccacagccagtcgactctgaggccccctctcccaccccctcacaaccacacgctgtcccatcaccactcgtccgccaactccctcaacaggaactcactgaccaatcggcggagtcagatccacgccccggccccagcgcccaatgacctggccaccacaccagagtccgttcagcttcaggacagctgggtgctaaacagcaacgtgccactggagacccggcacttcctcttcaagacctcctcggggagcacacccttgttcagcagctcttccccgggataccctttgacctcaggaacggtttacacgcccccgccccgcctgctgcccaggaatactttctccaggaaggctttcaagctgaagaagccctccaaatactgcagctggaaatgtgctgccctctccgccattgccgcggccctcctcttggctattttgctggcgtatttcatagcaatgcatctgctcggactcaattggcaactccagcctgcagatgggcacacctttaacaatgggataaggaccggcttaccaggaaacgatgatgtggcaacaatgccatctggaggcaaagtgccctggtcgttgaaaaacagcagcatagacagtggtgaagcagaagttggtcggcgggtaacacaagaagtcccaccaggggtgttttggaggtcacaaattcacatcagtcagccccagttcttaaagttcaacatctccctcgggaaggacgctctctttggtgtttacataagaagaggacttccaccatctcatgcccagtatgacttcatggaacgtctggacgggaaggagaagtggagtgtggttgagtctcccagggaacgccggagcatacagaccttggttcagaatgaagccgtgtttgtgcagtacctggatgtgggcctgtggcatctggccttctacaatgatggaaaagacaaagagatggtttccttcaatactgttgtcctagattcagtgcaggactgtccacgtaactgccatgggaatggtgaatgtgtgtccggggtgtgtcactgtttcccaggatttctaggagcagactgtgctaaagctgcctgccctgtcctgtgcagtgggaatggacaatattctaaagggacgtgccagtgctacagcggctggaaaggtgcagagtgcgacgtgcccatgaatcagtgcatcgatccttcctgcgggggccacggctcctgcattgatgggaactgtgtctgctctgctggctacaaaggcgagcactgtgaggaagttgattgcttggatcccacctgctccagccacggagtctgtgtgaatggagaatgcctgtgcagccctggctggggtggtctgaactgtgagctggcgagggtccagtgcccagaccagtgcagtgggcatggcacgtacctgcctgacacgggcctctgcagctgcgatcccaactggatgggtcccgactgctctgttgaagtgtgctcagtagactgtggcactcacggcgtctgcatcgggggagcctgccgctgtgaagagggctggacaggcgcagcgtgtgaccagcgcgtgtgccacccccgctgcattgagcacgggacctgtaaagatggcaaatgtgaatgccgagagggctggaatggtgaacactgcaccattggtaggcaaacggcaggcaccgaaacagatggctgccctgacttgtgcaacggtaacgggagatgcacactgggtcagaacagctggcagtgtgtctgccagaccggctggagagggcccggatgcaacgttgccatggaaacttcctgtgctgataacaaggataatgagggagatggcctggtggattgtttggaccctgactgctgcctgcagtcagcctgtcagaacagcctgctctgccgggggtcccgggacccactggacatcattcagcagggccagacggattggcccgcagtgaagtccttctatgaccgtatcaagctcttggcaggcaaggatagcacccacatcattcctggagagaaccctttcaacagcagcttggtttctctcatccgaggccaagtagtaactacagatggaactcccctggtcggtgtgaacgtgtcttttgtcaagtacccaaaatacggctacaccatcacccgccaggatggcacgttcgacctgatcgcaaatggaggtgcttccttgactctacactttgagcgagccccgttcatgagccaggagcgcactgtgtggctgccgtggaacagcttttacgccatggacaccctggtgatgaagaccgaggagaactccatccccagctgtgacctcagtggctttgtccggcctgatccaatcatcatctcctccccactgtccaccttctttagtgctgcccctgggcagaatcccatcgtgcctgagacccaggttcttcatgaagaaatcgagctccctggttccaatgtgaaacttcgctatctgagctctagaactgcagggtacaagtcactgctgaagatcaccatgacccagtccacagtgcccctgaacctcattagggttcacctgatggtggctgtcgaggggcatctcttccagaagtcattccaggcttctcccaacctggcctacaccttcatctgggacaagacagatgcgtatggccaaagggtgtatggactctcagatgctgttgtgtctgtcgggtttgaatatgagacctgtcccagtctaattctctgggagaaaaggacagccctccttcagggattcgagctggacccctccaacctcggtggctggtccctagacaaacaccacatcctcaatgttaaaagtggaatcctacacaaaggcactggggaaaaccagttcctgacccagcagcctgccatcatcaccagcatcatgggcaatggtcgccgccggagcatttcctgtcccagctgcaacggccttgctgaaggcaacaagctgctggccccagtggctctggctgttggaatcgatgggagcctctatgtgggtgacttcaattacatccgacgcatctttccctctcgaaatgtgaccagcatcttggagttacgaaataaagagtttaaacatagcaacaacccagcacacaagtactacttggcagtggaccccgtgtccggctcgctctacgtgtccgacaccaacagcaggagaatctaccgcgtcaagtctctgagtggaaccaaagacctggctgggaattcggaagttgtggcagggacgggagagcagtgtctaccctttgatgaagcccgctgcggggatggagggaaggccatagatgcaaccctgatgagcccgagaggtattgcagtagacaagaatgggctcatgtactttgtcgatgccaccatgatccggaaggttgaccagaatggaatcatctccaccctgctgggctccaatgacctcactgccgtccggccgctgagctgtgattccagcatggatgtagcccaggttcgtctggagtggccaacagaccttgctgtcaatcccatggataactccttgtatgttctagagaacaatgtcatccttcgaatcaccgagaaccaccaagtcagcatcattgcgggacgccccatgcactgccaagttcctggcattgactactcactcagcaaactagccattcactctgccctggagtcagccagtgccattgccatttctcacactggggtcctctacatcactgagacagatgagaagaagattaaccgtctacgccaggtaacaaccaacggggagatctgccttttagctggggcagcctcggactgcgactgcaaaaacgatgtcaattgcaactgctattcaggagatgatgcctacgcgactgatgccatcttgaattccccatcatccttagctgtagctccagatggtaccatttacattgcagaccttggaaatattcggatcagggcggtcagcaagaacaagcctgttcttaatgccttcaaccagtatgaggctgcatcccccggagagcaggagttatatgttttcaacgctgatggcatccaccaatacactgtgagcctggtgacaggggagtacttgtacaatttcacatatagtactgacaatgatgtcactgaattgattgacaataatgggaattccctgaagatccgtcgggacagcagtggcatgccccgtcacctgctcatgcctgacaaccagatcatcaccctcaccgtgggcaccaatggaggcctcaaagtcgtgtccacacagaacctggagcttggtctcatgacctatgatggcaacactgggctcctggccaccaagagcgatgaaacaggatggacgactttctatgactatgaccacgaaggccgcctgaccaacgtgacgcgccccacgggggtggtaaccagtctgcaccgggaaatggagaaatctattaccattgacattgagaactccaaccgtgatgatgacgtcactgtcatcaccaacctctcttcagtagaggcctcctacacagtggtacaagatcaagttcggaacagctaccagctctgtaataatggtaccctgagggtgatgtatgctaatgggatgggtatcagcttccacagcgagccccatgtcctagcgggcaccatcacccccaccattggacgctgcaacatctccctgcctatggagaatggcttaaactccattgagtggcgcctaagaaaggaacagattaaaggcaaagtcaccatctttggcaggaagctccgggtccatggaagaaatctcttgtccattgactatgatcgaaatattcggactgaaaagatctatgatgaccaccggaagttcaccctgaggatcatttatgaccaggtgggccgccccttcctctggctgcccagcagcgggctggcagctgtcaacgtgtcatacttcttcaatgggcgcctggctgggcttcagcgtggggccatgagcgagaggacagacatcgacaagcaaggccgcatcgtgtcccgcatgttcgctgacgggaaagtgtggagctactcctaccttgacaagtccatggtcctcctgcttcagagccaacgtcagtatatatttgagtatgactcctctgaccgcctccttgccgtcaccatgcccagcgtggcccggcacagcatgtccacacacacctccatcggctacatccgtaatatttacaacccgcctgaaagcaatgcttcggtcatctttgactacagtgatgacggccgcatcctgaagacctcctttttgggcaccggacgccaggtgttctacaagtatgggaaactctccaagttatcagagattgtctacgacagtaccgccgtcaccttcgggtatgacgagaccactggtgtcttgaagatggtcaacctccaaagtgggggcttctcctgcaccatcaggtaccggaagattggccccctggtggacaagcagatctacaggttctccgaggaaggcatggtcaatgccaggtttgactacacctatcatgacaacagcttccgcatcgcaagcatcaagcccgtcataagtgagactcccctccccgttgacctctaccgctatgatgagatttctggcaaggtggaacactttggtaagtttggagtcatctattatgacatcaaccagatcatcaccactgccgtgatgaccctcagcaaacacttcgacacccatgggcggatcaaggaggtccagtatgagatgttccggtccctcatgtactggatgacggtgcaatatgacagcatgggcagggtgatcaagagggagctaaaactggggccctatgccaataccacgaagtacacctatgactacgatggggacgggcagctccagagcgtggccgtcaatgaccgcccgacctggcgctacagctatgaccttaatgggaatctccacttactgaacccaggcaacagtgtgcgcctcatgcccttgcgctatgacctccgggatcggataaccagactcggggatgtgcagtacaaaattgacgacgatggctatctgtgccagagagggtctgacatcttcgaatacaattccaagggcctcctaacaagagcctacaacaaggccagcgggtggagtgtccagtaccgctatgatggcgtaggacggcgggcttcctacaagaccaacctgggccaccacctgcagtacttctactctgacctccacaacccgacgcgcatcacccatgtctacaatcactccaactcggagattacctcactgtactacgacctccagggccacctctttgccatggagagcagcagtggggaggagtactatgttgcctctgataacacagggactcctctggctgtgttcagcatcaacggcctcatgatcaaacagctgcagtacacggcctatggggagatttattatgactccaaccccgacttccagatggtcattggcttccatgggggactctatgaccccctgaccaagctggtccacttcactcagcgtgattatgatgtgctggcaggacgatggacctccccagactataccatgtggaaaaacgtgggcaaggagccggccccctttaacctgtatatgttcaagagcaacaatcctctcagcagtgagctagatttgaagaactacgtgacagatgtgaaaagctggcttgtgatgtttggatttcagcttagcaacatcattcctggcttcccgagagccaaaatgtatttcgtgcctcctccctatgaattgtcagagagtcaagcaagtgagaatggacagctcattacaggtgtccaacagacaacagagagacataaccaggccttcatggctctggaaggacaggtcattactaaaaagctccacgccagcatccgagagaaagcaggtcactggtttgccaccaccacgcccatcattggcaaaggcatcatgtttgccatcaaagaagggcgggtgaccacgggcgtgtccagcatcgccagcgaagatagccgcaaggtggcatctgtgctgaacaacgcctactacctggacaagatgcactacagcatcgagggcaaggacacccactactttgtgaagattggctcagccgatggcgacctggtcacactaggcaccaccatcggccgcaaggtgctagagagcggggtgaacgtgaccgtgtcccagcccacgctgctggtcaacggcaggactcgaaggttcacgaacattgagttccagtactccacgctgctgctcagcatccgctatggcctcacccccgacaccctggacgaagagaaggcccgcgtcctggaccaggcgagacagagggccctgggcacggcctgggccaaggagcagcagaaagccagggacgggagagaggggagccgcctgtggactgagggcgagaagcagcagcttctgagcaccgggcgcgtgcaagggtacgagggatattacgtgcttcccgtggagcaatacccagagcttgcagacagtagcagcaacatccagtttttaagacagaatgagatgggaaagaggtaacaaaataatctgctgccattccttgtctgaatggctcagcaggagtaactgttatctcctctcctaaggagatgaagacctaacaggggcactgcggctgggctgctttaggagaccaagtggcaagaaagctcacattttttgagttcaaatgctactgtccaagcgagaagtccctcatcctga

SEQ ID NO: 190091 - DNA, 8173 bp, Homo sapiens
  Payload ID: 17535
  Gene Symbol: TENM2
  Gene Name: teneurin transmembrane protein 2
  ENST ID: ENST00000545108
  CDS Start-End: 1-7824
ggtcgtcccattccacctacatcctcgcctagtctcctcccatctgctcagctgcctagctcccataatcctccaccagttagctgccagatgccattgctagacagcaacacctcccatcaaatcatggacaccaaccctgatgaggaattctcccccaattcatacctgctcagagcatgctcagggccccagcaagcctccagcagtggccctccgaaccaccacagccagtcgactctgaggccccctctcccaccccctcacaaccacacgctgtcccatcaccactcgtccgccaactccctcaacaggaactcactgaccaatcggcggagtcagatccacgccccggccccagcgcccaatgacctggccaccacaccagagtccgttcagcttcaggacagctgggtgctaaacagcaacgtgccactggagacccggcacttcctcttcaagacctcctcggggagcacacccttgttcagcagctcttccccgggataccctttgacctcaggaacggtttacacgcccccgccccgcctgctgcccaggaatactttctccaggaaggctttcaagctgaagaagccctccaaatactgcagctggaaatgtgctgccctctccgccattgccgcggccctcctcttggctattttgctggcgtatttcatagcaatgcatctgctcggactcaattggcaactccagcctgcagatgggcacacctttaacaatgggataaggaccggcttaccaggaaacgatgatgtggcaacaatgccatctggaggcaaagtgccctggtcgttgaaaaacagcagcatagacagtggtgaagcagaagttggtcggcgggtaacacaagaagtcccaccaggggtgttttggaggtcacaaattcacatcagtcagccccagttcttaaagttcaacatctccctcgggaaggacgctctctttggtgtttacataagaagaggacttccaccatctcatgcccagtatgacttcatggaacgtctggacgggaaggagaagtggagtgtggttgagtctcccagggaacgccggagcatacagaccttggttcagaatgaagccgtgtttgtgcagtacctggatgtgggcctgtggcatctggccttctacaatgatggaaaagacaaagagatggtttccttcaatactgttgtcctagattcagtgcaggactgtccacgtaactgccatgggaatggtgaatgtgtgtccggggtgtgtcactgtttcccaggatttctaggagcagactgtgctaaagctgcctgccctgtcctgtgcagtgggaatggacaatattctaaagggacgtgccagtgctacagcggctggaaaggtgcagagtgcgacgtgcccatgaatcagtgcatcgatccttcctgcgggggccacggctcctgcattgatgggaactgtgtctgctctgctggctacaaaggcgagcactgtgaggaagttgattgcttggatcccacctgctccagccacggagtctgtgtgaatggagaatgcctgtgcagccctggctggggtggtctgaactgtgagctggcgagggtccagtgcccagaccagtgcagtgggcatggcacgtacctgcctgacacgggcctctgcagctgcgatcccaactggatgggtcccgactgctctgttgaagtgtgctcagtagactgtggcactcacggcgtctgcatcgggggagcctgccgctgtgaagagggctggacaggcgcagcgtgtgaccagcgcgtgtgccacccccgctgcattgagcacgggacctgtaaagatggcaaatgtgaatgccgagagggctggaatggtgaacactgcaccattgcaaggcagactggaggcagggagaccaatggctgccctgacttgtgcaacggtaacgggagatgcacactgggtcagaacagctggcagtgtgtctgccagaccggctggagagggcccggatgcaacgttgccatggaaacttcctgtgctgataacaaggataatgagggagatggcctggtggattgtttggaccctgactgctgcctgcagtcagcctgtcagaacagcctgctctgccgggggtcccgggacccactggacatcattcagcagggccagacggattggcccgcagtgaagtccttctatgaccgtatcaagctcttggcaggcaaggatagcacccacatcattcctggagagaaccctttcaacagcagcttggtttctctcatccgaggccaagtagtaactacagatggaactcccctggtcggtgtgaacgtgtcttttgtcaagtacccaaaatacggctacaccatcacccgccaggatggcacgttcgacctgatcgcaaatggaggtgcttccttgactctacactttgagcgagccccgttcatgagccaggagcgcactgtgtggctgccgtggaacagcttttacgccatggacaccctggtgatgaagaccgaggagaactccatccccagctgtgacctcagtggctttgtccggcctgatccaatcatcatctcctccccactgtccaccttctttagtgctgcccctgggcagaatcccatcgtgcctgagacccaggttcttcatgaagaaatcgagctccctggttccaatgtgaaacttcgctatctgagctctagaactgcagggtacaagtcactgctgaagatcaccatgacccagtccacagtgcccctgaacctcattagggttcacctgatggtggctgtcgaggggcatctcttccagaagtcattccaggcttctcccaacctggcctacaccttcatctgggacaagacagatgcgtatggccaaagggtgtatggactctcagatgctgttgtgtctgtcgggtttgaatatgagacctgtcccagtctaattctctgggagaaaaggacagccctccttcagggattcgagctggacccctccaacctcggtggctggtccctagacaaacaccacatcctcaatgttaaaagtggaatcctacacaaaggcactggggaaaaccagttcctgacccagcagcctgccatcatcaccagcatcatgggcaatggtcgccgccggagcatttcctgtcccagctgcaacggccttgctgaaggcaacaagctgctggccccagtggctctggctgttggaatcgatgggagcctctatgtgggtgacttcaattacatccgacgcatctttccctctcgaaatgtgaccagcatcttggagttacgaaataaagagtttaaacatagcaacaacccagcacacaagtactacttggcagtggaccccgtgtccggctcgctctacgtgtccgacaccaacagcaggagaatctaccgcgtcaagtctctgagtggaaccaaagacctggctgggaattcggaagttgtggcagggacgggagagcagtgtctaccctttgatgaagcccgctgcggggatggagggaaggccatagatgcaaccctgatgagcccgagaggtattgcagtagacaagaatgggctcatgtactttgtcgatgccaccatgatccggaaggttgaccagaatggaatcatctccaccctgctgggctccaatgacctcactgccgtccggccgctgagctgtgattccagcatggatgtagcccaggttcgtctggagtggccaacagaccttgctgtcaatcccatggataactccttgtatgttctagagaacaatgtcatccttcgaatcaccgagaaccaccaagtcagcatcattgcgggacgccccatgcactgccaagttcctggcattgactactcactcagcaaactagccattcactctgccctggagtcagccagtgccattgccatttctcacactggggtcctctacatcactgagacagatgagaagaagattaaccgtctacgccaggtaacaaccaacggggagatctgccttttagctggggcagcctcggactgcgactgcaaaaacgatgtcaattgcaactgctattcaggagatgatgcctacgcgactgatgccatcttgaattccccatcatccttagctgtagctccagatggtaccatttacattgcagaccttggaaatattcggatcagggcggtcagcaagaacaagcctgttcttaatgccttcaaccagtatgaggctgcatcccccggagagcaggagttatatgttttcaacgctgatggcatccaccaatacactgtgagcctggtgacaggggagtacttgtacaatttcacatatagtactgacaatgatgtcactgaattgattgacaataatgggaattccctgaagatccgtcgggacagcagtggcatgccccgtcacctgctcatgcctgacaaccagatcatcaccctcaccgtgggcaccaatggaggcctcaaagtcgtgtccacacagaacctggagcttggtctcatgacctatgatggcaacactgggctcctggccaccaagagcgatgaaacaggatggacgactttctatgactatgaccacgaaggccgcctgaccaacgtgacgcgccccacgggggtggtaaccagtctgcaccgggaaatggagaaatctattaccattgacattgagaactccaaccgtgatgatgacgtcactgtcatcaccaacctctcttcagtagaggcctcctacacagtggtacaagatcaagttcggaacagctaccagctctgtaataatggtaccctgagggtgatgtatgctaatgggatgggtatcagcttccacagcgagccccatgtcctagcgggcaccatcacccccaccattggacgctgcaacatctccctgcctatggagaatggcttaaactccattgagtggcgcctaagaaaggaacagattaaaggcaaagtcaccatctttggcaggaagctccgggtccatggaagaaatctcttgtccattgactatgatcgaaatattcggactgaaaagatctatgatgaccaccggaagttcaccctgaggatcatttatgaccaggtgggccgccccttcctctggctgcccagcagcgggctggcagctgtcaacgtgtcatacttcttcaatgggcgcctggctgggcttcagcgtggggccatgagcgagaggacagacatcgacaagcaaggccgcatcgtgtcccgcatgttcgctgacgggaaagtgtggagctactcctaccttgacaagtccatggtcctcctgcttcagagccaacgtcagtatatatttgagtatgactcctctgaccgcctccttgccgtcaccatgcccagcgtggcccggcacagcatgtccacacacacctccatcggctacatccgtaatatttacaacccgcctgaaagcaatgcttcggtcatctttgactacagtgatgacggccgcatcctgaagacctcctttttgggcaccggacgccaggtgttctacaagtatgggaaactctccaagttatcagagattgtctacgacagtaccgccgtcaccttcgggtatgacgagaccactggtgtcttgaagatggtcaacctccaaagtgggggcttctcctgcaccatcaggtaccggaagattggccccctggtggacaagcagatctacaggttctccgaggaaggcatggtcaatgccaggtttgactacacctatcatgacaacagcttccgcatcgcaagcatcaagcccgtcataagtgagactcccctccccgttgacctctaccgctatgatgagatttctggcaaggtggaacactttggtaagtttggagtcatctattatgacatcaaccagatcatcaccactgccgtgatgaccctcagcaaacacttcgacacccatgggcggatcaaggaggtccagtatgagatgttccggtccctcatgtactggatgacggtgcaatatgacagcatgggcagggtgatcaagagggagctaaaactggggccctatgccaataccacgaagtacacctatgactacgatggggacgggcagctccagagcgtggccgtcaatgaccgcccgacctggcgctacagctatgaccttaatgggaatctccacttactgaacccaggcaacagtgtgcgcctcatgcccttgcgctatgacctccgggatcggataaccagactcggggatgtgcagtacaaaattgacgacgatggctatctgtgccagagagggtctgacatcttcgaatacaattccaagggcctcctaacaagagcctacaacaaggccagcgggtggagtgtccagtaccgctatgatggcgtaggacggcgggcttcctacaagaccaacctgggccaccacctgcagtacttctactctgacctccacaacccgacgcgcatcacccatgtctacaatcactccaactcggagattacctcactgtactacgacctccagggccacctctttgccatggagagcagcagtggggaggagtactatgttgcctctgataacacagggactcctctggctgtgttcagcatcaacggcctcatgatcaaacagctgcagtacacggcctatggggagatttattatgactccaaccccgacttccagatggtcattggcttccatgggggactctatgaccccctgaccaagctggtccacttcactcagcgtgattatgatgtgctggcaggacgatggacctccccagactataccatgtggaaaaacgtgggcaaggagccggccccctttaacctgtatatgttcaagagcaacaatcctctcagcagtgagctagatttgaagaactacgtgacagatgtgaaaagctggcttgtgatgtttggatttcagcttagcaacatcattcctggcttcccgagagccaaaatgtatttcgtgcctcctccctatgaattgtcagagagtcaagcaagtgagaatggacagctcattacaggtgtccaacagacaacagagagacataaccaggccttcatggctctggaaggacaggtcattactaaaaagctccacgccagcatccgagagaaagcaggtcactggtttgccaccaccacgcccatcattggcaaaggcatcatgtttgccatcaaagaagggcgggtgaccacgggcgtgtccagcatcgccagcgaagatagccgcaaggtggcatctgtgctgaacaacgcctactacctggacaagatgcactacagcatcgagggcaaggacacccactactttgtgaagattggctcagccgatggcgacctggtcacactaggcaccaccatcggccgcaaggtgctagagagcggggtgaacgtgaccgtgtcccagcccacgctgctggtcaacggcaggactcgaaggttcacgaacattgagttccagtactccacgctgctgctcagcatccgctatggcctcacccccgacaccctggacgaagagaaggcccgcgtcctggaccaggcgagacagagggccctgggcacggcctgggccaaggagcagcagaaagccagggacgggagagaggggagccgcctgtggactgagggcgagaagcagcagcttctgagcaccgggcgcgtgcaagggtacgagggatattacgtgcttcccgtggagcaatacccagagcttgcagacagtagcagcaacatccagtttttaagacagaatgagatgggaaagaggtaacaaaataatctgctgccattccttgtctgaatggctcagcaggagtaactgttatctcctctcctaaggagatgaagacctaacaggggcactgcggctgggctgctttaggagaccaagtggcaagaaagctcacattttttgagttcaaatgctactgtccaagcgagaagtccctcatcctgaagtagactaaagcccggctgaaaattccgaggaaaacaaaacaaacgaatgaatgaacagacacacacaatgttccaagttcccctaaaatatgacccacttgttctgggtctacgcagaaaagagacgcaaagtgtccaaaaggaacaaaagaacaaaaacg

SEQ ID NO: 190092 - DNA, 10263 bp, Homo sapiens
  Payload ID: 17536
  Gene Symbol: TENM3
  Gene Name: teneurin transmembrane protein 3
  ENST ID: ENST00000406950
  CDS Start-End: 1-7590
gagcaacctgcaagcaatcaaggccagtctaccctgcagcccttgccgccttcccataagcagcactctgcacagcatcatccatccatcacttctctcaacagaaactccctgaccaatagaaggaaccagagtccggccccgccggctgctttgcccgccgagctgcaaaccacacccgagtccgtccagctgcaggacagctgggtccttggcagtaatgtaccactggaaagcaggcatttcctattcaaaacaggaacaggtacaacgccactgttcagtactgcaaccccaggatacacaatggcatctggctctgtttattcaccacctactcggccactacctagaaacaccctatcaagaagtgcttttaaattcaagaagtcttcaaagtactgtagctggaaatgcactgcactgtgtgccgtaggggtctcggtgctcctggcaatactcctgtcttattttatagcaatgcatctctttggcctcaactggcagctacagcagactgaaaatgacacatttgagaatggaaaagtgaattctgataccatgccaacaaacactgtgtcattaccttctggagacaatggaaaattaggtggatttacgcaagaaaataacaccatagattccggagaacttgatattggccgaagagcaattcaagagattcctcccgggatcttctggagatcacagctcttcattgatcagccacagtttcttaaattcaatatctctcttcagaaggatgcattgattggagtatatggccggaaaggcttaccgccttcccatactcagtatgacttcgtggagctcctggatggcagcaggctgattgccagagagcagcggagcctgcttgagacggagagagccgggcggcaggcgagatccgtcagccttcatgaggccggctttatccagtacttggattctggaatctggcatctggctttttataatgatgggaaaaatgcagagcaggtgtcttttaataccattgttatagagtctgtggtggaatgtccccgaaattgccatggaaatggagaatgcgtttctggaacttgccattgttttccaggatttctgggtccggattgttcaagagccgcctgtccagtgttatgtagtggcaacgggcagtactccaagggccgctgcctgtgtttcagcggctggaagggcaccgagtgtgatgtgccgactacccagtgtattgacccacagtgtgggggtcgtgggatttgtatcatgggctcttgtgcttgcaactcaggatacaaaggagaaagttgtgaagaagctgactgtatagaccctgggtgttctaatcatggtgtgtgtatccacggggaatgtcactgcagtccaggatggggaggtagcaattgtgaaatactgaagaccatgtgtccagaccagtgctccggccacggaacgtatcttcaagaaagtggctcctgcacgtgtgaccctaactggactggcccagactgctcaaacgaaatatgttctgtggactgtggctcacacggcgtttgcatgggggggacgtgtcgctgtgaagaaggctggacgggcccagcctgtaatcagagagcctgccacccccgctgtgccgagcacgggacctgcaaggatggcaagtgtgaatgcagccagggctggaatggagagcactgcactatcgagggttgtcctggtctgtgcaacagcaatggaagatgtaccctggaccaaaatggctggcattgtgtgtgccagcctggatggagaggagcaggctgtgacgtagccatggagactctttgcacagatagcaaggacaatgaaggagatggactcattgactgcatggatcccgattgctgcctacagagttcctgccagaatcagccctattgtcggggactgccggatcctcaggacatcattagccaaagccttcaatcgccttctcagcaagctgccaaatccttttatgatcgaatcagtttccttataggatctgatagcacccatgttatacctggagaaagtcctttcaataagagccttgcatctgtcatcagaggccaagtactgactgctgatggaactccacttattggagtaaatgtctcgtttttccattacccagaatatggatatactattacccgccaggacggaatgtttgacttggtggcaaatggtggggcctctctaactttggtatttgaacgatccccattcctcactcagtatcatactgtgtggattccatggaatgtcttttatgtgatggataccctagtcatgaagaaagaagagaatgacattcccagctgtgatctgagtggattcgtgaggccaaatcccatcattgtgtcatcacctttatccacctttttcagatcttctcctgaagacagtcccatcattcccgaaacacaggtactccacgaggaaactacaattccaggaacagatttgaaactctcctacttgagttccagagctgcagggtataagtcagttctcaagatcaccatgacccagtctattattccatttaatttaatgaaggttcatcttatggtagctgtagtaggaagactcttccaaaagtggtttcctgcctcaccaaacttggcctatactttcatatgggataaaacagatgcatataatcagaaagtctatggtctatctgaagctgttgtgtcagttggatatgagtatgagtcgtgtttggacctgactctgtgggaaaagaggactgccattctgcagggctatgaattggatgcgtccaacatgggtggctggacattagataaacatcacgtgctggatgtacagaacggtatactgtacaagggaaacggggaaaaccagttcatctcccagcagcctccagtcgtgagtagcatcatgggcaatgggcgaaggcgcagcatttcctgccccagttgcaatggtcaagctgatggtaacaagttactggccccagtggcgctagcttgtgggatcgatggcagtctgtacgtaggcgatttcaactatgtgcggcggatattcccttctggaaatgtaacaagtgtcttagaactaagcagcaacccagctcatagatactaccttgcaacggatccagtcacgggagatctgtacgtttctgacacaaacacccgcagaatttatcgcccaaagtcacttacgggggcaaaagacttgactaaaaatgcagaagtcgtcgcagggacaggggagcaatgccttccgtttgacgaggcgagatgtggggatggagggaaggccgtggaagccacactcatgagtcccaaaggaatggcagttgataagaatggattaatctactttgttgatggaaccatgattaggaaagttgaccaaaatggaatcatatcaactcttctgggctctaacgatttgacttcagccagacctttaacttgtgacaccagcatgcacatcagccaggtacgtctggaatggcccactgacctagccattaaccctatggataactccatttatgtcctggataataatgtagttttacagatcactgaaaatcgtcaagttcgcattgctgctggacggcccatgcactgtcaggttcccggagtggaatatcctgtggggaagcacgcggtgcagacaacactggaatcagccactgccattgctgtgtcctacagtggggtcctgtacattactgaaactgatgagaagaaaattaaccggataaggcaggtcacaacagatggagaaatctccttagtggccggaataccttcagagtgtgactgcaaaaatgatgccaactgtgactgttaccagagtggagatggctacgccaaggatgccaaactcagtgccccatcctccctggctgcttctccagatggtacactgtatattgcagatctagggaatatccggatccgggctgtgtcaaagaataagcctttacttaactctatgaacttctatgaagttgcgtctccaactgatcaagaactctacatctttgacatcaatggtactcaccaatatactgtaagtttagtcactggtgattacctttacaattttagctacagcaatgacaatgatattactgctgtgacagacagcaatggcaacacccttagaattagacgggacccaaatcgcatgccagttcgagtggtgtctcctgataaccaagtgatatggttgacaataggaacaaatggatgtttgaaaagcatgactgctcaaggactggaattagttttgtttacttaccatggcaatagtggccttttagccactaaaagtgatgaaactggatggacaacgttttttgactatgacagtgaaggtcgtctgacaaatgttacgtttccaactggagtggtcacaaacctgcatggggacatggacaaggctatcacagtggacattgagtcatctagccgagaagaagatgtcagcatcacttcaaatctgtcctcgatcgattctttctacaccatggttcaagatcagttaagaaacagctaccagattggttatgacggctccctcagaattatctacgccagtggcctggactcacactaccaaacagagccgcacgttctggctggcaccgctaatccgacggttgccaaaagaaacatgactttgcctggcgagaacggtcaaaacttggtggaatggagattccgaaaagagcaagcccaagggaaagtcaatgtctttggccgcaagctcagggttaatggcagaaacctcctttcagttgactttgatcgaacaacaaagacagaaaagatctatgacgaccaccgtaaatttctactgaggatcgcctacgacacgtctgggcacccgactctctggctgccaagcagcaagctgatggccgtcaatgtcacctattcatccacaggtcaaattgccagcatccagcgaggcaccactagcgagaaagtagattatgacggacaggggaggatcgtgtctcgggtctttgctgatggtaaaacatggagttacacatatttagaaaagtccatggttcttctgcttcatagccagcggcagtacatcttcgaatacgatatgtgggaccgcctgtctgccatcaccatgcccagtgtggctcgccacaccatgcagaccatccgatccattggctactaccgcaacatatacaaccccccggaaagcaacgcctccatcatcacggactacaacgaggaagggctgcttctacaaacagctttcttgggtacaagtcggagggtcttattcaaatacagaaggcagactaggctctcagaaattttatatgatagcacaagagtcagttttacctatgatgaaacagcaggagtcctaaagacagtaaacctccagagtgatggttttatttgcaccattagatacaggcaaattggtcccctgattgacaggcagattttccgctttagtgaagatgggatggtaaatgcaagatttgactatagctatgacaacagctttcgagtgaccagcatgcagggtgtgatcaatgaaacgccactgcctattgatctgtatcagtttgatgacatttctggcaaagttgagcagtttggaaagtttggagttatatattatgatattaaccagatcatttctacagctgtaatgacctatacgaagcactttgatgctcatggccgtatcaaggagattcaatatgagatattcaggtcgctcatgtactggattacaattcagtatgataacatgggtcgggtaaccaagagagagattaaaatagggccctttgccaacaccaccaaatatgcttatgaatatgatgttgatggacagctccaaacagtttacctcaatgaaaagataatgtggcggtacaactacgatctgaatggaaacctccatttactgaacccaagtaacagtgcgcgtctgacaccccttcgctatgacctgcgagacagaatcactcgactgggtgatgttcaatatcggttggatgaagatggtttcctacgtcaaaggggcacggaaatctttgaatatagctccaaggggcttctaactcgagtttacagtaaaggcagtggctggacagtgatctaccgttatgacggcctgggaaggcgtgtttctagcaaaaccagtctaggacagcacctgcagtttttttatgctgacttaacttatcccactaggattactcatgtctacaaccattcgagttcagaaattacctccctgtattatgatctccaaggacatctttttgccatggaaatcagcagtggggatgaattctatattgcatcggataacacagggacaccactggctgtgttcagtagcaatgggcttatgctgaaacagattcagtacactgcatatggggaaatctattttgactctaatattgactttcaactggtaattggatttcatggtggcctgtatgacccactcaccaaattaatccactttggagaaagagattatgacattttggcaggacggtggacaacacctgacatagaaatctggaaaagaattgggaaggacccagctccttttaacttgtacatgtttaggaataacaaccctgcaagcaaaatccatgacgtgaaagattacatcacagatgttaacagctggctggtgacatttggtttccatctgcacaatgctattcctggattccctgttcccaaatttgatttaacagaaccttcttacgaacttgtgaagagtcagcagtgggatgatataccgcccatcttcggagtccagcagcaagtggcgcggcaggccaaggccttcctgtcgctggggaagatggccgaggtgcaggtgagccggcgccgggccggcggcgcgcagtcctggctgtggttcgccacggtcaagtcgctgatcggcaagggcgtcatgctggccgtcagccagggccgcgtgcagaccaacgtgctcaacatcgccaacgaggactgcatcaaggtggcggccgtgctcaacaacgccttctacctggagaacctgcacttcaccatcgagggcaaggacacgcactacttcatcaagaccaccacgcccgagagcgacctgggcacgctgcggttgaccagcggccgcaaggcgctggagaacggcatcaacgtgacggtgtcgcagtccaccacggtggtgaacggcaggacgcgcaggttcgcggacgtggagatgcagttcggcgcgctggcgctgcacgtgcgctacggcatgaccctggacgaggagaaggcgcgcatcctggagcaggcgcggcagcgcgcgctcgcccgggcctgggcgcgcgagcagcagcgcgtgcgcgacggcgaggagggcgcgcgcctctggacggagggcgagaagcggcagctgctgagcgccggcaaggtgcagggctacgacgggtactacgtactctcggtggagcagtaccccgagctggccgacagcgccaacaacatccagttcctgcggcagagcgagatcggcaggaggtaacgcccgggccgcgcccgccgagccgctcacgccctgcccacattgtcctgtggcacaacccgagtgggactctccaacgcccaagagccttcctcccgggggaatgagactgctgttacgacccacacccacaccgcgaaaacaaggaccgcttttttccgaatgaccttaaaggtgatcggctttaacgaatatgtttacatatgcatagcgctgcactcagtcggactgaacgtagccagaggaaaaaaaaatcatcaaggacaaaggcctcgacctgttgcgctgggccgtctgttccttctaggcactgtatttaactaactttaaaaaagaaaaaaaaatgtgtacagtgtttccaaatagtcccgaattgtcgacctttgcttacaagaagtagtctgtctgcataggatgtgatagctatctctgttcattttacaatgtggggcaaagttactgtttctagacaacccaactgctttccctgtgcagctttgtagaaggacattggcacagtgacttctgcggcggggatttattaatggattttacaatgctaacgtggtttcccttcggggaaaaaactggcaactagaatccttgtcactgataagcaaaggaaatcctgatttttttgtaaattatgtgagacaagttgtttatggatttttatatgaattacaatttactgtacatcaaatcttagtctcagaggagttaatttatgtaaagtgtttaaaaatttatacttaaaaataaaatgataaaaacgtgaactgtgtgatttttttaaaaggattgcaccttttgttatctgttatagctgtacagtatgaattattatattgtagagatataacaacttatgcctataatgtccagaagtgttaatatttttgtattaggttgaaaaaatgtgcaagcttctatcactagatggataggaccgtgcaattctaggtgggtggcgaatcagagagctcctttctcttccctctctcacgcatcaggccagtgtcctcagcattgtcaactgagaggcacagtagacaactagggctggtggaatgtaagggaagaagattgaaaaaacgggaggaagggttctctggccctctctcaaccttgcaagtcaatggggagttgttgatataattaaccccgaggtttttactgttactgttccaaagctctgtctcttgatggaggagagaccacatcagatgctggggaaataggaggaggaaaggttctgatgtagtcgtgatcctaaacacgtgtcttaagatctaggaaagacagcagaaaccgagcagtggtgggtgagccagatggagccggtcagggttactctaagcccacatgaccaaaccatcttggggggctggtttgaatgacagcctctgctctgtctcggggaagccgggggtggcagatccagctggaagtgaactgacagccgcgccctcctgcacacatgcatgcacgcgtgtgggaacgagcccagccgccatctgcacttccgtgtcggctcagctctgacaaatctctttcctgagcactaaattcagccacgaaaatatttttagaagatatttctcagttcatcgagctatagtacacactgttttcctctatgtataatggtgataaaatatagcaagtgaacatgtcgtaaatataaaggttcaagtgatgtattgaaaataattttctaactgctttgtatgtatcacatactctaaattgcacagtaggcgtgtttattaaacagatgattggctgggaaagtttcaaaatagctactgaatttacagtatcagtgctattactgtctttgtgtatttggtagagcataccgaagtaattaatcttctaatgaatgctgatgatattttattagaatgaaagcacagattagcattaatattttttattctggaaatcctttggcaagtattatgaagcccaaatttagaaaactatgagatttcaaaccacataaacatgattctgttttccattttattttttaactgttaggtatttgcagttctgttccgtggaacttctgcaggcctgtatttagcatgctgtaagtacttttgggtgaaataggctctgagtctaaattctcagacatgtttctgatgtattaccatgaaaagcttgtgccacatgacagaagtgagatcatagtcttaacctcttcttgacgtggactggtcttcactcgggcaccgataaataacagatttggagtatctcctggtgcttattttagatgatgaagtcaaatcaacccaattagtgtcctgttagtaggtataatgagcctatttctttctaaaaagacttgtgatctggacatgcttttacaagaaatagtgaccttggggaatatgtaaacaaaagacctttttctaagagttgggagggggtgggggactgtataatgaaaagaattagcttacaaaaaagaaattgatattcaaagtattttaggcaaagccagtcaaaatgctttcatgatattttgagatgtaaattttgtctgatttgtattgttcttttcatttgccttcttaactttatatgtgacctgaattttccataacttgatgactatagattgcacctaggcattccaataaaagccaacccaatgtg

SEQ ID NO: 190093 - DNA, 651 bp, Homo sapiens
  Payload ID: 17536
  Gene Symbol: TENM3
  Gene Name: teneurin transmembrane protein 3
  ENST ID: ENST00000512480
  CDS Start-End: 141-651
cggctcgggcggacgcggcggctgctgccggggagcgagccggcggcgcgggcgagccgagcgcgagaggccaatgagacttgaaccctgagcctaagttgtcaccagcaggactgatgtgcacacagaaggaatgaagtatggatgtgaaagaacgcaggccttactgctccctgaccaagagcagacgagagaaggaacggcgctacacaaattcctccgcagacaatgaggagtgccgggtacccacacagaagtcctacagttccagcgagacattgaaagcttttgatcatgattcctcgcggctgctttacggcaacagagtgaaggatttggttcacagagaagcagacgagttcactagacaaggacagaattttaccctaaggcagttaggagtttgtgaaccagcaactcgaagaggactggcattttgtgcggaaatggggctccctcacagaggttactctatcagtgcagggtcagatgctgatactgaaaatgaagcagtgatgtccccagagcatgccatgagactttggggcaggggggtcaaatcaggccgcagctcctgcctgtcaagtcggtccaactcagccctcaccctgacagatacggagcacgaaaacaagtccgacagtgagaatg

SEQ ID NO: 190094 - DNA, 10896 bp, Homo sapiens
  Payload ID: 17536
  Gene Symbol: TENM3
  Gene Name: teneurin transmembrane protein 3
  Uniprot ID: Q9P273
  ENST ID: ENST00000511685
  CDS Start-End: 124-8223
atgggtctggagcttggaggagaagtctgaactaaggataaactaaagagaggccaatgagacttgaaccctgagcctaagttgtcaccagcaggactgatgtgcacacagaaggaatgaagtatggatgtgaaagaacgcaggccttactgctccctgaccaagagcagacgagagaaggaacggcgctacacaaattcctccgcagacaatgaggagtgccgggtacccacacagaagtcctacagttccagcgagacattgaaagcttttgatcatgattcctcgcggctgctttacggcaacagagtgaaggatttggttcacagagaagcagacgagttcactagacaaggacagaattttaccctaaggcagttaggagtttgtgaaccagcaactcgaagaggactggcattttgtgcggaaatggggctccctcacagaggttactctatcagtgcagggtcagatgctgatactgaaaatgaagcagtgatgtccccagagcatgccatgagactttggggcaggggggtcaaatcaggccgcagctcctgcctgtcaagtcggtccaactcagccctcaccctgacagatacggagcacgaaaacaagtccgacagtgagaatgagcaacctgcaagcaatcaaggccagtctaccctgcagcccttgccgccttcccataagcagcactctgcacagcatcatccatccatcacttctctcaacagaaactccctgaccaatagaaggaaccagagtccggccccgccggctgctttgcccgccgagctgcaaaccacacccgagtccgtccagctgcaggacagctgggtccttggcagtaatgtaccactggaaagcaggcatttcctattcaaaacaggaacaggtacaacgccactgttcagtactgcaaccccaggatacacaatggcatctggctctgtttattcaccacctactcggccactacctagaaacaccctatcaagaagtgcttttaaattcaagaagtcttcaaagtactgtagctggaaatgcactgcactgtgtgccgtaggggtctcggtgctcctggcaatactcctgtcttattttatagcaatgcatctctttggcctcaactggcagctacagcagactgaaaatgacacatttgagaatggaaaagtgaattctgataccatgccaacaaacactgtgtcattaccttctggagacaatggaaaattaggtggatttacgcaagaaaataacaccatagattccggagaacttgatattggccgaagagcaattcaagagattcctcccgggatcttctggagatcacagctcttcattgatcagccacagtttcttaaattcaatatctctcttcagaaggatgcattgattggagtatatggccggaaaggcttaccgccttcccatactcagtatgacttcgtggagctcctggatggcagcaggctgattgccagagagcagcggagcctgcttgagacggagagagccgggcggcaggcgagatccgtcagccttcatgaggccggctttatccagtacttggattctggaatctggcatctggctttttataatgatgggaaaaatgcagagcaggtgtcttttaataccattgttatagagtctgtggtggaatgtccccgaaattgccatggaaatggagaatgcgtttctggaacttgccattgttttccaggatttctgggtccggattgttcaagagccgcctgtccagtgttatgtagtggcaacgggcagtactccaagggccgctgcctgtgtttcagcggctggaagggcaccgagtgtgatgtgccgactacccagtgtattgacccacagtgtgggggtcgtgggatttgtatcatgggctcttgtgcttgcaactcaggatacaaaggagaaagttgtgaagaagctgactgtatagaccctgggtgttctaatcatggtgtgtgtatccacggggaatgtcactgcagtccaggatggggaggtagcaattgtgaaatactgaagaccatgtgtccagaccagtgctccggccacggaacgtatcttcaagaaagtggctcctgcacgtgtgaccctaactggactggcccagactgctcaaacgaaatatgttctgtggactgtggctcacacggcgtttgcatgggggggacgtgtcgctgtgaagaaggctggacgggcccagcctgtaatcagagagcctgccacccccgctgtgccgagcacgggacctgcaaggatggcaagtgtgaatgcagccagggctggaatggagagcactgcactatcgagggttgtcctggtctgtgcaacagcaatggaagatgtaccctggaccaaaatggctggcattgtgtgtgccagcctggatggagaggagcaggctgtgacgtagccatggagactctttgcacagatagcaaggacaatgaaggagatggactcattgactgcatggatcccgattgctgcctacagagttcctgccagaatcagccctattgtcggggactgccggatcctcaggacatcattagccaaagccttcaatcgccttctcagcaagctgccaaatccttttatgatcgaatcagtttccttataggatctgatagcacccatgttatacctggagaaagtcctttcaataagagccttgcatctgtcatcagaggccaagtactgactgctgatggaactccacttattggagtaaatgtctcgtttttccattacccagaatatggatatactattacccgccaggacggaatgtttgacttggtggcaaatggtggggcctctctaactttggtatttgaacgatccccattcctcactcagtatcatactgtgtggattccatggaatgtcttttatgtgatggataccctagtcatgaagaaagaagagaatgacattcccagctgtgatctgagtggattcgtgaggccaaatcccatcattgtgtcatcacctttatccacctttttcagatcttctcctgaagacagtcccatcattcccgaaacacaggtactccacgaggaaactacaattccaggaacagatttgaaactctcctacttgagttccagagctgcagggtataagtcagttctcaagatcaccatgacccagtctattattccatttaatttaatgaaggttcatcttatggtagctgtagtaggaagactcttccaaaagtggtttcctgcctcaccaaacttggcctatactttcatatgggataaaacagatgcatataatcagaaagtctatggtctatctgaagctgttgtgtcagttggatatgagtatgagtcgtgtttggacctgactctgtgggaaaagaggactgccattctgcagggctatgaattggatgcgtccaacatgggtggctggacattagataaacatcacgtgctggatgtacagaacggtatactgtacaagggaaacggggaaaaccagttcatctcccagcagcctccagtcgtgagtagcatcatgggcaatgggcgaaggcgcagcatttcctgccccagttgcaatggtcaagctgatggtaacaagttactggccccagtggcgctagcttgtgggatcgatggcagtctgtacgtaggcgatttcaactatgtgcggcggatattcccttctggaaatgtaacaagtgtcttagaactaagcagcaacccagctcatagatactaccttgcaacggatccagtcacgggagatctgtacgtttctgacacaaacacccgcagaatttatcgcccaaagtcacttacgggggcaaaagacttgactaaaaatgcagaagtcgtcgcagggacaggggagcaatgccttccgtttgacgaggcgagatgtggggatggagggaaggccgtggaagccacactcatgagtcccaaaggaatggcagttgataagaatggattaatctactttgttgatggaaccatgattaggaaagttgaccaaaatggaatcatatcaactcttctgggctctaacgatttgacttcagccagacctttaacttgtgacaccagcatgcacatcagccaggtacgtctggaatggcccactgacctagccattaaccctatggataactccatttatgtcctggataataatgtagttttacagatcactgaaaatcgtcaagttcgcattgctgctggacggcccatgcactgtcaggttcccggagtggaatatcctgtggggaagcacgcggtgcagacaacactggaatcagccactgccattgctgtgtcctacagtggggtcctgtacattactgaaactgatgagaagaaaattaaccggataaggcaggtcacaacagatggagaaatctccttagtggccggaataccttcagagtgtgactgcaaaaatgatgccaactgtgactgttaccagagtggagatggctacgccaaggatgccaaactcagtgccccatcctccctggctgcttctccagatggtacactgtatattgcagatctagggaatatccggatccgggctgtgtcaaagaataagcctttacttaactctatgaacttctatgaagttgcgtctccaactgatcaagaactctacatctttgacatcaatggtactcaccaatatactgtaagtttagtcactggtgattacctttacaattttagctacagcaatgacaatgatattactgctgtgacagacagcaatggcaacacccttagaattagacgggacccaaatcgcatgccagttcgagtggtgtctcctgataaccaagtgatatggttgacaataggaacaaatggatgtttgaaaagcatgactgctcaaggactggaattagttttgtttacttaccatggcaatagtggccttttagccactaaaagtgatgaaactggatggacaacgttttttgactatgacagtgaaggtcgtctgacaaatgttacgtttccaactggagtggtcacaaacctgcatggggacatggacaaggctatcacagtggacattgagtcatctagccgagaagaagatgtcagcatcacttcaaatctgtcctcgatcgattctttctacaccatggttcaagatcagttaagaaacagctaccagattggttatgacggctccctcagaattatctacgccagtggcctggactcacactaccaaacagagccgcacgttctggctggcaccgctaatccgacggttgccaaaagaaacatgactttgcctggcgagaacggtcaaaacttggtggaatggagattccgaaaagagcaagcccaagggaaagtcaatgtctttggccgcaagctcagggttaatggcagaaacctcctttcagttgactttgatcgaacaacaaagacagaaaagatctatgacgaccaccgtaaatttctactgaggatcgcctacgacacgtctgggcacccgactctctggctgccaagcagcaagctgatggccgtcaatgtcacctattcatccacaggtcaaattgccagcatccagcgaggcaccactagcgagaaagtagattatgacggacaggggaggatcgtgtctcgggtctttgctgatggtaaaacatggagttacacatatttagaaaagtccatggttcttctgcttcatagccagcggcagtacatcttcgaatacgatatgtgggaccgcctgtctgccatcaccatgcccagtgtggctcgccacaccatgcagaccatccgatccattggctactaccgcaacatatacaaccccccggaaagcaacgcctccatcatcacggactacaacgaggaagggctgcttctacaaacagctttcttgggtacaagtcggagggtcttattcaaatacagaaggcagactaggctctcagaaattttatatgatagcacaagagtcagttttacctatgatgaaacagcaggagtcctaaagacagtaaacctccagagtgatggttttatttgcaccattagatacaggcaaattggtcccctgattgacaggcagattttccgctttagtgaagatgggatggtaaatgcaagatttgactatagctatgacaacagctttcgagtgaccagcatgcagggtgtgatcaatgaaacgccactgcctattgatctgtatcagtttgatgacatttctggcaaagttgagcagtttggaaagtttggagttatatattatgatattaaccagatcatttctacagctgtaatgacctatacgaagcactttgatgctcatggccgtatcaaggagattcaatatgagatattcaggtcgctcatgtactggattacaattcagtatgataacatgggtcgggtaaccaagagagagattaaaatagggccctttgccaacaccaccaaatatgcttatgaatatgatgttgatggacagctccaaacagtttacctcaatgaaaagataatgtggcggtacaactacgatctgaatggaaacctccatttactgaacccaagtaacagtgcgcgtctgacaccccttcgctatgacctgcgagacagaatcactcgactgggtgatgttcaatatcggttggatgaagatggtttcctacgtcaaaggggcacggaaatctttgaatatagctccaaggggcttctaactcgagtttacagtaaaggcagtggctggacagtgatctaccgttatgacggcctgggaaggcgtgtttctagcaaaaccagtctaggacagcacctgcagtttttttatgctgacttaacttatcccactaggattactcatgtctacaaccattcgagttcagaaattacctccctgtattatgatctccaaggacatctttttgccatggaaatcagcagtggggatgaattctatattgcatcggataacacagggacaccactggctgtgttcagtagcaatgggcttatgctgaaacagattcagtacactgcatatggggaaatctattttgactctaatattgactttcaactggtaattggatttcatggtggcctgtatgacccactcaccaaattaatccactttggagaaagagattatgacattttggcaggacggtggacaacacctgacatagaaatctggaaaagaattgggaaggacccagctccttttaacttgtacatgtttaggaataacaaccctgcaagcaaaatccatgacgtgaaagattacatcacagatgttaacagctggctggtgacatttggtttccatctgcacaatgctattcctggattccctgttcccaaatttgatttaacagaaccttcttacgaacttgtgaagagtcagcagtgggatgatataccgcccatcttcggagtccagcagcaagtggcgcggcaggccaaggccttcctgtcgctggggaagatggccgaggtgcaggtgagccggcgccgggccggcggcgcgcagtcctggctgtggttcgccacggtcaagtcgctgatcggcaagggcgtcatgctggccgtcagccagggccgcgtgcagaccaacgtgctcaacatcgccaacgaggactgcatcaaggtggcggccgtgctcaacaacgccttctacctggagaacctgcacttcaccatcgagggcaaggacacgcactacttcatcaagaccaccacgcccgagagcgacctgggcacgctgcggttgaccagcggccgcaaggcgctggagaacggcatcaacgtgacggtgtcgcagtccaccacggtggtgaacggcaggacgcgcaggttcgcggacgtggagatgcagttcggcgcgctggcgctgcacgtgcgctacggcatgaccctggacgaggagaaggcgcgcatcctggagcaggcgcggcagcgcgcgctcgcccgggcctgggcgcgcgagcagcagcgcgtgcgcgacggcgaggagggcgcgcgcctctggacggagggcgagaagcggcagctgctgagcgccggcaaggtgcagggctacgacgggtactacgtactctcggtggagcagtaccccgagctggccgacagcgccaacaacatccagttcctgcggcagagcgagatcggcaggaggtaacgcccgggccgcgcccgccgagccgctcacgccctgcccacattgtcctgtggcacaacccgagtgggactctccaacgcccaagagccttcctcccgggggaatgagactgctgttacgacccacacccacaccgcgaaaacaaggaccgcttttttccgaatgaccttaaaggtgatcggctttaacgaatatgtttacatatgcatagcgctgcactcagtcggactgaacgtagccagaggaaaaaaaaatcatcaaggacaaaggcctcgacctgttgcgctgggccgtctgttccttctaggcactgtatttaactaactttaaaaaagaaaaaaaaatgtgtacagtgtttccaaatagtcccgaattgtcgacctttgcttacaagaagtagtctgtctgcataggatgtgatagctatctctgttcattttacaatgtggggcaaagttactgtttctagacaacccaactgctttccctgtgcagctttgtagaaggacattggcacagtgacttctgcggcggggatttattaatggattttacaatgctaacgtggtttcccttcggggaaaaaactggcaactagaatccttgtcactgataagcaaaggaaatcctgatttttttgtaaattatgtgagacaagttgtttatggatttttatatgaattacaatttactgtacatcaaatcttagtctcagaggagttaatttatgtaaagtgtttaaaaatttatacttaaaaataaaatgataaaaacgtgaactgtgtgatttttttaaaaggattgcaccttttgttatctgttatagctgtacagtatgaattattatattgtagagatataacaacttatgcctataatgtccagaagtgttaatatttttgtattaggttgaaaaaatgtgcaagcttctatcactagatggataggaccgtgcaattctaggtgggtggcgaatcagagagctcctttctcttccctctctcacgcatcaggccagtgtcctcagcattgtcaactgagaggcacagtagacaactagggctggtggaatgtaagggaagaagattgaaaaaacgggaggaagggttctctggccctctctcaaccttgcaagtcaatggggagttgttgatataattaaccccgaggtttttactgttactgttccaaagctctgtctcttgatggaggagagaccacatcagatgctggggaaataggaggaggaaaggttctgatgtagtcgtgatcctaaacacgtgtcttaagatctaggaaagacagcagaaaccgagcagtggtgggtgagccagatggagccggtcagggttactctaagcccacatgaccaaaccatcttggggggctggtttgaatgacagcctctgctctgtctcggggaagccgggggtggcagatccagctggaagtgaactgacagccgcgccctcctgcacacatgcatgcacgcgtgtgggaacgagcccagccgccatctgcacttccgtgtcggctcagctctgacaaatctctttcctgagcactaaattcagccacgaaaatatttttagaagatatttctcagttcatcgagctatagtacacactgttttcctctatgtataatggtgataaaatatagcaagtgaacatgtcgtaaatataaaggttcaagtgatgtattgaaaataattttctaactgctttgtatgtatcacatactctaaattgcacagtaggcgtgtttattaaacagatgattggctgggaaagtttcaaaatagctactgaatttacagtatcagtgctattactgtctttgtgtatttggtagagcataccgaagtaattaatcttctaatgaatgctgatgatattttattagaatgaaagcacagattagcattaatattttttattctggaaatcctttggcaagtattatgaagcccaaatttagaaaactatgagatttcaaaccacataaacatgattctgttttccattttattttttaactgttaggtatttgcagttctgttccgtggaacttctgcaggcctgtatttagcatgctgtaagtacttttgggtgaaataggctctgagtctaaattctcagacatgtttctgatgtattaccatgaaaagcttgtgccacatgacagaagtgagatcatagtcttaacctcttcttgacgtggactggtcttcactcgggcaccgataaataacagatttggagtatctcctggtgcttattttagatgatgaagtcaaatcaacccaattagtgtcctgttagtaggtataatgagcctatttctttctaaaaagacttgtgatctggacatgcttttacaagaaatagtgaccttggggaatatgtaaacaaaagacctttttctaagagttgggagggggtgggggactgtataatgaaaagaattagcttacaaaaaagaaattgatattcaaagtattttaggcaaagccagtcaaaatgctttcatgatattttgagatgtaaattttgtctgatttgtattgttcttttcatttgccttcttaactttatatgtgacctgaattttccataacttgatgactatagattgcacctaggcattccaataaaagccaacccaatgtg

SEQ ID NO: 190095 - DNA, 548 bp, Homo sapiens
  Payload ID: 17536
  Gene Symbol: TENM3
  Gene Name: teneurin transmembrane protein 3
  ENST ID: ENST00000510504
  CDS Start-End: 1-548
gtaacacgatacgctccagacccaggcaacttggcagcgctgggctcggttcctcacggccacagcgagggcgcgccgcggcaagagcaacctgcaagcaatcaaggccagtctaccctgcagcccttgccgccttcccataagcagcactctgcacagcatcatccatccatcacttctctcaacagaaactccctgaccaatagaaggaaccagagtccggccccgccggctgctttgcccgccgagctgcaaaccacacccgagtccgtccagctgcaggacagctgggtccttggcagtaatgtaccactggaaagcaggcatttcctattcaaaacaggaacaggtacaacgccactgttcagtactgcaaccccaggatacacaatggcatctggctctgtttattcaccacctactcggccactacctagaaacaccctatcaagaagtgcttttaaattcaagaagtcttcaaagtactgtagctggaaatgcactgcactgtgtgccgtaggggtctcggtgctcctggcaatactcct
